United States Patent Application Publication US 2005/0255478 A1 - sequence listing, part 2

SEQ ID NO: 3547 - DNA, 2825 bp, Artificial Sequence
  Description of Artificial Sequence: synthetic nucleic acid sequence
ctaataataatgttaagtaaatcaaaactgtcatgattaatgcgcctaaccaagtaggaattccaaaactttgctcaaaagtagaacctgatccggctatcatagtgacagctataccaaataagaaaaagacaagaatataatcaaaaactttactaaatttttttccaaacacatattgcaatgtggactcgtgatttttcgcttcaaatgcagtacctatcttagctacttgtcttcctatgaatccaagtataaatcctgagataatcactccaatatatgaccataaaccaaatggtgtgaaaaattgcatcacttcttgtcctgttgaaaatcctgcgccgacaacaatgccgacataggcaaaaccaatttttatagcttctttattcagccccatgtgaatatttacctccttagagttgcacagtgagaattataacgtactgactttttattgcaaccctaaaaaaatgtataaatttagctattctgtatttttaatcattttagaaaacgatttttcaggaatcaatataaataaaaatgtataatcaaacgtaatcatgtataaaaaaatagtcgcaaaagtttcaataaacttgagcgactataactcattttttagcgtgcatctctttgattgttcaattcattaatgtctacaactacattatccatacgttttgctgtatctttaagtacatttcgtgcaacattattacttggatcgagttttagaattcgtttagcgacatcaaacgcttttttatccgaaataactggctcaggaatagcatgaagcaataacatttgtaataaactcttcacttcatttccgtcagtaagttttatggaagaatctgcatgataataagctgaatctagtgcgccctcatattcacttaaaggataaacaagtaaaaggaatgctaaatcatgtaattctgatgattcttctaccttaatcatatctagaatacatgtataaaacatcatactctctacttcatgagcactagagatgtatgcttcttcaaattccataaaatctgtttcggacattaactgtctaactagttcaaactcgccattcaatacatgtttttttataagatgttgcatggcaatgtcctcctattgtccagattttatatagcaattattattataataccataattacctttaaatttcatttaaaaaatgatactcaacgttttgtatcgtaaaattacaatatattttcaaacatcttttctttatatgtatacgtcttattataacaataataaatgtataaatggtgaactttaaaaattattgtggttcacgtgataaaattattcaaactatggttatgatataaaaaaatgctcaaaacaattatcattttgagcattttttattatcatatcttatcaataagactgtattcattgaatcacgaatacgtctgacagaataaatcgtaagtaactaaaattggtttccctgttctcggatctatatctaaaacaccatcaatattaaataccttttctaaaatgtccttagttaacacttcatcagtttgaccagtagcaacaatatctccagctttcatcgtaatgagatgatctgagaagcgaattgcttgattaatgtcatgtaaaaccatcacaatagtgcaaccttcttcttcgttgagctttttgactaaatttaatatttctaattgatgacaaatatctaaataagttgtaggttcatctaagaaaataatatcagtacgttgggctagtgccattgcaatccacacgcgttgtctttgtccaccacttaaatcatttatagtacgatgacgaaattcacttgtacctgtaactgacaatgcccaatcaatttcttttttatcttctgcagttaaacgaccaaatcctttttgatgtggaaaacgcccataagaaacaagttctcctacagtaagtccatctgggacctctggtgattgtggtaaaattgctatttttttagctatttctttcgtggatgtggcatgaatactcttaccatccaaattaattttaccttctttaattgacaatagtctagataacgctttcaataaagttgatttcccacacccgttaggtccaataatagaagtaacctttccatcaggaattgcgacatccaaattattaataatcgtagaatcaccgtagccaattttcacttgttcaccacttaaacgactcataataattcccctactttcattctctaaaatcttgctttatatatagtaaaaacattgttattaattaagttattcactcattatcagtcacaaacttgtaattgataatcattatcacagtttttattataacatctcttctatattatgactaacaattattttcactaggttatatattatattcgtaaatgagtagtagtaaattaagcgagtagtactgtccttaataaataagtagagaacagtatgataataaaaagcccaaaatgactttaactaagcaatcattttagacttcatttaaaaaagtgccttacattttaacaactttttaactttataatatattgatattttactcatctaacaaaaaaccattaccatatacatcacgaacgtcatgaataactaaaaaggcattttcgtcaatatttttgatgattcgtttagcacgagatacttgtgttttagagatgactacgtaaagtacatctttttcttctctagtgtaataaccgtgtccatttaatattgttaatcctcttccaacttgctgatcaatagcttttgctacctc

SEQ ID NO: 3548 - DNA, 3149 bp, Artificial Sequence
  Description of Artificial Sequence: synthetic nucleic acid sequence
tgtcgaacccatggttgaaaccagatgaacaccaatcaaatttcttaactggaagagaattacttatagctaatcgttttcctgtcattgttcatgaggcaagtgttacaaacaaattagaacaactttttaatatagtgggtagggaaattccaccacatacttataaatttaaagatcaagaaacatatgaaagcttgataaggaatttagctcttcatcaaggtaaaaaaatctactttcaatatattcatgatgaagatattttacctaaagaatattatgcacttgataaagatgtttttgttgctcttaataataaagcacgaattccagaatggactaataacaaatatctaccacaaagagaaattgtctcaattaaagattttgaatctcatattcaagcatggtcgtatccatttgtcataaaaccaggcgatgatttacctacagcaggaggatatggtgttatgatttgttataatgatacagatttagctaaagctatcacacgcatcaacaatgcatcagcagagactgaaaatttaatcattgaacaaaaaattaatgcagtgaataactattgtgtacaatttgcttattcagatgatattggtatcaaatacttaggaacagcgcaacagttaactaatgactatggattttacaacggaaatgaaaatgttaatgatgtgcctcagaatgtaatagacgctggtagagagattatggaaataggcgtaagcaaaggtttttttggtgtagcaggttttgacttactagtagatgataataatgatgtttatgcgattgatttaaactttaggcaaaacggatcaacgagtatgctacttttagcaaaagatttaactcatggatatcataaattttacagttacttttctaatggagataatacaaaattctataatgctattttaaaatacgtagaattaggtgtactttatccactttcctattacgatggagattggtatggaaagaatcaagttaattctagatttggctgcatttggcatggggaaaataaagaattaattaatcgatatgaacaacaatttatattggaagctggattataagtgtatgattctttaagaatattaagtagtgtttgataaaaaagttagaataatcaatcatgtcccagtttacaaataagatttgaattttaacattatgactatcaatcgttagtattttaagatttaaagtaagaaacactatgaataacttatgaattgagggttaagtatgtcatacaaatatgaagcattttttaaagatattttgattaatgaatatatttattttgcttcaaaaaataaaaaattaattagaatacaacatgagaatttgccatatattgctatgtggacagacgaaaatgttgctgagtcttatttgttacatcattcaattgattacgacaaaatcattagagcagatattgaccgttttgtaacatatgaaatggatgaaatctttgatccaggtgacaaagttttagttaatgtgaataatggtgaagaaggaaacattgtagatatagttaaaatgactgatgagttgatgtctgaattagatgatataagaatgagagagtttattaaagatgtcgcaaaatatgacgaagtatacggattgacaaacaaaggtgaaaagaattttattatgatttcagatgatgaccataacaaaccacacatcatgcctgtttggagtattaagagtagagcgcgtaaagtacgtgatcaagattttgaagaatgtgatttaatcgaaattgaaggtgaagtctttagtgaatggttagacaagttacgcgatgataataaagcagtagcgattgatttgaaatcaggtgttgttggtactgttgtatcagcgcaaaaactgtcaaatgaagcaacattttaattgattatattagaaaaagtctgcgacatgtttatagtatttacaccccataagttagattttaatttaacttttggggtgcttttttataaacgaacattataaatttgatattaaaaagatgtttgaagctaaaaactgaaaaaattcaacgtataaagtaagttagatggtaagggaagtaacaatccataccaatttgcttccagccatttttctattagaggtaaagtgctcctaaagcgcctgaaaaagcaccattctcaatatagtacggtttaaatcctcttagaacagtgtaattttcaacaacttcacgtagtaattgattgttattaaatgatgaaccgatatatacaacgtgcttagtcttatattcacgtgctaatgtaatagccatagttgttataacttcaccaacgacgccaattgcagaggcaagtttgttagctgatgtaaactgattatctaagtgatgtaatacatttccaaaatttgctgctgttaaatctccaggaattggtggttcagtatctttataaatatgttttacttttaaatcaatggcatcacgatctccattttgagctaaattcgttaattctttataatctgttatattggacaataaatagcctaaaccttgtatcatcccgcctccggtacctacacctccaacacgttgctggtcttttccatcaaaatagtggaaagaagtacctgtacctacattagcaaaaatgtaatgttcaatttgatgaccttgttcatccaataaaatttctaaaccttttgatgatgcatcgaactctacaaatatttcaggggaatgatgaatttgatctgctattactccagcatttccacctgtaagctttaatgtttcgatttcttcattgttaagccaatctatgactttttggatattagttgttaattcagttctgtaatatctacgattgtcatcctttatttatattgcatttcattaaatggaagctcatattgtgattgtgtaaaggataatttttgtaaatctttaggtgcaacaacagtcattctgccgtgagtaattggaataaagacaccttcatcgtcaacttgttttaaaatttgctgatacgcttttgaacgtgcctttgcatcttgaattttgaaagcatcatcaatatctttgtacagttgtgtcttattcttaataccta

SEQ ID NO: 3549 - DNA, 3520 bp, Artificial Sequence
  Description of Artificial Sequence: synthetic nucleic acid sequence
gcatttccagtatttactagttatacagcatatcgaaatgctcatcattgtactggattttttaaaactacattgcctggcttttatagtgtagttaaagatatttttacaccgaactatgaaaggaaagagagttagaatatgttgcaacctttgatacatggactattattagctttaggtttaattttacctttaggggctcaaaatgtgtttgtatttaatcaaggagctaaccaaaaaaaattagtaaagcattacctgtaattataacagctggactgtgtgatacttttttaattgtaatagctattttaggagtatctttaatactaatatctatgccaactttacaactttttatttacatcatcgggtttttgtttttgatgtatatggcatggtctttatggacggaaaagccttcaaatatcgaagaaatagaacctatgtcagctaaaaagcagattttatttgctttatctgtttctttattaaatcttcatgcaataatggatactgttggtgttatcggaacgagtgcttcagtttatgatggttatgacaaagttgttttttcattggctacaatttctgtatcttggatttggtttgtctttttagctattttaggaagaattacaggaaaaattgataaaagtggtaagtatatcgttattttaaataaagtttctagcgttattgttattattgtaggattaattatattaaaaaatattgttggaattttaagttagagcgaaggcaaactgatggatgtacataacacgtaaagcactgttcaaaatagggcagtgctttacgtgttataatgtatctgttttatttttagaactatgatattcaacttttgcgtgtttttcttcatttgctctgtcgaactcctcaaattctacaaacaaatgtgtatgtttattattatcaccacgtaaaagtattaacgataatactgaaggtttctccacactgcgatattttcatcaagatttaaatcttgatgaaaatattatgagcaaaaggaaatctgttttaataaataaactagaaaaaatggggagagtaagtttttttaaaactagctagtactgtcgaaaacactgagaaagtctcaaaactatataactataaatctcttttggaaatagacggtcgtttagacctaaaaagtaattttgataatcctaaactaatattgaatactaaagttaataataaaagtttaaatcaatatttaatattttagtaaattaagaatgaggaaaataagagaaacgtaccaaagatgtagttcgataagttgagcaattggcatgtgcataacaatacaaaaagaatatttttggcaacggacaatataaaaaacggaattgctaatcaattccgttttttatatttctatttgtgattgtttttattgctatcgttagaatttttggaaataaggtttcgtatcattttgacaatataaccggaaactaaaattctaataactctcttaataatattctgcatgttaactccccttatattttgtttgatattttatacccagtttttgtaggagctaaaagtaaaatttgtttttttggaaaatatgaagaaatatttttagatgttattttttatcaaaagttatgtagccgtattcatctgcttttttagtaaaaataacaatgatagcatgaatgattgcgacaacacttggaatgccagtccagaaaaagacgagatgtagaataccttgtccaacttggtcggcataaaatttatgcacgcccagaccacctaaaatcaatgcaactataatataaattgttttgttaactttcattatgtctacctccgtatggttattttagtttttagtcttatctttatttttacagataattatttagtttatcaaagtaaaagtattaaagaagatgttatgatataaagtgaaggtttcaatttatagtgattgtttaattttaagatgtcaacattatgtcgtatttattttttatttagaaattgagtataaactttagctatcaatatctaaaaggggagtcaaatgtgattagaaaagcgaaaacgagtgataatcgacagattgcagagttatgttaccttatttggagagatatggaattagatattaccaaggaaataactaaagatcgtattattgaagcgatagaattaagtattgtgaatgtgagatatcggtcgttttatgagcatatttgggtatatgagaaagacggggttgttgctggatgtgtaattgcgtatcctgggaaagaggaaatggattttgaacaacaatggcttaagttaccacttgaagaagatatccttcagttaggtacaccattacctgaaaaagaatcatacgatgatgaaatatatatagaagcagtagtaacgactccaaaatatcgaggacaaggtattgcaacacaacttttaaagtatgtaatttccactcatgcacatgaaaaatggggattgaattgtgattatgataataataaagcacgccacctatatcacaaattagggtttaaagaggatgcgacaattcgtttatatggccatcaatattttcatatgacattgaataataagtaacatcacatcataatgaaaggtgtgtgatgtatataaatgaataaacattaattttgtttacagattgaatttttataaatggtttcagtggggcataagttataagcgcgttgtctaaacatactccgaaccccaacttgccttgtctgtagaatttctgtttgaaattctctatgttggggccccgaaccccaacttgccttgtctgtagaatttctgtttgaaattctctatgttggggccccgaaccccaacttgctttgtctgtagaatttttgtttgaaattctctatgttggggccccgaaccccaacttgctttgtctgtagaatttttgtttgaaattctctatgttggggccccgaaccccaacttgctttgtctgtagaatttctgtttgaaattttctatgttggggccctgaacccaaacttgccttgtctgtagaatttttgtttgaaattctgggtttagacaattgttgaaataacttgatagaagtatgtttttaaatttaattgttgtctgtctttgcaataaaaaagcctggggcattattattgtcccagactcattcgtgtgaaagtttagattgcacctaaaagtgcactaatatagattcctaatgcatacaataaaccaaagaatgtattcgttttacctgtcgcagccatcgcaggcatcattgtttcaggtgtatcatttttattaaaacgtctcactgctttaataggcattgggaatgataataaaactaacaagtaaaatagtgatcccgcaggtttaaaaaaggctgtaatgatgacaatgatgtatgcgatggcatacattattgccataaaaataactgaagcacgtttacctaaaagtataggcaaag

SEQ ID NO: 3550 - DNA, 3247 bp, Artificial Sequence
  Description of Artificial Sequence: synthetic nucleic acid sequence
ttggttctggattaatactagtatcttcaaaaatatgagatgaactttcacctattttaagtgggctcactttcacacctttacctgtggcataaactgatgtgattgttcctttattagtacttacaatataatattcatctttctgtttaaagacataattttttaacccatttttatatggataagaccgatcagcttgtccataatgatgcgttagtgttttaatatcttttccaatccaagtccctatcccttctttaggtttagggttctcagcatccttattcacctgtttaaattgctccgtcttagtcgttttgctatttttatttggattctctagaacatcaaactttaaacgtggtgagtaaaagagataaattaaaaatgtcactaataatataacaccaataactttaattattaacttcttcatctttcacccacctcttaataattatatatattgtacaaaaatgtactaacctttttcaacataagtgaaacgtgtaaacatttcccatcattattcgtataaaacaaattttaaatacttttgtattcgttatttatacgaaagtgaacatgaatgaatttttaaacatattaaaagctaaatattaaatagatatatatcgagtcagtaaaaaatgactttagtatgattacagatctcgcttcgatttatttaaaatatttatataggatttgaatcatatttgatacgtttgtaactgtagaaatagtagataatgattaggaataaaaagtatgtttattgtatagtttatgacaacatgacaactgagttatctacgttcagtacataaaaatacctgagacaaccatttgtgtctcaggctcttataaagaaaatttatagacctaatgtagctttaagcaatgatgttgtttctccacctggatacaatacatataacaatacataaactgcaacaccagtaattgcggtaaagaaccaaattattgaagcccaaggcccaatttttctgtgaatatgaagtttatctttgaaggctaaaatgatttgaattaagcctaaaacgccaccaactgttgcaagaatgatatggaaaactaagaaaatagtgtaataaactttaatagaacttggtccaccgaaagctgtattaccgataaaaatagttcttgctgcataaataataaagaatgttaaagcgaaaaaggcagcccatagcataatgtttttatgcttatgaacttgacgtttccaaatcaatgcccaaccaatagcgactaaaatcgcactaataacaatacacgatgtacttatcgttggtaaaatgggtacgttcataagtttcatccttacttaagttaatttatatcatcttgattaatgaaacaactacaacgagtgcaaagaatactactaagtagttcaatgaataaacgaacatttgcgttgcccatttagtttgattagattcttttctgaacgttgtaaaacctaaagctaaccatcctaaattaagtagtgtagcaataacaacaaaagttacgcctaaattagataataagaatggcaatggtaataataacactaaccaaataaacatgcttactcttgtccgtttgaaacctttcactgatggtaacataggaatatttgcaagcgcatactcatcactacgtttaattgctagagcgtagaaatggataggttgccaacaaaagacaactaaaaagagtgctactgctgctaaacttaatgatccatcgatagctacccaaccaattaatggtggtacagctccaggaaaacttccaacaacagtattccaagttgtatggcgcttagaccaaattgaatagtaagatacatatccaacaataccaattaatcctaaaacaccagaaggtatatttaataagaataaacatgcttcacctattaacatcatcccaaaacttaacattaataagtttctatcagatattctatcatttactgttggtctactttgcttactaggcataatgcgatcaatatcttgatcataataattatttaaagcacaagcgccccccataataagcgtagagccaactagcatcaatagtatttgtggaatggaagataggaaggaatggtttgtcattactattgcaagccatgcgcctgcaaaagcaggtattaaattaccttgaacaaggcccattttaataatttgttgtaattctttgaaggatacacggcccgtagtatgtgacaaagtttgatctttgttcataattcccctccttaaatttctcatataatataatgatatagtaaatcacacaaaaagactaggttttataaaattaaattgtgacacttttacgacattagaaatcgtcaattttgtgacacacttaaaaatgttattcttgatataataagttaaaagtaaaaatatgtacattaatttaaagtcattttttcaagtgtcgtatttaatgaagtatcaattaacgagtctttcaatgactttattcaattatgtaatattataatttaatactttaaattaatgatggggtgtttatcattgtttagaaagcaaaaccttaaatggttaggtgttttagctacgattattatgacctttgtacaattaggtggcgccctcgtaactaaaacgggatcagaagatggttgtggctcgtcttggcctttatgtaatggcgctttacttccagaaaatttaccaatacaaacaattatagaactgagtcatcgcgcagtatcagccatttcacttatagttgtattatggcttgtaattacagcttggaaaaacattggatatattaaagaaatcaaaccactctctattattagtgttggttttttattagttcaagcacttgtaggtgctgctgctgtgatatggcaacaaaatccttatgtattagcgctacattttggtatttcacttatcagtttctcttctgttttcttaatgacattaattattttctcaattgacaaaaaatatgaagctgacattttatttattcacaaacctttacgtatcttaacttggttaatggctatcatcgtatacttaactatttatacaggtgctttagttagacatactaaatcaagtcttgcttatggtgcttggcctattccatttgatgatatcgttcctcataatgcgcatgattgggtacaattttcgcacagaggtatggcgctcatcacttttat

SEQ ID NO: 3551 - DNA, 3017 bp, Artificial Sequence
  Description of Artificial Sequence: synthetic nucleic acid sequence
aagtatttaacaaatgaaattttactcagagttattattaaatacataaataatgtgaacagttaaacgcacagtcctaatcaatgcaataagtttgtttttttaataaatatgtaaaagattttgtaaaaagattttaagaatatgaattttgggaataataaaaatataagatgatttttcggaggttaatatggacaaatttaaatctatgacagaattaaaagaattgactaaagaaggaaaagattgggaaatagagtgtgaaaatcgttctagcatagtcactatattagcattacatggcggtggaattgaacctgccacaactgaattagcctatacaattgcacattgtggcgactataactatttttcctttaaaggtatgagaagtaaggggaataatgagttacatgtgacttccacacattatgatgaccaaattgcattagatttagtgagaggtagccaaagaactgtagccatccatggttgtgaaggtaatgaaagtgtggcttatataggaggtagtgatgacagactaattgagttaatcaccgaatctcttgaagatataggaattagcgtgcgagaagcaccacatcatatttctggaactcaagaaaataatattgttaatatgactcaaacccaaggaggagtgcaattagaactgacagctcagttaagaaaggagctatttaaaaatagaaaaagttcacgcaaaaaccgtgaaaataaagataattgggatgatttaatgtacgactttgctgatgcaatgaaaaaagctatagaacgtgcataattaaattctaacgcatgttaaaataatattataaaacttaattggagagatgaagcatgcaagatacattaatgagtattcaaattattccaaaaacaccgaacaacaacgatgttattccatatgttgatgaggcaattaaaattattgatgattcaggtttgcattttagagtgggaccgttagaaacaacagttcaaggtgaaatgagtgaatgtcttattttaattcaaaaattaaatgatagaatggttgaattagaatgtccaagtattattagtcaagttaagttttatcacgtacctgaaggaatagaaattgagacgcttacaggaaaatacgactaagtttaaattagaataatatttcttatcttatttatttaagagcctaacatgccatagtgtttaaggctcttaaaattttgtatgaaaatattggtatgctatagacgccatacattatcacactgaaaatatgatataaaagacttttatcaactgatttattataaataaatggtgtctaaataaacatttagatatgatttacattaattacagtaataaaaggctaataagttaattatcaaagatagatgtaacatcatatacatgtctctaaaatttaagtttccagtatcatgataaacagccccaccaccagaaatacgtctcactacatctatttgatgtttatcaatatacgcttgattaacttcttcaattgtattctgattctttccaacaataattgaaggtctgttaatataaaataaaaaataactttcttcagaaggtaaatttttaagaacatactcttccattgctaaattgagggaaggatcattaatattattgttgctaataaatttcataacattctctccttaaataagtctctctatatgcccttaccctagttatgaatcatttatagaaaaatttccactcttttactcatttatgaatgacattttataattttcttttagttcacttctttttcatagaaattagtttatttgtcaagtaaattttagtacaatataatctagctatgatttaagggaggactcgtaatgactgttgcagaagtaggtaatatagtagaattttatgacggtttaagaggccgtgtcgagaagattaatgataactctgttattgtagatttaactattatggataattttaatgaattagatttaccggaaaagacagttatcaatcataagcgatacaaaatcgttgatcaagaaggttaattaaaatgaaaaatgtttctaaagctttgatttggtttgttataagcttcatcatctttcacgcaatattatttgtgatgtggggagaacatcaagaatactggtatttatatactggcattatgttaatagctggaataagttatgttttttaccaaagagacattgcatctaaacgattattaacttccataggcatgggtataataacgagtgtcgcacttattattatacaattaattttttcacttatttcatcagaattatcatacgcatctttaatcaaagaattatcacgaacgggtgtctactttaaatggcaaatgctcgttactttattatttgtgataccttgtcatgaattatatatgagaactgttttacaaaaggaattaataaaatataacttaccgaaatgggctagcattttaattgttgcaatatgttcaagttcattatttatatacttagataattggtggattgtattctttatttttgtagctcaattcattctatctcttagctatgaatatacgagacgtattgctacgactacaattggtcaaattgtggctatcattttattattgatattccacggataaaaaaagcatttcttagactcatgaatttgagctaagaaatgcttttttaaattaattaaagaaaaagttacacatacaccgttataaatagtacgaggaagattaataaactttaaaattatgatttaatttcacagaatacatgtcacattttaaattttttctaatcaatccacccatcgtttccgaatatgtgtcgtgaacgatagcttcttgtaaatacattttgtagtttctataacaataatctgtcattgttattctatacgaatcttcttcatttagaccatttaatttaactctattaaacggtgattgtgacatgtctata

SEQ ID NO: 3552 - DNA, 3023 bp, Artificial Sequence
  Description of Artificial Sequence: synthetic nucleic acid sequence
agctttttgactaaatttaatatttctaattgatgacaaatatctaaataagttgtaggttcatctaagaaaataatatcagtacgttgggctagtgccattgcaatccacacgcgttgtctttgtccaccacttaaatcatttatagtacgatgacgaaattcacttgtacctgtaactgacaatgcccaatcaatttcttttttatcttctgcagttaaacgaccaaatcctttttgatgtggaaaacgcccataagaaacaagttctcctacagtaagtccatctgggacctctggtgattgtggtaaaattgctatttttttagctatttctttcgtggatgtggcatgaatactcttaccatccaaattaattttaccttctttaattgacaatagtctagataacgctttcaataaagttgatttcccacacccgttaggtccaataatagaagtaacctttccatcaggaattgcgacatccaaattattaataatcgtagaatcaccgtagccaattttcacttgttcaccacttaaacgactcataataattcccctactttcattctctaaaatcttgctttatatatagtaaaaacattgttattaattaagttattcactcattatcagtcacaaacttgtaattgataatcattatcacagtttttattataacatctcttctatattatgactaacaattattttcactaggttatatattatattcgtaaatgagtagtagtaaattaagcgagtagtactgtccttaataaataagtagagaacagtatgataataaaaagcccaaaatgactttaactaagcaatcattttagacttcatttaaaaaagtgccttacattttaacaactttttaactttataatatattgatattttactcatctaacaaaaaaccattaccatatacatcacgaacgtcatgaataactaaaaaggcattttcgtcaatatttttgatgattcgtttagcacgagatacttgtgttttagagatgactacgtaaagtacatctttttcttctctagtgtaataaccgtgtccatttaatattgttaatcctcttccaacttgctgatcaatagcttttgctacctcattagggcgactagatataatagtcattgcctttttagtatttaatccttctataacaaattccatcacttttgtacctatatataaagacataactgtaactaagcacttcactaaaggaatttctgtcaatgaaataagcacaacgataaggtcaaagaataacaaagcgtaaggcgtactaatatctaaatatttattaacaattctcgcaagaataaccgttccagcggttgttccccctgctaaaacgataataccaattcctaaaccaacacaagtcccaccgaacacagcattaatcacaacattcccagtttctacatgccatgtttcagttaaacctagaaagattgaaatgagtactgtagcaaaaattgttaaatatgtactacgtttactcaaatatttataacccacaataattaaaatagcatttaaaacgaaattggttattcccggtgaaatatgaaaagcataatataatacgatggctataccagtgacaccaccctcacccaaattccctgaaataacaaatgcattgatacctgcagagaaaataaatgaacctatcataactaaaatgatatctctgatagttttattcactcaatcacccctaaaactttgtttaattattaaaatgttagcataagataactacttactacaataaaatttcaaataactatatgatttaaaaaaacaaattcacatatcatatattcgtaattataaatatatgtcatcttaagcgtactaaagtgggaattcaatacatctgattttgaataaatttaaatattctgaatttttaatttacttatactcctaggtctgctataataattttaacttcttgaaagagaagttatctcctttgtgttgtttatagtaacaaaacaaattttgctcgaagtactgtgacagtacctagtccttaccgttacaagtacattaatattcatttcccataaaagccaagtataaaaagtgtctcctcacttttatgcttggtttttatcattttagagattcgcaaatcaattcgtcagctttctacaaaattaaaaagcacacgactcatctaattacaaaataggatgagtagcgtgcctatattaattaaaaatcttaaaagtaaattaccaagcaaataatccaacaaatgcagcagtaagtaaggatactaaaattcctgctaacaacatcatcggtacatatttggaaacgaaatccgacgttttcttatcaacaatacctttcaatgtacctataatcattccaatagttgaaaagtttgcaaaagaaactaaaaatgttgatataactgctctatgatgaggcgtcatcgcattgacttgattagaaatttcccccatcacaacaaattcgtttgttacaattttcttcgccatttgttgtgctacttcccacgcttcattaaacggtaaacctaatagtaaagcaaatggatacatgaaaacgcctaagatttgatcaagaccaaagctacctttgacaccaataccatttgcaataagatgtgtgattaaatgaatcaatctatcaattaagtcagccaaagctacaaagctaatgacaaatgcaatgataattaatacaagctttccagctgctaaaactgaatctccaagaaatgagaaaaatggttgtctttcagtttggtgatctttaatgctatacacgacatcttcttgttcttcaactgatacaggattcaaaatacaagaaactataattgcgttaataatattaagtggaattgccgtcaatacaagttctccaggtatcatttgcacataagcgcccacaattgctcctgaaactgaactcatagacatcatcgcaatagttagtacccg

SEQ ID NO: 3553 - DNA, 3459 bp, Artificial Sequence
  Description of Artificial Sequence: synthetic nucleic acid sequence
tctgataattcatcatccgtattcgaatctttaaagtcttgtactgaattctcctcagctttggcctcattatgacctaaaccaaacaataatgttgcacctattacaatagatgctgtacctactgtgaattttctaattgcatatttattggatttatttgctataggtttctttttagttagtaaattattttttttattaatcataaaaactccttatctttgactatttcaatgtaattttcatgtaaaaatcatttctagagtaaaatataatatattatataagtattttttgcaatattttttaaacatgttaacaaacatttaataaatagttaattaatttgctcagcatttcttaaaattctaataacatgaacaattaaaattattattatattcatcaaacaaatcgtcaccaaactatttcaaataaaaaaatataaataaccgctgtatttcatattagtattatgtacgtctctgtcacagtgttttatggaatattttaaaggcaaatctcaagaataatgtatatgttttattaaggtgataaatatataaagactccctctaatgtttactaaaaacatcaaagggagctaatttaatgatattgcttgataaaaacaaatcataaaatatgattattttaagtgttcatatggactatttgttacgaaggatacaatttgatcaacaaacaattttgaacgtagttgaaattcattatcttctaagtataaggtaccatcttctaatttagcataatcagaatcatgtgtagcaatttgcgttggtacagcaataccaagtaaactacgtacgatgactctcaagtgtgataatggctcagaacttactattcctccactattgcaaatgagtcccacgggtttcattttgaaatggtccatattaaggtggtcaagtgcatttttaagaatacctgaaaacgatccatgataatttggcgttcctaaaattaagaaatctgcttccattgctttattttgtaaagatttgacattgtttttaatttcatcaactgcttgtgttgtaccagcaaaatccaattgatgaatgggtttctcagctaggtcaaagatttccacctcaacatcatgttcgccgagttgaccttttaaatattttgataaagcgttcgtatgagaccctacttgagcactccctataataattaaacctttcattattttacacctctaaattattttcttcttttaatattttcatgattgcttttccaactccactattttcattggtgtctgtgacatatttagcaatatgtttaacttcatctgtagcattattcattgctactggataacctacacgttctagcattgaaatatcatttaaattatctcctattgctaccacatctgttaaatctatacctaattgatgagcaatagctgataaggcaatgcctttttgagcgtctgaatgagtgatttctaggttacctcttgatgatgaggatactgctaaatttggtgatgatgttaactcctgacctacttggtcgattttacttaaatctgcatcaaaagctaacaccttcataataagttctccaggaatatcttcaattgaatcataattatctacaacttttaaagtaccgttatctatgcgtttttgtatattatttcgtatcttggctacatctgctttttgacccgcacgttctgcaatatctatatagattgctaaatcacgtttaggatcttctgtatatatgccacgatttgtgtaaatttgataataaatatgattatttttaagtgctgtcgtaattttgtgtactaaatcatgattaagatgtgatgtactcattatgtgaaatgattcgtcacgaacttctgcaccattcaaacatatgtaagggacttttaagtctgtttcagcaacaggtgtttgtgcctcgtaaaacgctctaccagttgcaataactactgtaataccgttcgcttgcgcaaattttatcgcttcttggttcatagtggtgatttcatgaccagcgttaagtaatgttccatccatatcagttgctattagctttatcattagttgacctcgtttccacttattttaaagtgatgctatatgaattttttaaattaatttaaaatttatgtgtgtagcatatgtcttaacttcattattattatatgttgtcacacaatctttaacgatttactagacttcaaaaatacgtttatttatgtacgacatcattttaacaaatttatatccttttgtatcttcccctgtttttctgcttttttcttttcacgtatttccttaaaaaaacttctcaatagttctgcacactcttcttctaaaattcctttttctacggttgccctatgattaaactggggttgttctaataaattcataagacttcccgaacaacctcccttggaatcagtagcaccatacacaacctttggaatacggctcataataatagtgcccgcacacataacacagggctctaatgtaacatacaacgtacattcttctaatctccaactgccgacaacttctgaagcccgttctatcgctatgtgctctgcatgggcggtaggttgctgcaatgtttcccttaaattatgtgcacgtgcaatgacttgaccctctttaacaataactgctccgattggaacttctcctaatgctttggctttgtgtgcttcattaattgctaagcgcatgtaatcatgattttttttcatatgtgttggaatacctcacttatggtacaatactcattgtctatcttaacatttggagaagtgattatgaataaaccatttattgcaatcgaaggacctataggtgttggtaaatcctctcttgctcaccgattaagcaagacgtttggtttttatgaagagaaagaaattgttgatgaaaatccatttctatctgatttttatgatgatatagaaaaatggagttttcaaactgaaatgttctttttatgtaacagatataaacagattagagatattgagtcgctaaatcaaggtatagttagcgattatcatattcataaaaataaaatttttgctaaaaatactttagatgctaaagaatttgataaattcagtcgtatttttgatattttaactgaagatatcgaaatgccaaatacaattatctttttagatgctgatttaaatgtattaaaatcaagaattgcacaacgtaatcgtagctttgaatctcatatagaagatgactatttacttactttaaaaaaagattatcttgcttattatgaatcattaaagaatgacggtgcaaatgtcattcgaattgatacgtcacaacaagatttcgttaaaaatgattacgattaccaaaatattttaaatttagtaaaacctatgattggagaaaataaagatgaata

SEQ ID NO: 3554 - DNA, 3173 bp, Artificial Sequence
  Description of Artificial Sequence: synthetic nucleic acid sequence
tggtgattccgcttcttcaggtgacaatctgtaaccaataataaaatcatcatatgcatgagcttttttagctttaacaacttcatctataacagcaacagggaatttatagttatcagcccaaacatcatttcttctattatagtaaggagaaacaaattggtgaataagataatggtttgcgccatgaatttcaacgccatcaaaacctgcttcaattgctcttctagttgcttcaccaaagtctctaatagtttgttcaatttcttcagcagtcatctcacgagcatcatgttctttttgctgaccaaaacttttaagagaaatggcacttggtgcaacaacatctccatcaggtgttaactctggtaaagcttgagcacctccatgatgaatttggactattgctttcgcaccatttttcttcataacttgagcaagttcttttaacccttcgatatctgagtcatgtgcaacagaaggttgaccaggaaatgctttgcctacatcattaacattacttgctgcattaattgcaatcccaacatctttagaacgtttctcaatgtaaggtaattctatatctgaaattgttccatcatcatttgatgaagtatgtgtaagaggagctaaaacaaaacgatttcttacttcaacaccattaggtagtgttaaagatttaaataaaggttcatatttattattcatatttttaatactctccttgtttaatgatgttatgactatagcatgctagttacatactattctaattatttgcttacaaattatttattctccaattataaaaatgctaagcatagttaattacattcaacaaataaataataactatctaaaattttttattttcccttattgagatcattgtttatccaaaataattattaactttaattaataaaaaaagacaatcctaacaacacattgttgtttaaagattgtcgttatcatgtgattgattgcatatatcacaacatcacatgttggcacgaattgacagtcgtttagtcattgtgaattgcacgttttgactgtttgatccagaccggtaagcgttctttaagtgtttgaaacccatacttttctgtttctctaatttcatctaagacagactgtttttcttttttacgctcataatttttaaagtaatcattatcttttaaggacaaatttaatttaccttcatcatcaattgataatatttttgctttaacaacctgtccttcagatagaaatttctttaaattatggacataatcatccataatttctgagatatggataagcccttcagtatggtcaggggtctcaacaaatgcgccatacggttgaataccagtcacacgtaccttgatatgttgacctactttgtagtgatgattcaacttgataaccccttatttcgattttcttaacactcatatcatagcataaatcaaataactcgactaactataaccataataaaattcattaaattttaaaaactgtttccttattgtactgtttttgcattgttaactaaagcaataccatctacatttaacatcgtcccctcagtagggtaaatgattgagatagggtatcctttttgtttccacgttctagcatcttgttcataactcaatccagcgtaataagcacctttagccaccttttcaatcacttgagaacttttagataactgtacagcatggtgttgaaattgatgaacatcgcttacttggtgacgcatatgatacatcgcacgcatatgttggtatcctgtcgtcgtagaatgaggattagaataaacgacacgcccctttagtgaagactgaagtaagtctttatatccatgaatagtcatatcaccttgtaaatctgtattcactacaattactgttggcatcaatagaaagctcgtgactaatgggttgttagagcgataatcctctatttgtttcagtgtagaacgattatggtaaggaacaaaatcttcttgatgatctatcatctctgataacacgccacccacaaagacatccccacgtttagaaagtgcttctttgtgaatattagatagtaatacttgagttgagccatgtttgatttcaactttcacatgttctcgcttttcaaaatcatttaaaatcggacgaattaaatgtgatggataaggagaataaacaatcaacgtacgtaaaggatgaggtgattgtgaagtcgatgttggagcgcatgctatcagaaaaatgagtaataataacaacgtataaagtttaactttcataatatcccatcaattctatgtatttttattacaacaattttaccaataaatacgacataagtaatgttaaatattttgcaatatttgtaagggagatgcaggactcatcaatatgtattaaaagtctaggatgacaaattctcatgaattcatcgtcctagacttatgtttggaattgagacaagtatgaacttaagaagacgtattgtcttgtataagatctaaaatactgtgatagacacgttggttattatgatgatctgtataatcgaatatgcttgatagattttgatgctccatatttttaggatttttaatattatcttcaattaaagaaattaactctttctctgtatgtgctatatcgccaataaatgtatctttactattaaatttatccaaacaataatctttgtttttaaaatcattttcagttatatggtaatgtttgttcaataattctagtgaaattctttcgtaattttgtgattttaaaactccatattccttattaaaaaaattaattttaagcatttgtgcatctcctaaaatcttaaatattaatatatttataatataaactaatcatgcaattgttggtttatctatagaaaccaacctaaaataagattatagcataataatgaagtgcgctatatatatataaaatatgtaaaatttagactttcaaatttttgtaaaactttaattatagtatatagttcgttagaaaggattcttttgaataataatggtatattcaattgtttgtatgtttgaaaagttttattaagcttaccaatatcaaaaggtatgtagttaaactcgataactattgatagtaaaggggtattaaaaaaattgtgtgaagtgtgga

SEQ ID NO: 3555 - DNA, 2982 bp, Artificial Sequence
  Description of Artificial Sequence: synthetic nucleic acid sequence
taaatcctacaattaagaaataactgagtctttttttaacaaagaaatagactaccattcctattaaaataattaagctattagcgatggaaagattctccaagaagaattgtccaaacaaacttactaataaaaatacccataattgcatttcagaaactgtatcgtgcgactcaatctttttaactaccgtaaaaagaataaaaagtgataggactgtagcaggtatataactaaaaaatccagtaaaccacccgtaagtttcgctataaattgtattaggtacagtaaccattaacacaaaactcaaaataaaataaatacgattcgtatgtaattgaaccatataagcaactaaatagataactaaaaacgaagttatcgcatatattaaagctcttattatgttattatgtacggcaacccattcaaataaatgtcctaaataacgaccattttcttgagtcaaatattgacttagattaactttatatgcatgccaatccgtagttgataatggtgttagaattgccattataagataaaagataaaaattcctattaaccaaaaaaatgattcatattgttttaagttattcattgttgacctctctgttcttcatgatgtaattcaaaactaacatttaaacgattatcatgtttattctcttttttatgtgatttattcaattatctactgaaaatatatagacatttattgaagctttaatcatattaatatatacatattgctcatcgtcaattttatattcttattattatacaattcacgtatgatttccattttaattatcaagatttctttagtttaatttcatttttggatagaataaatataaaccaattgtttaggaagtgatataaatgtcaccatataaagttatcattgcacctgattcttttaaagaaagtatgtcggcgaaggaagctgctttagctattaaagatggattccaagaggtgttcgattccagtacaatatatgacattattcctatggctgatggtggcgagggaacaaccgaagtattgaaagaagccttaaatgctacctcttattgtgtagaagtaaaagatccacttaatagaaatatcatggctagttatgcgagaagcgacgaacaccaaacagctatcattgaaatggcagctgcttcaggactagcattattgagtaaagatgaaagagatccatctattacaacttcgtacggtaccggccaactcattaatgatgcacttaatcacgatgttaataaaattattttaggaataggtggaagtgccacgaatgatggtggtgtaggaatgttaaaggctttaggtgtctcttttaaagataaaaacaatcaagagattcgcgatggaggtttagccctatctcaaatagaatacattgatattactcgtataaacccacgattgaaagatgtgaatattaaagtagcctgtgatgtaactaatccattattaggagacaatggagcaacaatagtttatggtccacaaaaaggcgctcagcaaaagatgataccaaagttggattcagcattacgtcactatcatgataaaattgaaagagaattaaatatgaatgtaaaagatatcccgggcgctggtgctgcaggaggcatgggaactgcattaatcgcgtttctaaacgctaaattacgtcctggaattgatgtagttcttgaagagactcaatttaaacaaaggataaaagatgcgaatttagttgttactggcgaaggtaaaatggataaacaaacaatctatggcaaaacacccattggcgtagccaaagttgcaaaatcatatgatatacccgtcattgctatttgtggtagtttaggaaaagattacgaagcaatttatcaccacggtatcgatagcgtgtttagtatcatggaacgtccatgccaccttgacgaagctttgaaagaaggcgcacttcatgttaaacatacaacaataaatatcgcacgacttttacaagtaaaaattgaaaaatgattgagcgtaattattaaatgaggtgacaatatgaaaagaacagataaatatagagattcatacaaatatgatgaccaatatcaaaatcatcgtaaacgttcagaagaagatatgtatcgacaacatcaagagtcccaacagagagcaaattcaaatcgtgcaacacaaagtgaaaatgatagagagtatgaaaatcatcctgaacgttattacaatggaagagactatcgacgtgagcagcaattggaagaagaaaatgaaaaatcaagcaaaactaaaaaatggctgattgcaatcatagttattttactcattattgtagctatctttatcacacgtgcaattatcaatcataataatgataaagtaagtaatgaccctaacgtttcacaaaactataaaaaagaagttgaaaatcaaaacgacgacattaatcgacaagttgattcagccaaaagcgatataaaaaataaaaaggacacccaatcccaaattgataaactacaaaatcaaattgatcaattaaaacaaaatgaagaaactaatgcggattctaaattcacaaaattttatcaaaaccaaatcgacaaactgaaaaatgcaaataacgctcaacttaataacgaaaatcaaagtaaagttaacaacatgcttgaagacatgccatgaattttagcttctgcttgaccaatgatttcaaaaattttcttactgcgatatttaaccctttccggaagtgtactgtcatctatcattttaaatatatcattaacgtgacgatgatgatttgcttctttaacatcaatgtttaatgtcattgcatgaataccttgttttactcttttttgaaaatgtagcttaaattgatctaaaggtaatttttttagttctgattcaatgtcttcagggtttgctcctaaatcaactaaagcagaaagtagcata

SEQ ID NO: 3556 - DNA, 3436 bp, Artificial Sequence
  Description of Artificial Sequence: synthetic nucleic acid sequence
tatacaaattcagaagctacatgaacctcagtaggtacacctgcccatttttcaataaattctttaccaaccaatccagcatgataactagtaccagctgcaacgatgtaaatacgatcagcatctgctacatcattaataatctctgaatcgatttttaaattacctttttcatcttgatattcttgaataatgcgacgcatcactgcaggctgttcatgaatttcttttaacatgtaatgatcatatacgcctttttctgcatcagcagcatctatttctgccgtatacgtatcacgttgttgaatgtgcccctcaagatctttaatttctactgtgtctcgcttaacaataactatttcatggtcatgtatctctttgtattggtttgtagtttgtaacattgctagagcatcagaagcaataacattgaaaccttcacctacacctactaaaagcggagacttgtttttagccacataaatagtatctttatcattatcatctaataatcctaaagcatatgaaccatgtaataatttaactacttttgtaaatgcatcttctgtagctaatccttgtctagaaaaataatctactaattgtacaataacttccgtatcagtttctgatgaaaaagtgacatcagataaatattcagcttttaattcttcataattttcaattacaccattatgaactaatgtaaaacgtccagatgttgactggtgtggatgtgaattttcataatttggaacaccatgtgtcgcccaacgtgtatgaccaattcctaacgtaccatcctcatcactattatctgcaactttacgtaattcagcaattcttcctttttctttaaaaagttttgtaccatcatcattaactacagcaatacctgctgagtcataaccacgatattctaatttttctaacccttttaatagtaattctttggcattatcgtagccaatataaccaacaattccacacatataatatcctccaacaaatgggataacacggctattatgattaattatcactgcttaaatttgataatcccctatcataatcattatcaacgaatacatcatgaaataagcgtgctattatatgaattttatacacgctatccgtagtttcccaaaataatttatttagtttggcgatcttattaactttgtccactaagtcaccttaatgatttacttaataagctaacgaatgtgccacatccgggatagcatccgccgatctgattcgatcactatcctcctcgtctacaaaatccaaatcgttatctataaaagttctactattttaacttttaatacttgataactatttaggtattttgcacaggcgctttaattattaataacctagactctcctcctttccattaatattcattgtacactgtcaacgaattaatttgcaaacgatttaacagtatttttcacaaatagtaatagttctgaatagatacatcgatgaattattctcaaaataaaaaaatatatttttcaaatctttttaaaagataaaattctgttaaaaaaaacagatttatgtctgtaacatcataaatctgttttatatatgaatttaaacatgaaagtattatttatctaagcccattttgtcttcaacaacgtcagcgatactttgagcatatctttcagcatccgcgtcagttgcagcctcaaccattacacgtactaaaggttcagttccagaaggacgaacaagaattcttccttcaccattcatctctgtttcaactttcgtcattatctcttgaacatgaatattctcttcaacacgatatttgtcagtcactctcacattaattaaagattgtgggtactttttcatttgagaagctaactcgcttagagttttaccactcattttaataacggaagccaactgaacacccgttaataatccatcaccagtagtattgtaatccattaatacgatatgaccggattgttcaccaccaagattataatttcctcttctcatttcctcgacaacatagcgatctccaactttagttttgtttgactgaataccttctttttctagagctttgtagaaaccaaggttactcattactgtcgaaactatcatatttccattgagttcttggtttttatacatctcttgaccaataatgaacataatttgatctccatctacaatttgtccattttcatctaccgcaataattcgatcgccatctccatcaaaagctaaaccaaagtcactttcagtttctaacacagcttcagctaatttttctggatgagtagagccacattgttcattaatgttataaccatctggattacatccaattgtctcagtatccgcttctaaatcgccaaacaagaatggggctaaagaagaagttgacccgtttgcaccatctaatacaattttaagaccctcaaaattaacatcaacagttgatttaagataacttagatacttttgtgcaccttcaaaataatctgaataatgtacaatatcctctcctactggtcgtggtaaatcaggattggtttgatctaataattgctcaatttcattttcttgatcatctgacaatttaaagccatctgaaccaaaaaatttaattccattatcagcaaccggattatgtgacgcagaaatcataacacctaatgctgcttccatttctttagtcaaataagccacacccggtgttgaaataacacctaagcgcatcacttctgcgccaattgaaattaaaccagcaattaatgcagattctagcatttctcctgaaactcttgtatctcttcctactaaaactcgaggatgcttttcacccttattatgtgcgagaacatatcctccgtatctacctagtttaaaagccaattcaggtgtgagttcttggttagcgacaccacgaacaccatcagtaccaaaatattttcccatttttaaacgctccttttgtatctatcaatttttaacatttatatacgcttttgtttcctttggattcactttagtcacatctttaggtaagttaaatgatactgttttttctgtagattctgaaattccatcaatatctacttcagcagtaatttcattaatattttgtaattcatctctattaccaaagatttctacttctttatcttccagtttaacactatctaattctttattttcattaagcttacccgttgtttttgtacgtaccttaaccattttactgaatggttcaactgttacttttaaattaacttcatttggattaattgatacatttaatttattcaattgtttatcaaatgcactaacatctgcaacatcattggtgtctttgttcactttactagaatttttaaaggttgcttttaaataagctatattttttaattgttgc

SEQ ID NO: 3557 - DNA, 3275 bp, Artificial Sequence
  Description of Artificial Sequence: synthetic nucleic acid sequence
ctgactacttgtaagcacacggtttcaagttctctttcactccccttccggggtacttttcacctttccctcacggtactggttcactatcggtcactagagagtatttagccttaggagatggtcctcccagattccgacggaatttcacgtgctccgtcgtactcaggatccactcaagagagaatatgttttcgactacaggattattaccttctttgattcatctttccagatgattcgtctaacatgttcttttgtaactccgtatagagtgtcctacaaccccaacaagcaagcttgttggtttgggctattcccgtttcgctcgccgctactcagggaatcgatttttctttctcttcctccgggtactaagatgtttcagttctccgggtctgccttctgacatgctatgaattcacatgtcgataacatgacataactcatgctgggttcccccattcggaaatctctggatcaacgcttacttacagctacccaaagcatatcgtcgttagtaacgtccttcatcggcttctagtgccaaggcatccaccgtgcgcccttaataacttaatctatgtttccaccatattttgaattgttattcaaaataaatagctaaaactagttattaatcttgtgagtgttctttcgaacactagcgattatttatgaattcaagcttatttaaaactctattcactcggttttgcttggtaaaatcttacttacttatctagttttcaatgtacaaagaatgttaataaacattcaaaactgaatacaatatgtcacgttatccctcatcttcgtagaagatgttccgaatatatccttagaaaggaggtgatccagccgcaccttccgatacggctaccttgttacgacttcaccccaatcatttgtcccaccttcgacggctagctccaaatggttactccaccggcttcgggtgttacaaactctcgtggtgtgacgggcggtgtgtacaagacccgggaacgtattcaccgtagcatgctgatctacgattactagcgattccagcttcatatagtcgagttgcagactacaatccgaactgagaacaactttatgggatttgcttgacctcgcggtttcgctgccctttgtattgtccattgtagcacgtgtgtagcccaaatcataaggggcatgatgatttgacgtcatccccaccttcctccggtttgtcaccggcagtcaacttagagtgcccaacttaatgatggcaactaagcttaagggttgcgctcgttgcgggacttaacccaacatctcacgacacgagctgacgacaaccatgcaccacctgttactctgtcccccgaaggggaaaactctatctctagaggggtcagaggatgtcaagatttggtaaggttcttcgcgttgcttcgaattaaaccacatgctccaccgcttgtgcgggtccccgtcaattcctttgagtttcaaccttgcggtcgtactccccaggcggagtgcttaatgcgttagctgcagcactaaggggcggaaaccccctaacacttagcactcatcgtttacggcgtggactaccagggtatctaatcctgtttgatccccacgctttcgcacatcagcgtcagttacaattggtccaggactctttggggtaagagatcatgatggcaattttaatagagacatgtttatcaatcttgccgaacacaataatgtacgcgcatttgaaattaagttagctcaaggtgctaaaacacgtggtggacatatggagggaaacaaagtcacagaagagattgcacgcattagaaatgtgaaaccatatgaaactattaattcacctaatcgttttgattttattaaaaatccaacagatttactgaatttcgttaatcatttacaatcgataggtcaaaaacctgtcggcttcaaaattgttgtcagtaaagttgaagaaatagaggcgttagttaaaacaatggtagagatagacacctatccaagctttattactgttgatggtggtgaaggtggtacaggcgctaccttccaagagcttgaagatggtgttggtttaccgttatttacagcacttcctatcgtttcaagtatgttagaaaagtatggcataagaaacaaggttaaaatttttgcgtccggtaaattagtgactccagataaaatcgcaattgcattaggattaggtgcggatctcgtcaatattgctagaggtatgatgataagtgtaggatgcatcatgagtcaacaatgtcatttaaatacatgtccagttggagtagcaacaaccgatcctaaaaaagaaaagggacttattgttgatgaaaaacaataccgtgttacaaattatgttacaagtttgcatgaaggtttatttaacatcgctgcagctgtaggtgttcatagtccaacggagattacttccgaccatattatctatagacaattagatggcactacaacgtccattcaggattataaacttaaattaatttcttaaatcacaacattgaaaaggagcgagacagaatgctgtctcactccttttcaatttaattatcttcattcattttacttttatcttttaaaccattacgtttgagttgtttaacaaccctatccatactcacatggtcacccttttttgcatctgatgatatgaaacctaaatttttcttaagctgatctatatccgcatctttataatcaatatcgatatgttcgatggcctttcgatctttaaaatcaactttatatgtgaccccgtctatccctttgaatgcttgttcatcatttttaaacatttgtttagcttcatctttatcgatgcctaaatcatcatatttaattgttgctatagtagattgtttgagaacttcatcatctttgtatgtcaaagatgtaatcacttgtttaccgttgacttcgccttcataagtttttgtgcgttctttcccacatgccgaaagagatacagcacttataactaatactactaaaagcgatatgacttttttcatagtagtcgccttctctcatctttaatcatgttaattatatcatctttaatttgaatatgttacttatatgaagataaatatctttttatttcgaaaatttaaacatctataaacatggaattcagaatttcactacttagaatgttatactacttttaaagacttattaatggaggaatgactatgccagaatctaaagcgttacttaaatctttaacagat

SEQ ID NO: 3558 - DNA, 3135 bp, Artificial Sequence
  Description of Artificial Sequence: synthetic nucleic acid sequence
taaatatttttcataaattaagtcatataattctgcatagctataattgtgacttcttaaatattggtgagggtcagcgtgatcagtacctcctaagaagttagagatagcagcatgtgtccaaactgttcctcttccatcgttttcagcgctatcaggttttaaattataatattgcaattgcgttgcagcataatcagcgtagttgttcattgaacgtgcaaatgaatcataatcatgtgtatggacgatttcaacattgataaaacgttgatttccatatggacctgcaccccaagataagtaatctgtcggagctgtttctataattctattgccatcaacaaatgcgtgtacgaatgcatttgtgtaattacgtttcatgaaagcaatctcgccatcgattgttgagttatcatttgcagtatcatgaacaacgataccttcaggacgtcccacaccgtttctatagccatatttagggaaatatgacgtataatcttcttcaattcttggtgctttcatattctttttacgaatatagttatttattgaagaattaacctttggtgtatatttcggtagtgatgttttttgactagatacagaataaactgttctcggttgagcagttgcactaaatggggtgaattgctttgtatctatagtcgcttgattagatgccgtttctttttttacagtattagttgttacacgttgagctggttctttatatttatatgaagtagtttgtttagatgtagcattcacattgtttaatgagataggctctaaatggtctgttgagctatcatcgtcttcatcatcgtaatcaaaattataaccagatgcgtttgtatttgatactttaggtgtaacagtttcattttgttcagaagttacttgctgatttttttgttggctttcattatcattagaagcagtttgagtttcaattgcttgattttcggaaggttgacttgcagtcatcttcttgtcttgttgttcattatttgcgttagctcctaaatctttctcattttcttttgctacagattgtgtctcctgtaattgatttgtatcagtggatgttttatcttcttgtgtcaaatcatttgtttcttcttgttgattttttgtaacagaattcgtttgattttgattcgcatcatctgttgataaagattgttgcttttgatttgatgaaatttcattataagtactcatttcatctaatgatgcatcatatgtagtactttgtgtgtcttgtttaggttgaacttgggtagggtcttgatatgtttgtgtaccagatacatttgtagttgattgtgtaacttcgcttttagctttttctgcttgtttgagggcagtttgatcatctaatacatttttatgattagactgattctgtggttgttcagcagcatttgcttgatgtgcagtaaaagctgtgccaaataacgttaaagcaaccatagacggtaatttgtaattgaattttttcgccatttatttcttactcctcgcattaatatgatttgtttcaattataatctttaaggcttaacactgtatggcttttaacatatttgtaatgtaattttaacctgtgcctcaaatagaaatattgtttttttatgctgggaacattgtcaaatcactatttacgtttattataagcttgtaagctacataaagattattacaatttttaaaattgctaagtttgtatatagaatgtaaatcaatttataaaaacttattcatactaatatgatttatattttcttctaagaatactttaccaaaaggtgagtaacctagttttaagtaaaagtctcgagcttgtaattgagcattcatagtgagttcattgtattggtgtttttttgcaattgtttcaatagcatgtattaaatttttaccgtacccaagaccacgataccacttgatgattgctacacgttcaattttacaaatatgagtatttaaaggtctaattctagcagttgccataggaacaccatttatatatcccactatatggaatgagtaatcttcatattgatcaaattcattttcgagtggtacgccttgttcttcgacgaaaacacactttcttatttcaaagcaatcatctagcatcgtttggttttttgctatttgaaacacagtatcacctccattttcactggtttttccttaaaaaattattttaaccatattgaaaatgaaaatttataaaaaatggaataaagcaggttcattataaattcataattagttcatcaccaaaaaaagaatgagtcaggtacatgtcgtgaatatcatttgtggggataagaactgaagtttctattggtaaagtaagttgagtcttattataatctttatacataaggaacttcgttaatttattttagtgatatttattaaattttacgaaagggccttattttttaaagtatttcaatgtgaaattacatataaacataaagtattttggcgagactcttgagggaacaggtcaagctgaagactacaggctgaagctgtcccctaagaaagcgagaaaacaatacgaagtattataaataaagaagccagtaaatgaatttataaaaaactcatttactggctattttgctaggaattatatcctaacctcactctgataattagaaaaatatataatttataaaccaaagaattaagaaacgatacgtttattactaattgatagtattataaagcctcttttctgacgatagcgcagtattgccaaaaaatacgtaattgggcaatattccaattgttcatgcccatagtaaaacctgaaggcttaaatatatttacatcagtcacttccaaagcggctgcaataagatattgaaggggcacactgatacttttcattgtatcagaaagtccattttcatcataaacccaggtaaaaggtaaatcagactcaaacacatcaaccttattaaatatttcaggtaatgcaagaatgtaacatgcgccatctacaacgggattatctaaactatccttgtagtagatcaaaagcgcttcataattttctctgtgttcatggtttacatagaaaaattcattcctaaataatgccat

SEQ ID NO: 3559 - DNA, 3092 bp, Artificial Sequence
  Description of Artificial Sequence: synthetic nucleic acid sequence
gaagttgatgctcctggtgattcgcctagtaatgcaataactgagtggtcttcagaattaaccacttcagtaccaaattggataaatcctttaccattctcttcagtatctttaataacttgtacacgtttaccagctgtataaacttgccaatcttcatcacgtgcttcaggatagaacgtacgtaaatggttcatacaaccttcttttgtcatgatgacttggtcaaatgaatacttaattaatggtaagtttttaactgcagaagcaagtaaagtcgtaatgttatatggtttaattgatttgaataaatccaagttagaaccatgttttaggaatttaggtcccacgtttgcaaatggtccaaataataatgttctttcaccatcaatgtaacgtgtatctaagtgaggtaccgtcattggtggtgtaccaggtggttctttaccataaactttggcatcgtgttgttcaataacttgcggatttgtacaagcaataaattgaccactgattgggaatccacctaaatgtttactttctggaatgccagttttttgtaatagtggaattgcgccaccaccagcaccgataaacacataatcagtttgatgttcgaatacttgtccattatttagatttttaattttaactgaccatttaccattagacaaacgttcaaaatcaacaacttcatgtttgtattgcacttcaacgtttggtgagtttttaagattttgagccattttacgagttaattcaccgtagtttacgtcagttccttcgtctattttactcgctgccatgtagcccttatcttcacggcctttcatcattaatggaatccattttctcatttcttcaatatcttcagtatattcgatattatcgaacatagggaattgcttcatcgcttcataacgatcttttaagaatttaacgttatttttaccacgaacaaaactaatatgaggtaatggattaataaattctttaggattttgaatttctcctgatttaactaaatgaccccagaattgtttagaaatttcaaattgttcattaatttctttagctttttcaatatcaattgaaccatcaggttgttgtacagtatagttcaattcacataaagctgcatgtcctgttcctgcattgttacgttcatttgaactttcaataccaggacgatctagacgttcatataaatgaatgtcccaatcaggtgcaatcgttttcaacatagaaccaaatgtagtacttagtacaccagcaccgattaacacgacgtcttttttgtcagacatagccataatgttcacctcttgtgtagtagttatcatattgctttccagctaattagacgtcatcattcttgttatattactttataacctcaaaaccttagaaaagaatcaaatctaatagcttttacatatctatgttaaagcaagcactttgaaaagtaaattgttaatagtaaatttatgacaattttatgatatatatttttatgaacatttaacgtttagctaaaaacttttcaatataaaatgccgattcctctatcgatttatattctgtattaattaccgttgcatttaattttctaaaaacttcttcagcataagataattcttttttgatacgctctaaactattgtaattagattctgaagatagccctaatgtttctgcacgattacgtcgtatatttgcgatataattgggacttgctgttaatccaaatacctttaaattcttttgttgaaatacattatctggaatagccacttcagggactaaaggaatatttgcaatcttatatcctttattagctaagtacatacttaatggcgttttagaggtacgtgatacacctactattaaagcatccgcttctccaatatctgtaaaatgcttaccatcatcatatttcactgaatactcaattgcttctatacgcttaaaatactcatcattaagcttacgcaacgcaccactttccattaatggtttagcgtgtgtatgttgtttaattatgctaattaactcagacatgtaatctacatagggaatttgatgttcatttgcaaactgatgacctaatgcattaaatgactcactcactaatgttgttgcaacaattgcattctgttctttagctaattgtaagacatttaaaaattcttgttcgtccttaatatatggaaatttcttaatttctacttgagttaaatctggaaactgtgtcagcgtcgcatgaatcatccgttgcgctgtttctccaattgaatctgaaactataaataactttaatacttcattattatccttcaccttatcgctcgctttcctccgcttgactctgagctgtagctaaaattgcacccggaactctaaatggtgaacatgaaacataatcaatttcccattggttaaatttacgaattgattttgcatcgccaccaagctcaccacatacaccaatttttatctctggatttgtatttttagcttgttcaacagctaattgaattagtcgtcctacaccttctctatctaaagtttggaatgggtcaagctgtaaaatgttattttcagtatacacatttatgaattttcctgcatcatctctagagaaaccaaatgtcaattgcgttaaatcattagtaccaaaactgaagaaatcacaatgtttcgcaaggtcattcgcaatcaagcatgctctaggcgtttcaatcatagtacctatcatatattgtatatcttgttgtgattctttttctaaatgtgtaattgtattaactaatcgttcttttaaagttgtaaattcttctactgttgacacgagaggaatcataatttctggtaggcacgttatgccctctttttgaagcttaataacactttcaatgatagcttcaacttgcatctcatataactctggataagtcacagccaaacgacaaccacgatgaccaagcattgaattgacctcatttaagtcaacgattcgcttgcgtaagaactctgaagatacattcagctgttgagaaacattgtttatatcttcttcagatgatggtaag

SEQ ID NO: 3560 - DNA, 2848 bp, Artificial Sequence
  Description of Artificial Sequence: synthetic nucleic acid sequence
atacacttgaggaaacagcttttttaatagatttattaattgatattcaagagcctatagtaattactggagcaatgagatcatccaatgaaattggttccgatggtctctataattttatttctgctataagggttgcttcttcatctgaggctaatcataaaggtgttatggtcgtatttaatgatgagattcacactgctcgtaatgtgacaaagacacatacttcgaatattaatacatttcaaagtcctaatcaggggcctctaggtgtacttaccaagaatcgagtacaattttatcatcatccttacagacaaactacctaccaatatatcgatgtaaatttacgtgttccacttgtaaaagcatacatgggtatggaagatgatgtactatcattttattcacaacaacacgttgatggtatagtcatcgaagcactaggacaaggtaaccttccaaaaagttgtcttaatggactacagcaatgtctaaagaaaaacattcctctagttctcgtatctagatcattcaatggtattgttagtcctgtatatgcttatgaaggtggtggcgcagatttgaaaaataatggtgttattttttcgaacggtttaaatggaccaaaggcaaggctaaaattactagttggtttgagtcaagacatgactcaaaatcaattagagcgatatttcgaagagtaattaaaaagagtgggacaaaattcgtatcaagttcattgtcacactccgatttctattagttgtatgcattgtctatgaaacttctttagtgcaattatactataattaaggattacctattattaatatgtgcattttaattgagtcattgattgactatacattaagaaagcttgggacattgtttagtatcccaagctttttgtaagctctatgtttcaagaggtgtttgtttttttgtcaaaatgctttgtgtaatgacaccaccatgatatttaccattttcgataaaaatagtatttgcatcattacccgcagcaataacaccagctatataacaattttcgacgtttgtttcgaatgtttctcgattataaacaggagcagttccatattcattggtatggatatcaatacctattgtttttaagaaatcgtaatctggatgataaccaatcatagcaaaaacgtagtcattatcaatttctataagttgaccatctttttcataagtcactgaatgatcggtaattttggttactgtcgcattaaattccatcgtaattttttcgtgattgactaatgattcgaaattgggtaatatccatggtttaattgctttagggtactgttcgccacgatataaaacagttacattagcaccagctttttctaattctaaggcagcatcaacagcagagtttttgcctccaataataacaacattttgattaaaatacggatgtgcttctttaaagtaatggaatacttttggtaattctgccccttccgcttctaaagtgttatgttgaccataataacccgtagcaacagttaaatatttacattcatatacaccttttgtaataaatgtagatttccctacatttgagcgtccacttaacgctacttctgttaatccagtgtcaggatactgtgctttttttacagcacttataattaagttaatattattaaaatttatattcatagacttcctctttcttatactattgtataattaactttaacatttttttctatatttacatataaaaaaaccgagtcacaattcacgtgactcagtcttaaatcaaatattttaagcagatgtcttgttcttattaattagatttccttcatcatcatataattcaggctcaatttcttcattaattgtttgttcagtaatgactactttacttacattttcagaagaaggtacatcatacatgatgtcaattaatgcttcttctataattgaacgtaatccacgcgctcctgttttacgttcgattgctttttcacttatagcagatagagcctcttcagaaaactctaattctacattatctaactctagcattttagtgtattgtttaactagcgcatttttaggttgagttaaaatatttttaagtgcagcaacatctaaagtttcaagattagcaactataggtacacgaccaataaattctggaattaagccatatgattggagatcctctggacgaatttgttccagtaaagcttcttcatcatatttatctgcttcattactagcaaatcctatcactttttctcctaagcgtctcttaatgacttcatcgataccatcaaaagctccacctaagataaataagatgtttgtcgtatcaatttggattaattcttggtttggatgctttcgaccaccttgaggcggtacactagcagttgtaccttctaaaattttaagcaatgcttgttgtacaccttcaccagacacgtcacgcgtgattgaagtgttttcagatttacgcgcaattttatcaatttcatcgacatatataatacctttttcagctttatcaatgtcgaaatcagcagcttgaataagacgtaataagatgttttctacgtcatcacctacataacctgcttctgttaaacttgtagcatcagcaattgcaaatggtacatttagtgttttagctagtgtttgagctaataatgttttaccgctaccagttggcccaattaatgcgatattacttttttgtaattcaacatcatcttcattcggacccaattgttgaatacgcttatagtgattatatacagcaactgctaatgattttttggctttttcctgaccaatg

SEQ ID NO: 3561 - DNA, 3803 bp, Artificial Sequence
  Description of Artificial Sequence: synthetic nucleic acid sequence
gattaaatcattagaatgataatgatatacgttcatcatcattccatgaaactgaagtgatttaatcctcaagaggtccaccaccaaatttttgatatgctgcttttaagccaattaagtcatcgcgatgtgggactttaacatgaccaggcataatttgataaggctctcgaccttttgaggccaaaacaactgtatcacctggttcagcaatatcaatcgcgtgtctaataccttctgcacggtcatcaaactctatataattgttatgcgttgcacctttagctaattcagctgtcaacattttaggatcatcgttagcaggattatctggagtaaaaataacataatctgctcgacatgctactctccccatctcaggtgttttcgttaaatctctttccccagccatacctactaaaaagattagcttttgtgtgaagattatgtttaaattgcttgaaatgttcttcacttatatgtggtatgtgaataactaaaaatccaaacgaaccgtttttagtattcttaatatctgcttcaagaatattcacatctatgttatgcgtcgtcgtcatataagatatgataggctcagtcgtattttcaccagtaaagtttaacctcacaatatatgcatcatgatctaatggctccaaatactctaaagaatcttcaaaatcatcgtttaaatcatctttcacaaaacgttttgttacttcatgttgtggattctcaaatactttacttaccgctccctgttcaataactttaccgttttccattacagcaacttcatcacaaattcttcgtataacatgcatttcatgtgttataagtacaatagttaaattttgttgttcccttaccttcaataataaatctagaatttcatctgtagtttgtggatctaatgcacttgttgcctcatcgcataacaatacatctggatcattagctaatgctctcgcaatacccactctttgtttttgtccgcctgataattcagacggatacgcactttctcgaccttttaggccgacaagttcaatgagttccaatgctttttgtttagctagaccacttggaacgccagcaatttctaatggaaatgttacatttttcaatacacttcttgaccatagcaggttaaaatgttgaaaaattttttaatcatttgagttggatgactaatcaaaaccaaattgaacaacgattctataatattattgaaaatgctgatcaatattatctctacttatatgattggcgtgtgattgaaagtgaatctaatgagagcgactttaaagacgttgatatatggattaactttgaagatgaagcgttaatagatgaatatatttgtgtgattgctaaagttgatgatgaaggtggcaatattaatcatatgatttctcaaaacttacgtcacaaatatgtttggtctacaccgttcttgatgagagttgaggagaactttagaccatacatgcacattatggaacatgactttaaaaagggcccattgaaaatcagaatgaaatataatgcagtatatttagttgaaatatataaaaaagataaaataaataaaaggcgtagcacaacttaaattgtgtttattcgtaattttgacaattgtttaaaaacaaatgtcaaagacaattatccaaatatttaagataatgatatatgcgttgtctacttatatttggaggtgcagattttgaatgagcagaaattaattaaattactagaattttacaaacaatataaagcattatctggatatatagataaaaaatataagttgacgttaaacgatcttgctgtactatatttagctaaaaaatattgcttagatgagcgaattcttatgcaaacttttctaaaactggctacaggagagttagatattagtagaactaagattttgatgtctattagaagattgatagacaaagaaaagttaaataaagtaagatcgaatagagatgaaagaaaaatttttctatatatggatgaaaataatatgagtgaatttgatgctttatttgaagatgttgaaaaattcttaagttattaatgacattttaatcgatatacaaaatgtatagagatgtgtcgaaatgaatcaagctacataaaatgagtttgctgtcgtcaaaagttttattttgatgacagtttttttattaaaaatgtttattgtattttgaggaacaataggtatctataatgattgatttaacaatgtttgtaacatgttaacagattttacaaagacggtagctaaatatataatatggtacatagatgatgaaagtgagatgacattatgggacgtaaatggaacaacattaaagagaaaaaagcccaaaaagataaaaatactagtagaatatatgccaaatttggtaaagaaatatatgtagctgcaaagtctggtgagcctaatccagagtcaaatcaaactttaagattagtattagaacgtgcaaaaacatattcagtacctaatcatattatagatagagctattgataaggctaaaggcgctggtgacgaaaactacgatcacttaagatatgaaggttttggtccgaatggttcaatgcttatagttgacgcattaacaaacaatgtaaatcgtacagcatcagatgtacgtgctgcgttcggtaagaatggaggaaatatgggagtatctggttcagtagcttatatgtttgaccatactgcaacctttggtgtagaaggtaaatctgtagatgaagtcttagaaacactaatggagcaagatattgatgtaagagatgtaattgatgacaatggcttgactattgtttacgcagaaccagatcaatttgcacaagttcaggatgcattacgtgaagctggcgttgaggaatttaaagtagcagagtttgaaatgttacctcaaactgatattgagttgtctgaagaggatcaagctatttttgaaaaattaatcgatgcacttgaagacttggaagatgttcaaaatgttttccataatgtagatttaaaataatgatgactgctaatgattggatagaccggttggaattaatttcgcatcctgaaggcggatattttaaagaaacaatgagaggcgacggtaaaggaagagcgtcttttagcagtatttattttctattaacacagcgcgatatatcacattttcatagaatagatgcagatgaagtatggtattatcatgctggtcagacgttgaagattcatatgataacccctaaaggtgaatatcatactgttaaattaggtagagatatagattgtggtgagtgtttacaatattgtgtgccaaaagggacaatttttgcttctactttagatagtgcagagggatatagtctagttggatgtatgtgtcaacctggatttgaatacgagcattttgaacttttaacacaagaatatttgattcgtcaatatccacaatatgaaagcataataaaaagattagctatatctcaagaagattaatagaatatataataagtataagaacctgagacatcggtaatagtctcaggttttttgatatattgacagtcgataactaaattaatatacgactatttcaaattttttagaacacaacatagagaatttcaccgagaaattcaacaggcaaagcaggttggggttcgggattcaggacgtggggcaacgaattcaatttgaaatttgacacgtgcactcagttaattaaatgaagcctaagttttatttaattaacttacctttttaaataa

SEQ ID NO: 3562 - DNA, 2168 bp, Artificial Sequence
  Description of Artificial Sequence: synthetic nucleic acid sequence
tttctaaaaaatctaaatcataaatgacagctttgggtcgataaaaagcaccaattaaatttttaccatgctcagaattaattccaactttaccacctacacttgaatcgtgggctaaaatagttgtcggtacttgaacaaatgatactcctctaagtaaagttgcagcaataaaccctgcgaaatctcctgttgcaccaccaccaatggcaacaatacatgtttgacgtgttaattgatggcttagtaaatattcaatagtacgatgataatgttcgaatgattttgacgtttccccagaagggattacgatacatttagcatcaaatttttgagccaaagcttcaagtttatctacaaataaattatagacttgcttatctataatgaaaaatcgttgttcttcatttttaatgtatctttctaaagagttaattgcgtgatgtttaacgatgatgggataattatcacttgcatatgatgttttaagttccatgctttcacctcaatcattctagggtaattaaaattctatgttgagttgtcgacgctctttaatttgtgctacgagttggtccatgtggttagattgaaactcttcgagtactgcttttgctaactcaaaagcgacaacgtgttcacatactacgctagctgcgggcactgcacaactatctgagcgttctatagtagctttgaagtcttctttagtattaatatcaactgagtttagtggtttatataaagtaggaataggcttcatgacaccattaacaattataggcatcccattactcatgcctccttcaaatccacctaagtgatttgtagctctaaaatagcctgaatcttgattataatgaatttcatcttgaatttcgctaccaggtttttcagctgctttaaatccctcaccaaaacttacacctttgaaggcgttgatactcacaacaccctgtgcaatgcgtccatctaatttacggtcatagtgtacataacttcccactccaataggcatgttttcagccattacttgaactacgcccccgattgaatctccgtcttttttcgcttcatctattttatctctcatttgttgcgcaatattttcgtcaattacacgtacatcatttttatctacattatttttgaacatatctacatcatataaacctttgtctttaataccaccaatttcgactacacggctatataagtggatatctaattgttctaaaagaatttttgaaacagcacccacagcaactcttgctgctgtttctctagcagatgaacgctcaagcacatttcttaaatcacgatgattatatttcatgccacctataagatcagcatggcccggtctaggttttgtaatggtacgtttcatattttctctttcttcatcactaattggtgcgacgcccattatttttctccaatgagtgaaatcgtcgttagtaactactaaagttattggacttcctaaagtaaagccatttctgacgcctgacacaatttctatagtatctttttcaattttcatacgacgcccccgaccatatcccccttgacgtttaaacatttccttattaatatcttcagccttaatttctaaattagctggtacaccttctatgatgactgtaagttgtggtccatgtgattcaccggatgtaaggtatctcatgatcgcacgcccctttctattcttcaatacattaaattgtaatatgtttaatatattatcatattcaatcacacaacataagtcagttagacaaacaaggagatttttattttagcagttataaatatttaaaaaagaatagcaccaagatgattgttatgtcatagtgacattataccaattaaagatcagtctattaaaaaactcaaaagaccgaaatcattagatacatgattgatatattaaaagtaggtcattacttaataatgaatgctcaattgtcaaaagataaaattgctatataatcgaacaatatacggtattgcatcgttaaatccctagataaaaaaataaatagactaattcaataagtattattttaagcaaataaaatttggttaatcataaaaaatgcctgagacacaaatatgcgtcacagacattaatggataaaatgaatttcattatttgatatttt

SEQ ID NO: 3563 - DNA, 2996 bp, Artificial Sequence
  Description of Artificial Sequence: synthetic nucleic acid sequence
ttcatcacgtgcttcaggatagaacgtacgtaaatggttcatacaaccttcttttgtcatgatgacttggtcaaatgaatacttaattaatggtaagtttttaactgcagaagcaagtaaagtcgtaatgttatatggtttaattgatttgaataaatccaagttagaaccatgttttaggaatttaggtcccacgtttgcaaatggtccaaataataatgttctttcaccatcaatgtaacgtgtatctaagtgaggtaccgtcattggtggtgtaccaggtggttctttaccataaactttggcatcgtgttgttcaataacttgcggatttgtacaagcaataaattgaccactgattgggaatccacctaaatgtttactttctggaatgccagttttttgtaatagtggaattgcgccaccaccagcaccgataaacacataatcagtttgatgttcgaatacttgtccattatttagatttttaattttaactgaccatttaccattagacaaacgttcaaaatcaacaacttcatgtttgtattgcacttcaacgtttggtgagtttttaagattttgagccattttacgagttaattcaccgtagtttacgtcagttccttcgtctattttactcgctgccatgtagcccttatcttcacggcctttcatcattaatggaatccattttctcatttcttcaatatcttcagtatattcgatattatcgaacatagggaattgcttcatcgcttcataacgatcttttaagaatttaacgttatttttaccacgaacaaaactaatatgaggtaatggattaataaattctttaggattttgaatttctcctgatttaactaaatgaccccagaattgtttagaaatttcaaattgttcattaatttctttagctttttcaatatcaattgaaccatcaggttgttgtacagtatagttcaattcacataaagctgcatgtcctgttcctgcattgttacgttcatttgaactttcaataccaggacgatctagacgttcatataaatgaatgtcccaatcaggtgcaatcgttttcaacatagaaccaaatgtagtacttagtacaccagcaccgattaacacgacgtcttttttgtcagacatagccataatgttcacctcttgtgtagtagttatcatattgctttccagctaattagacgtcatcattcttgttatattactttataacctcaaaaccttagaaaagaatcaaatctaatagcttttacatatctatgttaaagcaagcactttgaaaagtaaattgttaatagtaaatttatgacaattttatgatatatatttttatgaacatttaacgtttagctaaaaacttttcaatataaaatgccgattcctctatcgatttatattctgtattaattaccgttgcatttaattttctaaaaacttcttcagcataagataattcttttttgatacgctctaaactattgtaattagattctgaagatagccctaatgtttctgcacgattacgtcgtatatttgcgatataattgggacttgctgttaatccaaatacctttaaattcttttgttgaaatacattatctggaatagccacttcagggactaaaggaatatttgcaatcttatatcctttattagctaagtacatacttaatggcgttttagaggtacgtgatacacctactattaaagcatccgcttctccaatatctgtaaaatgcttaccatcatcatatttcactgaatactcaattgcttctatacgcttaaaatactcatcattaagcttacgcaacgcaccactttccattaatggtttagcgtgtgtatgttgtttaattatgctaattaactcagacatgtaatctacatagggaatttgatgttcatttgcaaactgatgacctaatgcattaaatgactcactcactaatgttgttgcaacaattgcattctgttctttagctaattgtaagacatttaaaaattcttgttcgtccttaatatatggaaatttcttaatttctacttgagttaaatctggaaactgtgtcagcgtcgcatgaatcatccgttgcgctgtttctccaattgaatctgaaactataaataactttaatacttcattattatccttcaccttatcgctcgctttcctccgcttgactctgagctgtagctaaaattgcacccggaactctaaatggtgaacatgaaacataatcaatttcccattggttaaatttacgaattgattttgcatcgccaccaagctcaccacatacaccaatttttatctctggatttgtatttttagcttgttcaacagctaattgaattagtcgtcctacaccttctctatctaaagtttggaatgggtcaagctgtaaaatgttattttcagtatacacatttatgaattttcctgcatcatctctagagaaaccaaatgtcaattgcgttaaatcattagtaccaaaactgaagaaatcacaatgtttcgcaaggtcattcgcaatcaagcatgctctaggcgtttcaatcatagtacctatcatatattgtatatcttgttgtgattctttttctaaatgtgtaattgtattaactaatcgttcttttaaagttgtaaattcttctactgttgacacgagaggaatcataatttctggtaggcacgttatgccctctttttgaagcttaataacactttcaatgatagcttcaacttgcatctcatataactctggataagtcacagccaaacgacaaccacgatgaccaagcattgaattgacctcatttaagtcaacgattcgcttgcgtaagaactctgaagatacattcagctgttgagaaacattgtttatatcttcttcagatgatggtaagaactcatgtaacggtggatcaagtaaacgaacaatcgtaggtctatcttgagataatct

SEQ ID NO: 3564 - DNA, 3618 bp, Artificial Sequence
  Description of Artificial Sequence: synthetic nucleic acid sequence
ttttaattattattaatacaaatattctaatttatttgaccttaaaacactatataaatttaaagttttttaaatatttacaataaatagttaaatcgagacattgcaacatctgtagtacaataaaattctaaaaataagctaacaagaatagcccacatacaaattggaatatcactatgcaaactatgtaaaaaataaaaatacattacctaaaaagtctacgtcattcgtgaagatgacgtggacgctttttattatgtgatgcttttaccagaagaatactaaaaggagtaacaaatatgaatacaatcaaaagtacgatacacacagaagcgatttttagcgatgatgaacaacaccgatacttacttaaaaagacgtggaatgaaaagaagcccacatgtgaaatggaagtacgtatagaggagataaggggacaacgtatttgtctatattatgatgaaactacttttgactcagtttaatgattaaaattgagacgcatagtaaaagaggttatccatacgaaaagaaattataaatttgattagggagttgcacatatgaaaaaaacagtcttatttttattattgtctctagttttagttttaacggcttgtagtaatagttcgaataataattcaacttcgaaaaagaaaaatagtgattctaaagaaactgtaaccatcaaaaatagttttgaagcaagtggtaaagaaaataatggcagtgataagaaaaaaatctctaatactgtcgaagtaccaaagaatcctaaaaatgccgttgtattagattatggagcgcttgatgtgttgaaagaattaggtgtggctgataaagtaaaaggtttacctaaaggtgaaaataaccaatctttacctaaatttttagatgaatttaaagatgataagtatattaatactggaaatttaaaagaagtgaactttgataaagttgcatcagctaaaccagatgtgatttttatttcaggaagaacagctaatcagaaaaatttagatgaatttaaaaaagctgcaccaaaagctaaagttgtatatgtaggtacaagtgatgacaacttaattaaagatatgaaaaaaaatacagaaaatttagggaaaatctacgataaagaagataaagctaaaaaaattaataaagatttagatagaaaaatatctgatatgaaagataaaactaaagactttaataagaaagtaatgtatttattggttaacgaaggtgaactatcaacgtttggaccaggaggaagatttggtggtttagtgtttgatacattaggatttaaacctgcagacaaaaaggttagcaaaagcccgcatggtcaaaatataaataatgaatatattaacaagcagaatccagatgttattttagctatggatcgtggttcagttgtaggtggtaaagcaacaacaaatcaagttttaaaaaacaaagttataaaaaatgtaaaagcagtaaaaagtaatcatatttacgaattagatccaaaactatggtatttctcttcaggatcttcaacgacaactatcaaacaaattgatgaattaaatgaagtagtagagaaagttgaaaaataatcttataataagagaaaatcaaccgaggtataagaagaaaactttaaatgcatgaatagaatgttgatataagaagagctcctaaagcgaatttttaaataaaattcactttaggagctcaaatatttcaaaaactttgtaacaagttatttatacttcaaaatataaatgataatgaaatttacaacgactgttaaaatgcgctttacaacgaggacacatttctaccatcatatagtcacgaatacgcatctcatgtttacaaacaccacacataatagctttttcatcaaactcattttcagcccatctttcaattgtatgagatacgtgttcattatgacatttataacacggataatatttgttgcaacatttaaatttaatggcaataacatctaaagatgaataataatgtgtacatcgtgtttcattatctatgagtgatccataaacctttgccaatgatgtgtcctccttgaagaattaatctgtgggatgatcacctataatacgtacctcagtattcaattcaacatcgaatttttctttaactattttttgtacgtgatgtataagtgcttcataatcagttgctgtaccgttgtctacattaaccatgaatcccgcatgcttagttgaaacttcaacgccaccgattcgatagccctgtaaattagaatcttgaatgagtttacctgcaaaatgacccggtggtctttggaaaacacttccgcaagaagggaattcaagcggttgtttagattcacgtctttcagtaagatcatccattttggcctgaatttcatctaatttacctggttctaaggtgaaagcagcctctaatacaactaaatgtttttgttgtaccacactatttctatagtctaattccagttcagctgtagtgagctttaataaatcacctttttcattgacacataatgcatagtcaatacagtctttaacttctccgccataagcaccagcattcatgaatacggcgccaccaattgacccagggataccgcatgcaaattctaaaccggttaatacatggtcacgtgcaacatttgaaacgtcaataattgctgcaccactacctgctataattgcatcatcagaggtttcaatatgattgagagataataagctgaggacgattcctcgaattccaccttctcgaatgataatgttagacccatttcctaaataagttaccggtatactgttctcatgggcaaactttacgatggcttggacttcttcatttttggtaggggataaataaaaatctgcctctcctcctgtttctgtatatgtataacgcttgagaggttcatccactttaataatatctttaggaagaattgactctaatccgcgtaagatgtcatttttattcaatgttttgaacatcctttctcatcttcttaatatcaacattattatatcaattataaaagttatttgcgaaatttggatatatgaattgattataaatataaaatggttatgtcgtactttatgagtttttacgataacaaattagattccttatataatttctcaaacaaattttgtttttgagactcatattcacgtatctttttagcatgttgcacaatttcatttttcttacttgcaaaccattctgctattgctttatcgttgtgtagtaaatgattgactgtttgatattgtttgaaaagagaagtttccatttgaataatatgtaatcttacttcttgttttaattcacttaaattattaaaacgtgccatgacaacttttttcttgtaagaatggtgcaaacgataaaaaccagcataatttaggcgcttttcatctagtgaagtaatatcgtgcaagttatttacaccaacaagtatatctaaaatgggctcagtttgataattaaaatgacaggtaccaccgatatgctgagtgtatttaataggagaatctaaaatagtaaacaatacgtctttcactttgttatattcat

SEQ ID NO: 3565 - DNA, 3615 bp, Artificial Sequence
  Description of Artificial Sequence: synthetic nucleic acid sequence
agttgatactcaacctttagaaaaaataaaaagacaacttcaagatgaaattgatcaaggtactaacacagatggaatgactcaagattcagtggataattacaatgatagcttaagtgcagcaattatagaaaaaggcaaagtaaataaattacttaaacgtaatccgacagtagaacaagttaaagagagcgttgctaatgcacaacaagtcatacaagatttacaaaatgctcgaacttcacttgttccagacaaaactcaacttcaagaagctaaaaatagattagaaaacagtattaaccaacaaacagatactgacggcatgactcaagattcgcttaacaattataatgataaattagcaaaagctagacaaaaccttgaaaaaatatctaaagttttaggtggtcaacctactgtagctgaaattagacaaaatacagatgaagcaaatgcacataaacaagcattagacactgcacgttctcaacttacattaaatagagagccatatatcaatcatattaataatgaaagtcatttaaataacgcgcaaaaagataattttaaagctcaagttaactcagcacctaatcataatactttagaaacgattaaaaataaggctgatactttaaatcaatctatgacagcattaagtgaaagtattgcagattacgaaaatcaaaaacaacaagaaaattatttagatgcatctaacaataaacgtcaagactatgacaatgcagtcaatgcggctaaaggtattttaaaccaaactcaaagtccgacaatgagtgctgatgtgattgatcaaaaagctgaagatgttaaacgtacgaaaactgcgttagatggaaatcaaagattagaagttgctaaacaacaagcacttaatcatttaaataccttaaatgatttaaacgatgctcagcgacaaactttaactgatactataaatcactctccaaacatcaattcagtgaatcaagctaaagaaaaagctaatactgttaacacagcaatgactcaactgaaacaaactattgctaactatgacgatgaattgcatgacggcaattacattaatgcagataaagacaaaaaagatgcttataataacgctgttaacaatgctaaacaactgattaatcaatctgatgctaatcaagcacaacttgatccagctgaaattaataaagttacacaaagagtcaatacgactaaaaatgatctaaatggtaatgacaaattggctgaagctaaaagagatgctaatacaaccattgatggtttaacttatctaaatgaagctcaacgtaacaaagctaaagaaaatgtaggcaaagcttctacaaaaacaaatattacgagtcagttacaagattacaatcaattgaatactgctatgcaagcattacgtaacagtgtgaacgacgttaacaatgttaaagcaaatagcaattatataaatgaagataatggtccaaaagaagcttacaatcaagccgttactcatgctcaaacattgataaatgcacaatctaaccctgaaatgagccgtgacgtagtaaatcaaaaaacacaagcagtaaatactgcccatcagaatttacatggacaacaaaagttagaacaagcacaaagtagtgctaatacagaaatcggtaacttaccaaacttaactaatactcaaaaagctaaagaaaaggaactggtaaatagtaaacaaactcgtacggaagtacaagaacaacttaaccaagctaagtcactagatagttctatgggcacgttaaaatcattagttgctaaacaacctacagtacaaaaaacaagtgtttatattaacgaagatcaacctgagcaatctgcctacaatgattccattacaatgggacaaactataattaataaaacagctgatccagtacttgataaaactttagttgataacgcaatcagtaacatttcaactaaagagaatgcactgcatggtgaacaaaaattaacaactgctaaaacggaagcaattaatgcacttaatacattagctgatttaaacacacctcagaaagaggctattaaaacagctattaacactgctcatacaagaactgatgtaactgcagagcaaagtaaggctaatcaaataaatagtgcaatgcacacgttgagacaaaacatttctgacaacgaatcagtaacaaacgaaagtaattatattaacgctgaacccgaaaaacaacatgcctttactgaggctctaaataatgctaaagaaatagttaatgaacaacaagccactcttgatgccaattcaattaaccaaaaagcacaagcgattcttactactaaaaatgctttagatggtgaagaacaattacgtcgtgctaaagaaaatgccgatcaagaaatcaatacgttaaatcaattgactgatgcgcaaagaaatagtgaaaaaggtttagtcaacagttctcaaactagaacagaagttgcttctcaattagcaaaagctaaagaactaaataaggtgatggaacaactgaataaccttatcaatggtaaaaaccaaatgataaatagcagtaaatttatcaatgaagatgcgaaccaacaacaagcatattcaaatgcgattgcaagtgcagaagtgcttaaaaacaaatcacaaaaccctgaattagataaagtaacaattgaacaagcaattaataatattaattctgcaattaataatctaaacggtgaagctaaactgactaaagctaaagaagatgctgttgcttcaataaacaacctaagcggattaactaacgagcaaaaaacaaaagaaaatcaagccgttaatggctctcaaactagagaccaagttgctaacgttttacgtgattcaaaggcattagatcaatctatgcaaacattacgtgatttagttaacaatcaaaatgtaatacattcaacaagtaattattttaacgaggattcaactcaaaagaatacttatgataatgcaattgataatggctcgacatatataactggtcaacacaattcagaattaaataaatctactattgatcaaacgattagccaaattaacacagctaaaaatgatttacatggtgcagaaaagttacaaagagataagggaactgctaatcaagaaattggacaattaggttattttatcttacatctcgccattcttgatcagtcatatcttttttagtccaaccataatgattacgtccatgataacgtacaaaagcaatttcactagtaatcctatttactaaaggaacgctcccctctttaacttgaggttcatctaccactgcatgaatgatttgatgttgtgttaagaaggataaagtttgttctttatactgattgtcaaaccatgattgatgtctaaattcaatgctcatcggaatatcagttaattgttttctcacatataagatgtaatttatattttggacgttacaatcaaaccaaggtggaaattgtacgagcaccatcgccaatttattatgctcttttaacggattgatcatttctttaaactgtttaaataatatatctctcgactctgcataatctcta

SEQ ID NO: 3566 - DNA, 3215 bp, Artificial Sequence
  Description of Artificial Sequence: synthetic nucleic acid sequence
cctggtggaccgcatattgatcgattagcagctaaaggtaaagatgtatatgattttccaagagtttggctcgaaaaagatagttatgattttagttttagtggtcttaaaagtgctgtaataaataaactgcataatttaagacagaaaaatattgaaattgtagctgaagatgttgcaacgagtttccaaaatagtgttgtagaagttttaacctataaagctattcatgcttgtaaaacttataatgttaatcgcttaattgttgcaggtggtgttgctagtaataaaggattaagaaatgcactaagtgaagcatgtaaaaaagagggtatacaccttactattccaagtcctgttctttgcactgataatgcagcgatgattggtgctgctggatattatttatatcaagctggtttgcgtggcgatttagctttaaatggacaaaataatattgatattgaaactttttctgtttaaataatatttcaaagcgcctatctaagagtaactacttttagataggcgcttaacttttttataaatattaaactaattaattctagaggtttcgaatattttgttgagcacgctgataaatatcgataggaaactgcgtaatgcgtagtaattcaattgcattacgtgtattggctttacctggtttaattttgtaatcgaaaaatatgctattttcttgaattgattcattaaaatgataattattatatgtattttctaataatgttgataattcaacatcatgtgtcgcagcgataacctgatatgctttttgattatctaaatacgataatactgattcagaagccgcaatacgttcagttgtattcgttcttttaaaaatttcatctataaaacaatatatcttattgcactgatgagtgttaaataatctacgaatagacttaagttctgacatgaaataactgtcaccacttaaaacgtcatccgcatttgccattgatgtcattacatagccaggttgataaataaatgagtgagctgttgcagtttgtatcgattgagctaaaatcaaatttagtgcaactgctttcataaatgtagattttcctgatgcattagagcctgtgagcaatatatgatttgaaatgtcaattgtgttagcaatcgcattttcttcatctagtagaggatgaatgattgatttcatttgaagaccattaatattgtgattgattttaggataacaataatgtgtcaaagtatgttgatacatagctatagagtaatgattatctaatatgcttatgtagtcataacatgtcataacttcttcttgatacttaaagtagctgcgttgtattaaatgaaataaaacataatctatcatgaatactaatttaataaacatgattatgctactcgccatatcttgtgattctactctagctaataaaccactaaaacggcgtgaagctttaaaatgagtaaaatcaacacttatcgcgggcgtgctctcaatcttacttaaagcttgactttgctttataacattagcagtataaaaaattgattttaaatcttggtcataagatttttttagtttgaaagataatattgcatttaaaatcataaaagtaagacatattaatataccttttgaaggaattaaaaaaatgaatgcgaacccgataaatggtaacaacggacaaaacattaataaaatatttcgcttagtgggtaacatttgatctggaaacaaagggtatacatttttaccaattttagaaagaatgtaagatacatttaaacgaaatactttattttctttaaacatgtttatcaatgaggtttgatttaccttaaacatacctcttaaagttgcatatagtcgcatttcaccaattgcagtgaaattaaaattaattttatgaaataacgtatccatatttaggtctgaccaagtcttatcgtcgataaatgactgctcattgtaatgatcgcggtaagcgtgatattgggcatcgaatcgtgaattaggacgtataaaactttctaattttaatttgagtaattgctgtacagatttgatcagctgccattgctacatcaagtctctctcgattattcatataaatatctttgagctttgcatgaagtgtatctctttgcatatggtgagatgtaataagttgtgaatcaaatcgttcctcatcatgtttaattttacacgggcaaggtagatatctaattttgattctttcattttcaatatatagttcaggaacatgtccttttacaaaattcggacaatcatcatagcgatgtccatcataaactttttgttgatctttatactcttgaagaacatttaaatcttcgtctatcatctcattagttatattactacgatttttctcaagaaaatgtttaacgtcagtatcattgattacattttgttttattttttgtatacgtttatctagattttgagaatcgcccatgatatttctgaaacttttcattagttatcttcctccttccacttttgatttaacttttcaagaaatgcttgtcgatcttcttcgagagtgtcatcatttatttctttattttcttcttgatcgtccctattttgaagccatttaggtgtcttttctttggataaaaattgattttgtcttccacgattgttctgtcgtttatcattagaatgtgtttcgtaatttttaggttgattaacttgtaatgcatattcatatgcttgtttggcatttgaaataccaattttcttccagttggaagcaatttcaaaaatataagattttggcaacttcatatcttcttttaacataacaaactgtaaaagtatattgattacaccaaaattcattttttcacggttaatcaattcttctatcatacttttttgcgactgtgtaggttccgaatcagaccaacttgctaacatatcaatcggacttgtttcatctagcagttgtaaccaatcatttgttgtatcttccgcttgtcgatcttttttttcatcgttaattttatttgtttgatgctctaattttggtaattgattatcatgttcaatcaggtaataagttctagctttcttacgcatttcttcaaaagataattgttgtgcactggtaatggaacttaatataacatttttcataccatcttcagtaattccataaagtgtcgcaagttgtata

SEQ ID NO: 3567 - DNA, 3244 bp, Artificial Sequence
  Description of Artificial Sequence: synthetic nucleic acid sequence
gatattccattagacgaaaaatcatttatgtttgatacaccaggtatcattcaatcacatcaaatgacaaattatgtatatgaaaatgagttgaaaatcattatacctaaaaatgaaataaagcaacgtgtgtatcaacttaatgaaaaacagacattatttttcggaggattggcacgcattgattatgtatctggtggtaaaagaccacttgtttgtttcttttcaaatgatttaaatattcatagaactaaaaccgagaaagctaatgatttatggaaatcccaattaggcgcattgctttcaccgcctcaagatgcacaacaatttaatcttaatgatgtaaaagcagtaagactggaaactggtaaaactaaacgtgacatcatgatatctggtttaggattcataactattgatgctggtgcaaaagtgatagttcgtgttccaaaacatgtagatgttattttaagaaattcaattctttaaaaagaggtgataaaagtgaaatttgcagtaattggaaaccccatttctcattcattatcgccattgatgcatcatgctaattttcaatctttaaatttggaaaacacgtatgaagcgataaatgtaccagttaatcaatttcaagacattaaaaaaataatttcagaaaagagtattgatggattcaatgttactattccacataaagaacgtattattccgtacctagatgatattaatgaacaagcgaaatctgttggggcggtaaatacagttttagttaaagatggtaagtggattggttataatactgatggaattggttatgttaatggtttaaaacaaatatatgaaggtatagaagacgcttatatattaattttaggtgcaggtggagcaagtaaaggtatagcaaatgaattatataaaatcgttcgtccgactttaacagttgcaaatagaacgatgtctcgttttaataattggtcgttaaatattaacaaaataaatttaagccatgcagaaagccatttagatgaatttgatattataataaacactacacctgctggtatgaacggcaatacagattctgtaatttctttaaatcgtttagcttcacatactttagtaagtgatattgtttataatccatataaaacaccaatactaatagaagctgaacaaagaggtaatccaatctataatggtcttgatatgttcgttcatcaaggtgctgaaagttttaaaatttggactaatctagaaccagatataaaagcaatgaaaaacatagtaattcaaaaattgaaaggagaattatgatgttaactggtaagcaaaaaagatatttacgtagtttagctcataacattgatccaactttccaaataggtaaaggtggtattaatgaaaatatgattcaacaaatttctgaaacattagaaaagagagaattaattaagattcatatattacaaaataattttgatgataaaaaagatttagcagcaatagtatctcaacaaacgcaaagtgaattggtacaaataatcgggtcaatgattgtgttatataaagagtctgaagaaaataaagaaatcaaattgccacaatgaataaaaaaatcgttctctttggcggtcaatttaacccgattcacactgctcacttagcagtagcaagtgaggtttatcatgctattaaaccagatatatttttctttttgcctagttatatggctcctttaaagcatcataatacacaattatattctgaacatcgagtgaaaatgatacagctcgctattaaggagattggatttggtgaaatttgcactactgatttagatagaaaagtgcacgaaactaaacgttaaaaaagctatgccacccgctaggcatgcaatccaagcgtcggaagctacgccaccaaacatgaataagaaaaaaccacaagctacaaaggcagcaatgagatttgttaagaaagaatactgaagagacgcacgtttaagttgcagtaactcactttttgcttcgtcaattgtaagttgcttactcgaaattttacgagataggctattggttaaagcaattttctcaagatcggttgtacgttcgcgaatacgaatcaacctcgtactagtacgatcatttaatgagaaaataattgcagttgatgtcacaaaactgtatgtatcatgtaaaccataactatgggcaatacgattcattgtatcctcaattcgatatgtttcagcgcctgcttcaagtaagattcgcccagcaattaagactacatcaatcactttattttcatcaatgatagtgattgaatctgacatatctcatcacctccgaagctatttaatatttttatgaacaattgaagtttacaacttgaagacttaagtttcaatagacagcttgattttaataacattttcaatactaattaaaaatagtaaaaaatgctatgcataactgtatacgctttaataattttttaacgtagcagttaacatagcatttagcttgattataatttgacaataggattaaacatgactttatttcttccttcacttttagccacatgtaccatgtcatcagcatctttaaatactttacgttgagatttacgatcttcttgagttaagtatcctacaccaattgaaactgatagcttgattacttctttgtttggtaggtggaaagaagatttttcaacaccacttcgaatattttctgctaatttcacgctttgatctagtgtgtaatctcttattacaacagaaaattcttcgccaccgtttctaaatattttgaactggtttgggacatagttttttaatagttgagacatttgtttgagaacagcatctcctgattggtgtgaataatgatcgtttacatctttaaagccatcaatatcaatgagaagtaaggctaaactttgtttcttttcttcagctttacttgagacctcatttaagtgtctatcaaattctttcacattacctagacctgtaagataatcgtatttatcttcattttcataacgattgactaaagagaaaaagtgccatatatcaacgaatgttattgctgaagcaattgtaataataaatgaaatagggataagcactaaaatctctacgagttcataaatagggcttaataatgctaaaaataacaaaatgataatgctaatcaaatttaaaataagtaaagaaatgatatcgttttgcttt

SEQ ID NO: 3568 - DNA, 3276 bp, Artificial Sequence
  Description of Artificial Sequence: synthetic nucleic acid sequence
tcaacggatatatatctatgattccaccacgcaatgaaaactcaccaatatgtgacactacactttctcggcgataacccatattaactaatttatttaagaatgcatcaacatcaatatcctgacctactttaagcgtcatttgatgatctttccataaatcaaccggtgttagccattttttaaagccgtttaaaggcacaataaataaccctttttcgccttgggctaacgcagtcaacgttctaacacgctcactcatcaattgtggactttgagtagaaaactcttcagtcattatatcttgaacaggatatttataaacttctgagtcatctacatattgtaaaatgtcagtttcgattttatctgcttggtataaattattagttacgagtagcatttgtttatgatcttttaaatatttttcagcaataattgttgccttcgctgacggggataatcccgtaactaaaatattctcttggccgaagacttcatctaattcttgaaaacgattatcttcgctaatgtaatttgcaatcattgatttcacttgacttcaccattaaattcattcataacatgatcaaaacgagaactttcaataaaagattctacagctcttgcagaatgttcaattaccttttccataatgatcatttcttcttttgaaaatttttgtaaaacatagtccggaacagacatcccatttgttggacggccaacaccaattcgaatacgtttaaattgatctgtaccaagcattttaattatcgatttcataccattatgaccgcctgcactccccttttggcgcagacgcacttgtccttgttctaaatctaaatcgtcatataaaacgatcaaatcttcaacatcgacattataataatccattaaaggggctacagcttgaccagataagttcatcatggtcattggctcaataaataatactttttcgccgtttaaacgttcaatagtatatgcacctttaaatttttgtttgtctaaagtaaattggtggcgttctagaatatcatcgacaacttcgaaaccaatattatgtcttgttaattcaaaacgtttaccaatgttgccaagaccgacaatgcatttcattattgttacctccactattaatattatgtatcttcacatattttcaaatgctattgctgtgtttattttaaaataaaggacgtaaaaatgattgaccactgatatatgtcaacctcctctaaaaccgtcctaaataattaatcattccctataataacacaaaaagcactatgcttattaacataagcacagtgctcgcctttaaatctgtaatctcaactaatgagaatacctacttaagagacacgaagattagtcttctttattttcttcttcatcgtcttctttgtcttcaccaacaacttctggttcttcagttgctgattcgccttccatagcttcaacttcttcttcagaaggttcatctgttggaggaactactgttacgatagaatcttctggattattttcgattgtgaaatcaccagagattttaatatcagaaactgctaagctgtcattaacttgtaattcactgatatctacttcgatagtttcaggaatattttcaggtgtagctgtaacttctaagttgaataatggttgttcaactacgccgccttctttagcacctacagcttcaccaactaattgaacttgtacttcaacagtacgttcttcactcatgttgattgctaaaaagtcaatatgagtgatttggttttttaatggatcaaattgataatctgaaaccattactttaattgttttagaacctacgcctaaatcaataacaccattacgtcctacttcacggattactttgataaattcaacttcatcaactttaactgaagtattttttgtaccgtaaccatatacaactgcaggtactttacctgagtttcttaattgttttaggtcagaacgtgtttgtttaccttgacgaatgattgactttaatgaagccattcgtatttccacctttcgaatttcgaggtttagacattggatacgtctaacctgctcctcacttacccatcaacgttactgttgcttgtaagtgtttatttgttcgcaattctacgaacgatagtattatacatgttgatgtaggatacgtcaaattcaattgtaaattttagtcaaataatacacttactgattctctttcgtatacacgaataattgctttcgcaattaaaccagctacagaaagttcttttgtattattaggttttctattctcttctaattgaattgagtttgttactataagttgcttgattgcagagttttcaattcgttctttcgctggcccagaaagcactggatgtgtacagcaagcatagacttctttagcacctttatcttttaaagcttgagcagctaaagtaattgttcctgcagtatcaataatgtcatctataataattgcagtacgtccttcaatatcacccacaatgttcataacttctgccacattcggtttcggacgtcttttgtcgataattgcaattggagtttttaaaatgtcggctaatttacgagctcgtgttaccccaccatggtcaggggacacaactacacattcttctggattaatatcaggatcattctcaaagtgttgtgcaaggataggaacacccattaaatgatcaataggaatatcgaagaatccttggatctgaggtgcatgtaagtctaatgcgatcatacgattggcacctgctgtttcgattaaattagctactaatttagcagtaataggttcacgactacgggcttttctatcttgtcgagcgtaaccatagtatggtactacgatgttaatatttgctgctgacgcgcgtttacacgcatcaatcataataagtaactccattaaatgaagattgactgggtatgaagttggttgaacaataaaaacatcacaaccacgaatgctttcttcaatatttatttgaatttctccatcactaaaacgttttacagaacatttacctaattcaatccctacatgatctgctacttcttgtgccaaaggttcatttcctttaagcgaaaagatcttcattgatgaattcttatattcattatttaacatttatagtcctccaattatttacttagacatttatattatatagaaaatagcgcttttttactatgatagatgtacaatcaaaattattacaattttataaattc

SEQ ID NO: 3569 - DNA, 4519 bp, Artificial Sequence
  Description of Artificial Sequence: synthetic nucleic acid sequence
gtcatagacataaattcagtagtataaccaatcataccgcgtgcaggtaccataaagattaaacgcgtcaaaccattgtcggtcgtcatcatatctaacatttcaccttttcgtgcacctaatgactcaatcactgccccggcattttcagaaggcacttcacattgtacacgctcaaatggttcacttaacacaccatcgatttctcttaaaataacttgaggtttagaaacctgtaattcaaagccttcacgtctcatgttttcaataagaatagacaagtgtagttcaccacgaccagcaacaacccatgaatctggttgatcagtaggtgtaacttttaaagaaacatctgtttcaagttgttgatctaatctttcttgaatttgtcgagctgttacataatcaccttcacgtccagcaaacggagagttatttactttaaaagtcatttctagggttggttcatcaatacgtaacaccggtaatgggtcacgatgatcatgtggtgtaactgtttcaccaacgttaatatcttccatacctgaaacagctattaagtctcctgcttgtgcttcttcaatttcttcacgtttaagaccaaagtaaccaaatattttcgtcacacgaaagttcttaactgtaccatctaatttaattagtgatacattatcacctacacgcattttacctctgaacacacgtccaacgcctatacgacctacataatcattataatctagtaaagcaatttggaattgtaatggttcatctgaattatctactggtgccggaacatagtcaataatcgtctcgtatagggattgcatattttcgtcttgcttttcagagtctaaacttgctgttccattcacagctgaagcataaacaactgggaagtctaattgctcatcattcgcttccaattcaatgaataagtctaatacttcatctacaactccctcaggtctagcagctggtttatcaattttattcacaactacaaccggttttaagttttgttctaaagcttttttaagaacaaaacgagtttgaggcattgtaccttcatatgcgtcaaccactagtacgacaccgtcaaccattttcatgatacgttcaacttcaccaccaaaatcggcgtggccaggtgtgtctaatatattgatacgcgttcctttataatctatcgctgtattcttagcaagaatcgtaataccacgttctctttctaaatcattagagtccattgcacgctcgtcgacatgttcgttttcacgaaatatacctgattgtttaagcaactggtctactaatgttgttttaccatggtcgacatgcgcaataatcgctatatcctgaaagtgaaaaaaatgggaaacctatcgacttattttttatatggtttgcagccaatctaggtattctcgggatagtttatggcgctgtcatagtaagttacggattgagctttttacaatcaattttgattgctataataggaccgttatcctttgttctagttggttatataagtgtagctggtagagatagtggagctataacttttatgctctcaagagcaccatttggatttaaaggcaatcatatacctgctttaattggctgggtaggtcaagttggttggttatctgttaatgtttctacaggaactttaactcttctggctttattcaatacttttggttttaagactagtacatttctaattttgatgagtttagcgatttttgctgggctagttattatatctgttcttttttcacaaaaagtacttgtatcagtacaaacatttttcacatatgtatttggtgcattaaccttattagttataacaattttaattactaatactgattggaacgcccttttttctatgaaatctgggtcttggcttaaaggttttctacctgcattagcctttgtaatagtagggactggattgagttggactaacgcagctgcagattatagccgttttcaaaaaaaatcgaacagttctttatcaataatcactagtgttacagctggcgcgtttatccctttatttctcattataagtactggaattttattagctacttcagagccacaattagcaaatgcagaaaatccaatattattaattagcgaagtactaccaaattggatgacagtaatttacttaatatctgctttaggtggccttactcctatgtgttttttaggtttaaagtcctcaagattaattatgagtacttttgatttgaaagtaaaaaattctacagttattattattcattcaattattattattgccattcctatttatgtcttagtagtttccagaaattttctcgctttttttgaaatgtttttaggagttttgggtattggattagctgcttggtctgcaattttcattgttgattatgcaacattgagaaaaaatataggctatgaaaaaaaattggtttgcgatccccagtataatagtctgaatattaaaacagtaatggtctggagtatagcagtaatagtaggtgcattaataaacatttttattcttcaagttttgatataattgtaacatttatggttagcggatttttatactatatatttaatatttctttaaatactcacagaaagaaggctaaaaaatgaaaaattcatcaagagaatatcaccagattaatagccaaaaaaaggttttggtgatcggcagtgctgttattgatgtgattttaaatgttaatagtataccaagtagtggatcagacgaatttgcccactctgagaagacaatagtaggtggttgcgcatataatgtaggcgatatacttagtcagttcaaagctaattatgatttgatggtgcccgttggcgatggtcttaatggaacaattattgaaaataagttaaaaaaagaaggcaaaacttcattattaaataatatattaggtgataatggttggacgttatgtactgagagatcccctcataatttccccaaagcgtaaccatgtgtgaataaattttgagctagtagggttgcagccacgagtaagtcttcccttgttattgtgtagccagaatgccgcaaaacttccatgcctaagcgaactgttgagagtacgtttcgatttctgactgtgttagcctggaagtgcttgtcccaaccttgtttctgagcatgaacgcccgcaagccaacatgttagttgaagcatcagggcgattagcagcatgatatcaaaacgctctgagctgctcgttcggctatggcgtaggcctagtccgtaggcaggacttttcaagtctcggaaggtttcttcaatctgcattcgcttcgaatagatattaacaagttgtttgggtgttcgaatttcaacaggtaagttagttgctagaacccatggctcctttgccgacgctgagtagattttaggtgacgggtggtgacaatgagtccgtgtcgagcgctgattttttcggcctttagagcgagatttatacaatagaatttggcatgagattggattgcttttagtcagcctcttatagcctaaagtctttgagtgactagatgacatatcatgtaagttgctgataggtttccagttttccgctcctaggtctgcatattgtacttttcctcttactcgacttaaccagtaccaacccagcttctcaacggatttataccatggcactttaaagccagcatcactgacaatgagcggtgtggtgttactcggtagaatgctcgcaaggtcggctagaaattggtcatgagctttctttgaacattgctctgaaagcgggaacgctttctcataaagagtaacagaacgaccgtgtagtgcgactgaagctcgcaataccataagtcgtttttgctcacgaatatcagaccagtcaacaagtacaatgggcatcgtattgcccgaacagataaagctagcatgccaacggtatacagcgagtcgctctttgtggaggtgacgattacctaacaatcggtcgattcgtttgatgttatgttttgttctcgctttggttggcaggttacggccaagttcggtaagagtgagagttttacagtcaagtaatgcgtggcaagccaacgttaagctgttgagtcgttttaagtgtaattcggggcagaattggtaaagagagtcgtgtaaaatatcgagttcgcacatcttgttgtctgattattgatttttcgcgaaaccatttgatcatatgacaagatgtgtatccaccttaacttaatgatttttaccaaaatcattaggggattcatcagcgttatgtatcgttgaaaataatggggaacgcacttttttaacgatacctggagttgaaatgacttggaaaaagaattggtttaaagaaattgatcttaataagtatgattatatttatgtgtcaggttattcttttgaacctccttcagacgaagttttattagaagaatttagtcgtttaaacgagaaaactacaattat

SEQ ID NO: 3570 - DNA, 3611 bp, Artificial Sequence
  Description of Artificial Sequence: synthetic nucleic acid sequence
gggcaaatgaatcgtgtaggttccgctaaaattgcaatcgaaagagcaatagaaattaacgataatgttgcgcttgtttcagatggtttcttcccaatgggagatacagttgaatatgctgccgaacatggtattaaggcaattattcaaccaggtggttcaattaaagatcaagattccattgatatggctaataaatatggcattacaatggttatgacaggtatgcgtcattttaaacattaatttttgaaaagaaaggggtaatctattgaaagttttaatagttggagctggtggacgtgaacatgcattagcttctaaaatcaatcaatctccaattgtagataaggtttacgcgattccaggaaatgatgcaatggtcaatattgctgaagtgcacagtgaaattgctgaatcagatcatcaagctattttacattttgctcagcataacgcaattgattgggtaatcattgggcctgaacaacctttaatagatgggttagctgatttattaagaaatgcaaatattaaagtgtttggtccaggacaagatgccgctcaaatcatagatttcttcatagctaatcttagtatgtttttaataatttaattgtcagtgtctaagttgaaaatgaacctgacaaatagtatttataaatagagttagaattgaattcaatgatatgatgactcactttcctatgttaattcatgattctctttatattcgttatattttcttagtagtgtttcaaagaaaatgtgatagctaataaaactggaataatcagtaccatcgtttaaatagaaggtattgcttgaaacatagacattgtaatcagcttgttgtgccaatgtattgtctttcattgttgttacggaaataaaatatttttgtctcagttgaagcaattgtgtgacttctttaagttgatgtgtttcgccagaaagtgaaatgatgaaaaacaaatcttctggaattgtcttgtttaacaccatctttagttcatgaacatcatgtaacaatataatatttttatgcatagtcaacagtatacgttgtgcttcttcagcgacattcatctgtgcacgtccagtaccatataagtatattgttgtagcatgatgcattttgtgagttaataaacgataatcaatacgttctaaatagttgaatgtattttcaatttcttgtttaaattgctccatagaatcagaaggaagttgatgattcttactatcttcaaattttaaaaaggatttaaagtcactataaccatcaaaacctagtttacgagtgaagcgatgaatcgtagcatttgaagcatgtgtctgtgaggctaaatcttgtattttcatatttttgcaaacatctatatgtgtattaacataatgtgcaatttgtatatcattatcatttaattgatcgaaattagagtttacacgttcatctaaaatcatcttaacacctcatcactgaaaatattttctttatatgaaaatataatctaattatacaaaaatgtttcaaagtgcgtcaacgtcattgtcattatgtaagcgtttactatatattggtaataacttattaaataaagagcaataaagataaacatatattagttatcataattaagggaagtgggaggtattcaaaaatgaatgcaattaaacgatttggtagtgcaatgatagtacctgttttaatgtttgcttttttcggtattgttttgggattcgctacattatttaaaaatccaaccattatgggaggattagctgatcagcaaacattttggtttaaattttggtctgttattgaatcaggtggttgggtaatatttacacatatggaaattgtctttgtagttggcttaccattatctcttgctaaaaaagcaccaggacatgcagctttagcagctctaatgggatatttaatgtttaatacttttatcaatgcaattttaactcaatggccacatacttttggcgctaatttaaaaaaaggtgtagaaaacacaacaggattaaaatcgattgcaggtattgaaacgttagataccaatattttaggtgcaatcattatctcaggaataataacgtggatacataatagatattacagtaagcgtttacctgaaatgttaggtgtatttcaaggattaacattcgttgtaacaatctctttctttgtcatgctaccagtggcagcaatcacttgtgttgtttggccaacgattcaacacggtattgcttcaattcaatattttattgttgcatcaggttatataggtgtttggttatatcatttcttagagcgtgtactaatacctacaggattgcatcattttatctatgcaccaatcgaagtaggtccagtagttgttaatcatggtttgaaagcagaatggcttcaacacttaaaccagtttgccgaaagtaataaaccacttaaagaacaattcccatatggatttatgttgcaaggaaatggaaaggtttttggttgtctaggtatagcattggcaatgtatgcaactacaccaaaagaaaatcgtaaaaaagttgctgcattattaataccagcaacacttacggcagtagtagctggtattacagaaccacttgaatttacattcttatttattgcgccatttttattcgtattacatgcactactagcagcaactatggatacactgatgtatggatttggtgttgtaggtaatatgggtggcggtgtactagattttattgcaactaactggataccattaggaaaagcacattggatgacatatgtctttcaagtagtaattggtttaatctttgttgcaatttactacttcttatttaaatatttaattttaaaatttgatattccattaccaggacgtaagaaaggtgaagaagaagttaaattattttccaaacaagattataaagataaaaaaggagattcaactcgcaatcattcacctaatagtgaatatgaagaaaaggcgatgtactacctagaaggtcttggaggaaaagaaaatattaaagacgttacaaattgtacgacacgtctacgtttaactgttaaagacgaaagtaaagttcaagaaagtgcctattttacacataatcaaatgtctcatggtttagtaaaaagtggcaaaagtgttcaagtcgtcgttggaatgtctgtacctcaggtaagagaagcatttgaaaatattgtaaatgatgatctatcttagatataaagtaactcccaaaataattcaaatagagattattttgggagtttttgtatttatatgtgtaaataagttattcttgctcatatattctatctttctattcatgaaatgcgtgctttatgtagcatttttgctctataacttgctgataggatatcaatattacgcgttgcaatagtttgaagcagctttgtgaaaatctcaggaggacatgtgacgctcgcgcaattattatttaatgtataattcacattatgatgattcgcaaacatattcataatatcgatgactttatctttaatgaaggcatcttgtaaaccatcgatcgctaaatcaaagcgtttaatagattgg

SEQ ID NO: 3571 - DNA, 3736 bp, Artificial Sequence
  Description of Artificial Sequence: synthetic nucleic acid sequence
aatgataggttaatcaagcatattaaaatatgatataatctaaatggttaaatacgataaaggtggtgtggagtatggtaaaggaatccatacctaaagaaggagaaaacattaagattcaaagttataaacatgatggtaatattcatcgtgtctggtcagaaaccacaattttaaagggaacggaacatgtgattattggtggtaatgatcacactttagtaactgaaagtgatgagcgtacatggattactcgagaaccagcaattgtgtactttcattctgaatattggtttaatgttatttgtatgtttagagaagatggtatttattattattgtaatttatcttcgccttttgcatgtgacgaagaagcgttaaaatatattgattatgatttagatatcaaagtttatccgaacggaaaatatcatttacttgatgaagatgagtacgagcaacatatgaaccaaatgaattatccacacgatatcgatattattttaagaagaaatgttgatattttacaacaatggatagaacaaaaaaaggggccttttgctcctgactttataaaggtatggaaagaacgttataaaaaaattagagattattaagcaaaatagatgtaaataagaataaaatattttatattgtaaaagtaatctataaaaattcataaatgaagtgtaacaacaacggtaatttgttagttcatctttctaacttaatatctaatagagtgtcttcgtgtattagaggttgagacattaacatttgtatcttttatttttaaagtgtatacaaatgcaatgtgccaacctctcttcattttcaaattattaggagggaaggcgcatgataaaacgatatttaaagtttgtaaaaccttatagatatcgtattattgcaacaattatagtagggattattaaattcggtattcccatgctcatacctttattgattaaatatgctatagatggcgtgattaataatcattcgcttacaaatcaagaaaaatttagtcaccttggtgtagcaataggaattgcattatttattttcttaattgttcgcccgccgattgagtttattagacaatatttagctcaatggacaagtaataaaatactatatgatattcgtaaacaattgtataatcacttgcaagcactaagtgttcgcttttatgcaaataatcaagtcggtcaagtcatttcaagagtgattaatgatgtcgaacaaacaaaagactttattcttactggattgatgaatatctggcttgactgtataacgattattatcgcactttctattatgttcttccttgatgtaaaattgacgtttgctgcaatttttatttttccattttatattttaactgtttattttttctttggaagattacgaaaacttacacgtgtgcgctcacaagctctagcagaagtacaaggtttcttacatgagcgggttcaaggaatgtctgttattaaaagttttgctattgaagacaatgaagctaaaaattttgataaccataacaagaattttttacaacgagccttccaacatacaagatggaacgcatattcttttgctgctattaatactgttacagatttaggcccaataattgtgattggcgtgggttcatatttggcaattacaggatcgattactgtcggaactctagcagcatttgtcggttatctagaacaattatttggaccacttagaagactagtatcttcatttactacacttacacaaagttttgcatctatggacagagtatttcagttaatggatgaggattacgacatcaaaaatggcattggagcacagccaattaaaatcagtaagggtcaaattgatttaaaacatgtgagtttcaaatataatgaaaatgaaaaagaagtattacacgatattaatttaacaattaacaaaggcgaaactgtagcatttgtaggtatgagtggtggtggaaaatctactttgattaatcttataccaagattttatgatgttactcaaggtgaaatacttatcgatcatcataatgttaaagatttcctaactggtagtttaaggaatcaaataggcttagtacaacaagataatattcttttttctgatacggttaaggagaatattttgttgggtaggcctgatgcgactgatgatgaagtcgtagaagctgcaaaaatggcgaatgcccatgattttatttcaaatttaccgaatggatatgatactgaagtaggagaacgaggagttaaattatctggtggacaaaaacaaaggttgtcaattgcacgtatctttttaaataatcctcctgttttaatattagatgaagcaacaagtgcattggatttagagagtgaagctattattcaagaagcacttgatgttttaagtaaggatagaacaacattaattgttgcacatcgtctatctaccattactcatgcagatagaatagttgtaatggaaaatggacgaattgttgagactggcacacaccaacaattaattaataaacgtggtgcttatgagcatctttatagtattcaaaatttataaagcacttataacattgaaaatgcctgagactgttattgtctcaggcatttttgtactgttggcagttattaaaaataagaactattttacctataatcaaaactgctaactaggagaatttcactgattaatccaataaaattctgatttaccgttttattataagtcaaagtcctcatttgaaatgtctatatcagtatcagaacggtgataggtaaagaaacttaaacggattctatctaagtgttcaagttgatatctgtattcttcaatttcagcaataatttgcatcatattgctataagaatattgcgtctgatgtgggtttttaattaattcttgctgaaaagcatccatcaagtttttcttctgaggattgtcaacttcataatctaattgagtgacatcatatctagctttttttgatagactcttaaatatttgttcatgtaaagtaactaatgaatcaagttctaatttgatttgtaaaagtaattgattatttagttgatataaatcattttgatatcgtgacattcgttttagcacttcatatgcttgtctggtcgttctaactacttctctaaatagtattttttttctattctgttgataaatatgtttttttgttaatggtctttcttcattgtaatagtcgaaaatcttttctaatttattgatgcgtgagtttagttgatcaccatcctgtttaatattatgaaattctgatgtgtcattgagtacaagtttaaaccaaacaaatatatcagaagaaatattcatagaattataataaatttttgtttcaaacttaggaggtaaaaaaattagattgacaacagaagaactcaatacaccaatcatcactagtacaaatctaaaaaatgcgacaacatagaaagaaccagtgtgttgccccataattataagtgcagttacgcttgcaagtgttgctacatgggcaagattaaattggaacaaaattgcaatgagtaaaataacggtaacgcccatgataatgaaattattattgaatatcgttaccattgttactgcaagtaatgcaccaatcacattaccaatagcttgttcagaaacagttttgattgagcgataaacactcggttgcatggcaactact

SEQ ID NO: 3572 - DNA, 4114 bp, Artificial Sequence
  Description of Artificial Sequence: synthetic nucleic acid sequence
agcctagaaagaatatacttgctgggatcgttgtagcactagcattaataccagaagcaattgcgttttcaattattgctggtgtggatccgatggtgggattgtatgcagcatttatcattgctactgttactgccatagtgggtggtagacctgcaatgatttctggcgccaccggggctgtggcgcttttagtcacacctttagttaaagaacatggtgttgaatatctttttgctgctacgatattgatggggttaatacaattacttttaggaatacttaaagtcggtcgtttaatgaaatttattccccgtccagttatgattggatttgttaatgcattgggtattatgatttttatgtctcaaatagagcatatttttaatatatctatagcaacttatatatacgttattataactttactaattgtatatgttattcctagattttataaagctatacctgccccattaatagctataattgttttaacagcattgtatatgtatacaggatctgacgtaagaactgtaggtgatttaggtaatattaagcaaactttgcctcatttcttaatccctaacattccttttaatttagaaacacttcaaattattttcccatattcattatcaatggctattgtgggtctagtagaaagcctacttacagctaaaattgtagatgatgcaactgatacacacagtagtaaaaacaaagaatcaagaggtcaagggattgctaatattattactggtttctttggcggtatgggaggttgtgccatgattggacaatcagtaatcaatgttaagtcaggtgcaaatagtagattgtctacatttacagcaggtattgtacttatgtttatgattattgttctcggtggtgtagtcgttcaaatcccgatgccaattcttgcagggataatggttatggtttctatcgggactgttgattggaattcatttaagtatataaaaaaagcacctaaaacagatgcattcgttatggttttaacggttattattgtattaataacacataacttagctatcggtgtagttgtaggtgttgttttcagtgctatattctttgcgactaaaatttctaaagttgaagttatttataaagagttaggtaagcagcatcgtttttcttttaaaggtcagatattctttgtatcaattgattctatgatggagaaaattgattttaatattgaagatagtgtcatagtgttgaattttgatcacgctcacctatgggatgattcagcagtaaatgccattgatacgattgttaggaaatttgaagagaaaaacaatattgtgtatgttgaaaaattaaacgcagatagccgaaaaattatttcagaactaagttatttaaatgaaactcatttaaattaaggagtgttttttatgtataattcaattttgcttgcagcagatggttcaaaaaatagtatacgtgcagcccaagagttactaaattttataggtgattatacaattgtcacaatacttacggttgtagatattgaagaatcaaaaacagatgttttacatgatcaccaaggaactaatctaactcaaaaaagggaaagtaaattacaatctattaaagatttatttacagaacacaatgtgaattacaaaattaaaattgttcacggtactccaacagataaagtggttgaagtttcaaatagtggtgaatatcaagctatcattttaggtacacgtggcttaaacagttttcaaaaaatggttcttggtagtgtaagtcataaagttgctaaacgttctcaaatacctgtaattattgttaaataattaaaactcttctatattttatagaagaagtttaataattttataaaccaaaactgacatatatatctatatacaaaaaagagagtccgagaaataaagtttctggactctttatatttattatataaataatcctaattcattcagtaaagtaataaatgtgataattacaaaatcttatatgtgtgattagagtgtaccctaaatttaatatatcaatgagtaaatgcaaatattaaaagtctaaatttatttaaatcatctaagcttaaatattcattctctttttccatgtctttcgttaaaaagtaaaatttacgtattgtttcatcggctaatatcctattttcatctcttgtctctattattgctccgtgataatttgttccatatttttccatacatttactttcataaccttcaaaaagcttttcagctataaaaaacttattatgtttttctacttgattaattaaaaatattttactagtaattaaattcgaaaaatacatgggatcatgagtatctaattctcctcccccagatcctctttgtccttcatagataatagatttaccttcactgtcaactttatctttaagtaacatttgcatcaattcaacagtttcttttttctcccgctctattccggatagaacgaccattccaacttatatgtaatttagttaaatcattaaggatattttttatctgtttgtaaaatataattataataaccattatcaataatggaaaactaaattctgaatacaaatacttaaatatttctatactatagcttatgatactaatcatagatactcccccctttttaaatataagtgttttgcattcttttgctaaccagtgttataatttagataacgaaaataagtattcacttatacaccaatccccccactattgcgagtaatggggggatttttgttggtgtggctatatgtcacctactttttattgcatttacttagccaatgagtaaaaaacgcaatggcacagccactgatgactggcgctatgatgtgaacgaaaataagcatcactttatacacctcctctctgcgtctaaattgacgcctgagagataggcgacctatatattatatcatctctgaatatacgataatagataacttttgatgagtaatcttatatttaaatagctattaaaacgccaaaaacaggtagaaacacgaaaattattcttcattttcctccataagttctcgttctataacttgataagaaaccaacacaactcttattaacttttgataagattttatagtattaaagttccattctttacgagtattcatagcttctaaataatacccagttataatatcaaatgctttcttctctaagctctcttctctatttgaaacatgataaggagcaccacctttagtaacccacttatcttttttataattagataaataggcagtatataaagagataatggtctctttgaaaccgaaaaatttatactcttcttttaaagaatcttcactagccactatagaaaatagatgagcgttaaaaactgaggggttataactttctgatttaggtggagcaccaccaccaccagaattatcaataggcaaaccatctttatattctactccaaataattctccgattttagcgctcatctcatcagcatcaaattctatacttttatcattttctttttcaaactgtcttaaatactcttcctgatctttttcaatacctttacgtgttacttttatcgatccactagggaatttgaattcacccactgtaaaatcagtcaaaattttttttatttgttctttaaataaaaaaatgatgataagaaataaaactggaaaagaaaaattctgatacaaaaatttaacgaaactaaaaattgattttaatatctcataaatacactccaaaacttacctccaaaattttaattgacttttagattattacactaagaaatcattaatagtaaaaacatatatttattctaattactttattgacgttgatcctctgaacccttaacaaatccaaaacttgtcgaatggttggtttaataacttacgctatgccgacattcgtttcaatctgtttgataagttaaaatttcatatatagtcgtgaatttcaatgttctctttaaaacaaggatcgtgaaaatatgcctaaaaatcaaaactaaatgattcattagtctttaattattttctgttacttataggtgtgat

SEQ ID NO: 3573 - DNA, 4041 bp, Artificial Sequence
  Description of Artificial Sequence: synthetic nucleic acid sequence
atttcattttctgtatatacgatgccattcgttaaaacatattctgacatgattgaacccttcttttctttgaattattagtagttgactgaactattttattatatctttcttcgtaatgaatatcactttttcaatattttactggttaacagatgaattttactaattcactctatattcttaatttaataactgtatttttaatttaagatattattttcatacaaaataactatttaatgtaaatttattaaaacttcttagtctttattacaacgataacattcaatctaaccaatgcaacataagtttcgattcaaaaaaaacggcaattcccatttattttcaaaatggaaatcaccgtttaattcaattaattttctatatatttaaagcattgttattactaattttaaaattactattcatccatagcttgagatgcttgaatttcattttctgttacttttggtttcaagaaaccataaattaaagctgaaactaacgtacccacaactaaagcaataagagtttgaagtatatggttaaaatcagtaccaataatgacgaaaattccaccatgaggtgctttgatacttgatcctaaacctaaagcaattgctccagccacacctgagccaaccatcattgaaggaatcacacgtaatggatcggcagctgcgaatgggatggcaccttcagtaataaatgataatcccatgacatagtttggtacaattgagcctctttgctctttagtgaattttcttctaaagattaacattgctgtagcgatagctaatggaggaatcataccaccaatcatcgctgcagtaataggagctgcatttccttccgttaatgcagcagtagcaaatacataagctgctttattaaatggaccgcccatgtcaattgccatcatagctccaatcacaagaccaagtaacataatattagagcctgacagactatttaaaccatttagtagcaaatgatttaaccaagctgctggcggattaaagacatacaccattaacaatccagtaattgaaactgaaagtaatggatagattaaagtaggtttcaagccttcaattgcttgtggcaatttacgtgtaatatatttaattccttgagttaaataacctgctaagaaaccagcaataattccaccaataaagccagaacctccagaaatagctaacataccaccaactaaaccagctgcaaaacctggtttatctgcaatactacgtgcaatgaaaccagctaaaattggaataattaaagcaaaggcactatttttaccaatattccataattgttcggcaaatgcattatattctgaactatcaggcttaaatgagtttgcgccgaataaaaatacaattgccattaagataccacccgaaataacaagtggtaacatattagaaacaccattcattaagtgtttatagaatgcttttcctggacttaacttttcttcattatcgtcatgttttttagatccaccttgcgctacaaatggtttacgatttgtatctaaagctgtattaattagttcctcgggacgcttaataccatcagcaacaggaacctcaaccacatttttcccatcaaaacgatcagtttctacatggacatctgctgcaacaattattccagttgcacgttctatatcttgttcagttaaatggtttttaataccactagaaccatttgtttcaactttaattttgatgttcatcttctcagcttgctttttcaaagcatcacgtgccatatatgtgtgggcaatcccagttgggcatgctgtaacagctaaaacatatggctcattattatcttgatttgagttgtcagttgaaacagttgcattttcgttcgcttctgcttcttcttcttttgttgcctcatcatccgcttcatcgataatgtttaacacttcttcaggagattcagcatgaattaatttttcacgtattttctcatccattaatattccagaaagtttcgcaagcgcatctaaatgcgtttgtgctccaccttcaggcgctgcaatcataaagaataagtgtgcaggttgcatgtctaaactttgataatccacaccttctttagatttaccgaatgcaattgcaggtgttttaactgctgcaactttagcatgtggtatagcaataccttcaccaattcctgttgtgctctgagattcacgattatgaattgcctctttaaacgatacagggtcacttaacttacctgctttatccaattgattaacaagctcagtaatcaccccacttttatcagaagcatctaaatccatcgctattgtttctttagttaacagttcagtaattctcatctttttcactccccatcaagtacagaaattgtcacttgagatttaatattttctatagcatctcttgtcgctaaatcttctgaaaaagcagtcgctgttcctgaagctacggcctgttgaaaagcttcatctatattaagacccatggacaaccctgctaccatacctgccactgtactatcaccagatcctactgtattaactacatgtccttgtggattcacagctttaatgctttgatgttgatcaacatatattgcaccatcgccaccaagtgaaatgatgactgattgtgccccttttttcaaaatttctttaccatattttataacatcttcatcactcttgactgtagtgttaaacattacttctaattcatctttgtttggtttaataaataatggtcgatatggtaatactgtttcaacaagatctttttctgcatcaacaactagttgcgcaccagttttttcagtgatttgtgctatttgtgcataagcatcacttggaatactgttcggtacacttccagctacaataacaatatcgtcgtttgtagtacgacgtatttgagataaaagttgttcaaattgcgcgtgtgtcactttaggtccgggtgcattgatttctgtttcttgacctgattttagttttacattaatacgcgtatcctcatctacttgaacaaaatctgattggatattactgtcctcaagtgtttgagcaataaaatctccagggaaacctcctgaaaatcctaaggctgtagaatcaacatctaaagttttaagtactcttgatacattgattcccttacctcctgcaaatttatacgttgcttttgcccggtttaatcctgatatttcaaatccatcagtaaaaatgatgtaatcgattgaaggattgaaggtaactgtatatatcatgatttccctcctataaaattaaattcattcatgtaagcttcagtcatcttgctttgcattgctttttgcgaagttatgatgctaagtccatctaaaattggaactcttgcaaaataaatttgattaaactttgattgatcgacaagcacatatttgtgatttgatagtttcatagctgtttctttaatcaaagcttcttgttcatcaggggttgttaatccatatttcacatcaataccgttcattcctataaaagcacgatcaaaacaataacgtcttaatgtttctaacgcgttagcaccaactgtagccattgtcgtaggtttaacttggccaccaaccattaaagttttaataccgtgctttaatagttcttcaacatgtgtcattccgtttgttacaacagtaatatcttttgcctcaatatattgaattaactcaaaagttgaggaacccgcatctagaaatatacattcatgatcttggatatcacatgcagcacgtttagcgatttcttgtttttcacgtaaattctgagttcttttttcagataacttaggttccttaactcgattttgatgaattgtagcaccaccatgtactcgttgtaatttacccatattctgcaacttagataaatctcttcgtatagttgatgcactacatcctgttctatcaactaaatcttgaagtgttaaaaagtccttttgagttaattcttgtaaaattaaattctgt

SEQ ID NO: 3574 - DNA, 3334 bp, Artificial Sequence
  Description of Artificial Sequence: synthetic nucleic acid sequence
aatgtatgatactgatcccaacttgcacaagctggtgataatagaacaacatcatttggctcgactatatcttgaattttatcaacagcatcctctacatctgttgctttaatcacatacttaccttgactatttcccaatttagcaaatttatcttgtgtttctccaaaaacaaccatcacacgtacattttccatataaggaataagttcatcgaattcattaccacgatctaatccaccacacaaccaaataattggttgatcaaaagagttaagcgcaaattgagtagctaaagtattagttgcttttgaatcattataatatttatttgtgcgatttgtaccaatatactgaagtctatgatcaataccggaaaaagtaacaagactatctacaatagctttgactggcactccagcaatgattgatgctagaacagctgctaaaatattttccaggttatgttctcctggtagcactaagtctttagtgttaataatgcgaatgccgttaaaaacaatgaaaccatctttaatgtatatcccatcaacttcttgctgtgttgaaaaataaaatgttttcgcttctagattttctgattcaattaggtgtctttgatgataattacaaatgagataatcatctttagtttgatttttatatatttgctttttagcattttgatagttctctaacgtttcatggtaatccaaatgtgcagaataaatattagtaatgatagcgatatgtggtttatattcttcaatgcctaataattgaaaagatgataattctgttattaaatactcatctgatttaacttcttgtgcaacttttgaggctacataaccaatattcccagaaagtcgtccagtcaacacgcttttttggaaaatatcaccgattagtgaagtgacagtagttttaccgttagttccagtaactgctatgattggtgcctcagaaattaaatagctaagttcaacctctgttaagattttaagccctctatttgctgcttctttaataattgatacagtatatggaatacctgggtttttcacaatgataggatcatcatctaataaagaaaaaggatgactaccgctaattacctcaatgcccatagattctaaatctttagcatgtgcatcctgtgaaagatcctttccatcattgactttaacgttagcccctaatttaaggagaagtttcgccgcttcatatccactttttgctaagcctactactaaaacatttttattttctaattcagtgtaatttagcaatttaatgcactccaatccataaacctattaatcccgtaattaaacctaccgtccaaaatactgttactactttccattcaccccaaccacttaattcgaagtggtgatgtataggactcatcttgaaaatacgtttcttcgttaatttatatgaggctacttgtaacattacagataatgtctcaactacaaacacaaaaccaattaatattaatgataattcttgattcaacatgattgaaatcgttgcaaaaataccacctagagcaagacttcctgtgtctcccatgaaaactttcgctggatttaaattgtaaggtaagaaacctagtaaagcgaaaatcattataatacaaaatatgccaatagccggtgaatctaacatgtaactcattacagcatacattgcaaaacctattattgacaaaccagttgccaatccatctaaaccatcagttaagtttacagcatttgagaaaccaacttgccaaaagacgataaatatcacataagcaaatgacaacggaatatcaaaattcacaaatggaatatgcaaatctgtcgtaaaatgcacaaggtgaaatacatcacttagcacaaagaatataactgcaataattatttgtgctagaaacttttgtttactagttaatccttggttattctttttaactacaataatatagtcatcaataaatccaataagaccaaaaccgattgttacaaatagtaacaaaataattggatttgaatggtctacaaagataattgcaatgatagaggtaattataatactaattaaaaatgtaagcccacccatagtaggagtacctgtttttttcatatggctttgaggcccttcctcacggatactttgtccaaacttcatacgtttcaatgttggaataagtatagggactaaaataaatgttatcagtaatgcgatgattgcgtatataaagatcatataaatctccttttcttcactttctaattttagctctttttatttgtaaataacctttaatattttatcagtttttgttttattttaatatacgacattatctatttattaaataaggttgggaccatttgtgagctaatccctaaaatgttaatcccaacctgttgttgatatcaagttctcttaaattaattatttctctcagaacctgatgtttcatttgtgctgtcatcagaatcatttttcgagtcggcgtttgacttatcattcttagttgacgaagatgtatttgaatgatcctcatcagctttatctttctttgatttgttatccgaagagtcctcatcagttttctcttggtcatcatccgtatcttcagcagataatgacacttctatcttatctttatttttaatgatttgaccttttgagatactttgattcgtgacaaatccattacctttagtagaaactttaagtttcgttaaatcttcaaaagcaagtacatcttcctttgtccatccggtcatatccggcattgttaattccccgtctgtcattaacattactttactgtgtggtaggactttggtacctgacttaactgattgttgtttaatctgtttgccattaccaatcgtaataggtttaagagattgagcattgacgctatcctctgctttttgaacttcatctccttgcacgttaggcactttactatagtcagtttttgatgaagtatcactagattttccaacatttaaatatttcagcgtattctccataattggtttaaatgctttgctcacacccatttcatatgcttcttgatcatttttttgagcaagactcatacctgcatagacaatgactttaggatttttcttaggtgcatcccccatgaagcttacaaagtaaggattttcacctttaacataaccgcctccatttgaatcagctacttgtgctgttcctgtcttaccttcaatatcataaccttttacgcgataattcatagcatgactcttcttactatttactactttatcaagttcttcttcaactttattggctg

SEQ ID NO: 3575 - DNA, 3137 bp, Artificial Sequence
  Description of Artificial Sequence: synthetic nucleic acid sequence
agttcaagatattttaactaaattaggaagcacgcaagatgcctctgaattcaacgataaagatccttatgacgtgttaatcgttggtggcggacctgcaagtggtagtgctgcaatttatacagcacgtaaagggctacgtacaggtattgtcgctgatcgaattggtggtcaagttaatgatactgctggtatcgagaacttcatcactgttaaagaaacgacaggttcagagttctcatcaaatcttgcagaacatattgcacaatatgatattgatacaatgactggtattcgtgctacaaatatcgaaaaaacagattcagctattcgcgtaactttagaaaatgatgctgttttagaaagtaaaactgtcatcatttccacaggtgcaagttggcgtaaactaaacatcccaggcgaagaccgtctaatcaataaaggcgtggctttctgccctcactgtgacggacctttatttgaaaataaagatgttgctgtcatcggtggtggtaactctggtgtagaagcagctattgatttagccggcatcgttaaacacgtaacattatttgaatacgcttctgaattaaaagctgatagcgtattacaagaacgtttacgctcactacctaatgttgatattaaaacgagtgctaaaacaacagaagtaattggtgacgattacgttacaggtattagctatgaagatatgactaccggagagtcacaagtagttaatttagatggaatatttgtacagattggattagttcctaatacatcttggttgcaaaatgctgtcgaattaaatgaacgtggcgaggttatgattaatcgcgataacgcaacaaacgttcctggtatctttgcagctggtgacgttaccgatcaaaaaaataagcaaattattatttctatgggtgctggtgctaatgccgcacttaatgcattcgattatataattagaaattaatttttaaaacgttatttatcataaatattttaacttcacagagttcccatgttggagctctgttttttattataaaaaagcctattgaaacaggtatatcattcatataatccgccataatttagtcatatcttagtcatatctaacagtaaatgtagttctaaaatattcaaatatttttcgataaatgatactctaatagatgtataaatttaaaacactgtttaatgatagagacgtaaaaggagttactcaattctatgaaaaagagagtcattacatacttgatactagcgttgtctttaacacttgcagcatgctcaaatacgaacgataacaataatcaagagcatcacagcaacgctcatgcacctaaaaacgctaaaactttaaaggaaaaagatatcttttcttcaaacaaaaagggacaaaaaattagcgaaaaagagatgaagcaagctttagaaaaatatttacaagcgaatagcgatgtacttgataataagtatgtcatgcaacataaattagataaacaaagtgatagtaatcctaaaatcacagaatcacaagctgatcgtcttagcaagttatccaatttagcagttaagaacgatttacatttcaaaaaatttataaaaaacaatcacatccctgaagaatataaagatccaacagatcgcataattaattattttcacgctttaaatagtaccatttcaaatgtagatgaagacattgagaaattaaactaccaaccacaaaattcaattaacgttgttgatgtagccacaaaatattcaggtgatgtaaataaaaaacaacaagataaaattactactttccttaagaaaaaaggaatagacacagaagtatttaataaataaaacaaaatgttttttctatatcacattattttacttgcccaaaaaagatgttgtactaacatcttttttgggcttgtttttgatattcgagttaatttcatcaccccatctttttgaaacatgccttcgctattttgacaattcaatatatttattacacaataaaattaatatagcatatatattttttctaaataaaaagaaatgaggaaaatcattatgaagatacgtttaacatttattatcttagcaatactatccaccatcggcttagtacttgttttagcaaaatatccaacaggcccacacacaatcaactataacgaaccttatacagtactcatagccattacgacaatagttataatggctttaccagcactcatattaggtatatttaatcatcttgcatgtagaatcatatcggcgatattacaaataagtgcactgatgatgtgggggtttttagtaatcattagcttaattatgggacaaattgtcattatgcttatggcttccttaacgatacttgcattacttgttagttctattgtcacactttcagtgcacccatctacttcagataaaataaattaatcaaataaaggggcaagaaaggtagaatttacagtgaaattctctttgttggggcccatccccaacttgctttgcttgttgaatttctcagtgaaattctctttgttggggccccatccccaacttgctttgcttgttgaatttctcagtgaaattctctttgttggggcccatccccaacttgctttgcttgttgaatttctcagtgaaattctctttgttggggccccatccccaacttgctttgcttgttgaatttctcagtgaaattctctttgttggggccccatcctcttgtaaaaaatggtttgatatgtgtgtatatttttaattctatcatttgactgattgtatgttatgaaagcctgggacatcgataatctatgccccaggcttcactcacaatcctatattatatataacaatattgctacggttgtttatagacatcaatcatatcttttgatagagaattaatatcaatttagccagcaattacaattttacaactcaaatgattatatatgtattcaaaacttcatttcttctttaattaaatatggatagcaattatgaatttccgtcgttaaggcttcttccttagttatcattttaaaatagacgaaaaaacatctaattacaacttggtgcgcaactatcactacacgtctctgctgttt

SEQ ID NO: 3576 - DNA, 3043 bp, Artificial Sequence
  Description of Artificial Sequence: synthetic nucleic acid sequence
aaggtgcggctgacgaataactgaataacatgacataagttaatccttgcaataacattggaataacgaaggtgggttttgttaataacagaccaaaatctttaaatattgctttaaaatttaactgagattgttcttgatggggcccaactggcatctttaataaaatgcctaagatgactattaaggtaatgattgttaaaaatataaaaatcattctccaacttgcaatagataaagcgaggccacctaacagtggagcaatgatggtgattataccgtttatgaccataagagaagttaaaaattttgctaattcgtctccgtcatagttatctccaatagaagctttggctatgacgattgcaccacctcctgctaaaccttgaattaaacggataattaaaaatattgttaaatgaactgtaaaaactgataataatgaggctattaaatatccaatcaataaaatgagtgccatttttttacgacctaatacatctgatagtggcccgaatacaaattgaccaatagctaaacctatcatagcaaaggataatgtaagttgtatttctgaaattgatgaaccaaacgcatgctgaactttaggtaaagatggtccgtacatatcaatagtcaaaggaccaaatgcagtcataacgccaagtataacgattaatattttagataagtgtttggaacttgtagtcatcatcattattctcctagaaaagttatagcatctattatatacgttttacataaaaaagtaatcagcttacacaaataaaaaaagaagagtattatcaaataggcattgatagttttgtcaacgtaatgttgatcaatgaaaaaatggtaaatatgtatatacgtcattcaatcaccgactgtctttgataaaaaagaacccgagacaagcatttatgtctcagattcttaagggtttgtagatatttagtttgaagtctcatgcctttagtttcctgaatttgatccattcaagatattttctagtttagctttaatactatcaaattttgtattgatgtcttcaagcatgttgttaactttactttgattttcgttattaagttgagcgttatttgcatttttcagtttgtcgatttggttttgataaaattttgtgaatttagaatccgcattagtttcttcatttggtccaaatatgattaaaacacgatcctgtgtcttaaattgtttaattgtttgcttaaattgacttaattcaccgtgctttgcttgttcttcatatgctataagaacatagtcatattgacttatcataccataaatttcttttaaattcgacttaaattttatatttggtattgttaaacgataactttgttctgcagcttcctttataattttttgccatctcgataatttcttttctactttagaatcattgagcttgaccacagaacgttccatagctacagctataaactcatttgcccccatttcagttgctttttgtatcatccattcatatttgtctgctttgattaaaccactacatattgtaatgttctgaggtagttcagtgttaatttgttgcttttctactaatttaatttcaatcgattgatcgtttattgaaataattttacatttgaatacattttcatctgaaaaagtgacaataatattttgtccttctttatagcgcataacattcacgatatgatgatagtcttctttgttttcaataaaaaagcactgattttcatcagcgctttgattcataaaatatctttgcaaattatccactcactttctgaccaactatacaaacccagccattgtcatgttctactgaaataattttgaaaccaatacgcttcatttgtgattctatatcttgatacttttcttcaataatacctgatgtgataaaataaccatcttcaattaaagtattataagtatcttcaatcatttcttcaataatatgagcaagaatatttgcaataacgatattaaatttctcattttcattttttaataaattacctggaactgcttcaattgcatcatcacaatgatttttcttaaagttttcttttgccacatttacagccatttcatctatatctaatgcctttattctttgaactccaagtaaatgactagcaatacttaaaatgcctgaccctgttccaacgtcgataactgaatcagttggttttacaaaagtttcaattgcttttaaacacatacttgtcgttggatgatcacctgttccaaaagccatacctggatctaattcaatgcacaattcgttatcattttctttaacatatgattcccaacttggtactatcgtaaattgttttgaagctctaaatggatgaaaataattcttccattcattttcccaatctacttcggcaataagtttttcctggtaatcataaattgttttatcaatttgctgaagacttaatatttcataattgatgttggattttaagttttcattataagtgaactcattaaagtaagcttttaatcgaactcctttttcaggatagtcttcagggtttaagtcataaatttctccaaacttatcaataggttgttcttctaaaatatttgaatcttcaattacaactccattagagccataactttcaagaatttctgtaacatcgtattctacttcgtgattaactacaattgagagttccatccaattcattgactattctcctttaaagaatcttttcgctctatctttgaaattagatgactgttcatttatattttcaccattaatttcagcaaattcttttaataattctttttgacggtcatttaattttgttggtgtaaccacttttatgttgacaaataagtccccgtagccataaccatgaacattctttacacctttatctttaagtcggaattgtttacccgtttgtgtacctgccggaatggttaaaacaacattactttttaatgtaggtatcttaatttcatcacctagtgcagcctgtgaaaagctaatatc

SEQ ID NO: 3577 - DNA, 4241 bp, Artificial Sequence
  Description of Artificial Sequence: synthetic nucleic acid sequence
tatctacttttagaacagtataaaaattatccgtattttgaaataaaatagcatcaactgtacctttgatcattgaataatcaaaaagtgtagggtcagacatattattcctcctctttcattgttttgaatgtctttaatgcatgttgactaagtaaatgtttttcatcaattgatattgcttgttcaaaatatgcaattgcttcatctaaattttcatttttcatatatgttgctaaaccaagattatatataccatctacgtgctgtgaatcgatagaaagaaccttatttaattgtttaatagcttcatcaaacatttcgagttggcatagtactaacccatattgaaactgtacttctaaatctctatcatcgtccatttcagctgcagtcattaaaaatggtaaagcttctttaaaagcacctagttgattaaacgacataccaatcatataattacaatcttttttcgctacttcatattgtagtgcagtttgatatagctttatcgcttcgttataacgttcttcattataataaatatttgccaagttataataaacagcaccattttcaggttcaatagttaatgccttttggaaaaaacgttctgctttttcaatttctccaacatctgataatacaatacctgcgttaatataattttcaacaatggccggattttcttctatattttcaaacaagtctttcaaagcggtatctaatttaccatctttaatattttggtatatcttactttgttcgtgcatcttttctccctcatttctacacgattataacatgattattttaaatatgtattttcaggatatttaagttaatttttctttatttatatattttcatgaaaaaacaagtcataaaaaaaccgttaatacaagaatttctcatgaattaacggtataaacaatttatacaacgtaacttaattgaccttcgtttttagactttcaaatgcaaactttgatctgaataataaattgggtattgttcattctcaacaagaagatgttaaaaaactgattaagcgatatacagatttagtcatcgatcaattagaagatgatgactttgaaaaaggtaaaaaagaaaaagttaaaattgacggtgaaacaaaaaatttaaaacctatcactttaaatataagtcgtgataaagcaaaaaaaatcactgtcgcagcattaaaaaaagctaaaaatgataaagaattacaacgtttatcaagcattaatgaaaaagagtataaaaaagaaatcgaagagcaacttgaagatgctcaagataaacaaactaaagaatttccaaaaattaaatcaactatctaccaacaaaagcatcaaatactaaaacgtaacatcacaattactgatagcgacggtgaaaaaactactatcaaaggcacgaatgtgatagatgacaatatcgaagtcgattataaagtaactagtgatggaaacacacataacattaaaggatcttctaagaaagatggaaagcattataaagatgactataaatatagtggtgacgtagactatgaacgtctaaatgttcatttaaataataaagagagcgtaaaagattcaaaacgtaaagatactggaactattactatcgataatgctatcgatcattataaagtaaattatgaagacaatttagaaacagacgctaaaaataatcttcaaaaacaaacattaaatattggatttaaactagacgaagagcctattaatattgttatcaatgctaattcaaaacttaaagagcgcattgattttaataccgataatgcaacggactttaattcattatctaagaaagataaagataaattatcagatgaaattaaggataaacaaaaagacattgtcaaatcagtctttaaaaagctagatgattaattcatagaatgctaagcgattgaacgacaatgactttcaccacctataaaaggtaggtcatatactggttaatctcacggggtgggactcacattcaattaaaactttacgaatgatagtctcaccccttttatcttgaattcgctaggagtggtcacttgaaatctttcaaattgtttcatatataccactcatttttacttaaaaagtggtatctatttttatatttaatattgatattattgacgctcatcgtaactttaacaactatccagcacattaatcaaaatgattcaaaatttaatattggtatcgttgataaagatcattctaaagaaacaaaactaattttaaacactgtgggtaaaggcaacaatcttggcaaaaatgctgctctcaaaacttataatgagaatcaagcgcaacatctgcttaaacagaatcaattacaaggatactttgtcttcgaccgtggtatgaccgatactttttataaagatggtagccttcctataactatttatacatatgatgaacaatcaagtaacagtgtcgtggttaatcaattaacacgctcagtttatgaccgtttaatgttatcaatgggcggtgtgctaagctttaatcaattagctaaagatccttcaaatgaagacgtagcaatgacattgattgatatgttatttaccggtttaaatcgttcaggttcatttaattttgaacccatacatatttatgacaccagtagttattatgtagtcactggatttcttttgtctatctttatattgtgtttatcactttatacagtactaaaaatgaatcaagaaactgcactcaaagaacgcttgcaaatgtttcatttttcctttgaaaagctcacgatagttcgaggtatcattgcatggttttattcactcatatgggcatttattggctttatctggattactcatgctctaaatgccccatttgaaaaatacaattggccaacggtagctttacaactcacttattacgttacgttactcgtcctatgcttattacttatagacttaattactcgttcatggataaactttctactcaaattattacttagctttgttatcgttattttttctgggataattatccctactatcttctttaaacacatgcttaatgatgtaatcattacacaaccatttagtttggttactaatcaaatgttagaaataacactcaataactatattttagacacacatccagcattttatttaagttttattacactattgatactattcatcattgttttagtatggaggtatcgccgatgaaaccatacattcaactcgtcattaagaaacaatggttacaatatgtgtttcttattagcacgatactaatcgctttaggaactctatggttaggacaaaaattggctcagcaaaattttaaaatacctatcgccattcaagatatggaccatagttccgcttcgaaaaaattaattaaagatatagagcaaaatcagtatgtaacagtaaaacatttatctcatgatgatttttatattgatgatttggtaaaaaagaaagaagtcattgcaagccttgaaatacctaaggatttctcaaaacaccttaaagataatgatttaaataagactcttccattatatagcagagatgattttataggacatattgctatggaaataatcagtcgatcattatacgaacaacaaatccctaatattattcatgaacatcttgatgatatgaaacaaccacaatccttagataaagtgaaacaatcttattattcgcttacacctcaatctaaaataaaaagtgtagctatcaataaacatgctcatcaatccatttcaattggcattgtatttgttgtcgtcatctttgtaagtgttatccaaatcctattacatcaacgtcttaaacagaacgcacctctcgaaagattatatttggtaccttatagtcaacttaaactatacttgacttatatcagtgtacatgtggtcatactgatgctcatgctattgatgattagccttttaatgcatcaaccattaagcattcttttctacttaaaaacactgattatagttttattttatgaggcaggtattgctttattactttttaaaattaatgttcttagtcaccgtatattcatggctattatttatacggtagcgataggtattatatatttatggattcaattgtaaaggagtcatattcaatgatagatattcaaaatgtttccaaaagctataaaaagaagcatattttcgattcc

SEQ ID NO: 3578 - DNA, 3355 bp, Artificial Sequence
  Description of Artificial Sequence: synthetic nucleic acid sequence
ggttctatcactgtaaactatgacggcgctaacaaatttaaaacaatagtaggtaaagatgcttttataggatgtaatacgaaccttatagcacctgtaacagtaggtaatcatactcttattgcagctggatccacaattacagataatatccctgaagatagtttagcattagcgcgtgcaagacaagtaaataaagagggctacctaaaaaaatagttcttgccctgaattgctatcgtatatgcagttttaaatgaatttataaaattgtaataattttgattgtacatctatcatagtaaaaaagcgctattttctatataatataaatgtctaagtaaataattggaggactataaatgttaaataatgaatataagaattcatcaatgaagatcttttcgcttaaaggaaatgaacctttggcacaagaagtagcagatcatgtagggattgaattaggtaaatgttctgtaaaacgttttagtgatggagaaattcaaataaatattgaagaaagcattcgtggttgtgatgtttttattgttcaaccaacttcacaatgctaatttatggaaataacatcatttcggcattattacctttcacttattcaacacatgtcccatacgacttctgataagttagtcattaataatgcaacctctaactctatttattatattaatttgtaatatacatgatatactttatattttcaagtttatctatgctttttcaaacggatttcatcaataacattccaaataaattcatctttttcaactgattcttgtttttcagaaccatattttcttacatttacttcttgattctctacttcttggtcacctacaacaatctgataaggtatttttttcatttgagcttcacgaattttatatcccattttttcattacggtcatcaatttcaacgcggacaccttgcgattttagttcatcttgtaaaagtcttgcataatcataatgtaaatctatatttacaggaataatttcaacttgcataggcgccaaccaagttggaaatgcaccttttgtttcttctgttaaaaatgcaacaaaacgttccatagtagaaactacaccacggtgtataactacaggacgatgttgttctccatcttgaccaatgtacgttaagtcaaaacgttctggtaaaagaaaatcaagttgtgctgttgatagagtttcttcttttcccatagctgtttttacttgaacatctaacttaggtccatagaatgctgcctcaccaatagcttcttcataagttaaacctaattcatctgatgcttctttaagcatggattcagctttttcccacatttcatcatcatcaaagtacttatgcttatcttcaggatctctataactcaatctgaagcgataatcttcaaaaccaaaatctttgtacacatcttgaatcatattaactacacgtttaaattcttctttaatttgatcaggtctaacgaaaatatgggaatcattcaatgtcattcctcgaacacgttgtaaacctgatactgcaccacttgcttcgtaacgatgcatagtacccaattcagcaatacgtataggtaattcgcgataagaatgaggtttgtttttataaatcatcatatgatgtggacagttcattggtcttaagaccattgcttcgtcttcatctaacttcattgctgggaacatatcttcttgataatgatcccagtgaccagatgttttatataaatcaacattggctaatactggtgtgtaaacatgatcgtatcccatacttacttctttatcgacaatataacgttctatttccctacgtattgtagcaccatttggtaaccataatggtaaaccagcaccaacgagttgattgtttgtaaacaattctaaatctttaccaattttacgatgatcacgctcacgacgttcttccaacatttttagatgtgctttcaaatcttttttgtcaaagaatgctgtaccataaattcgttgtaacattttattatcactatttccacgccaataagcaccagctgtagataatagtttgaactctttaattttagaagtagaaggtacgtgtacacctcgacataaatcagtaaattcaccttgagtataaagtgttacactctcatcttcaggaattgcatcaataagttctaatttataagggtcatccttgaagaagtcttttgctttttctttactaactacttctcttacaattttatgattttcgttcacaatttgtttcattgttttctcaattttatcaaaatcatccgatgaaaccttatcatccatatcaaaatcataatagaatccgccttctattacaggtccaactccaaatttaacgtctccgtataaacgttttaatgcttgtgccattaaatgagctgttgaatgacgaagtacttctaacgcttcttcactcccaggagtaataatttcaatagctccatcttgttctaaagggcgtgttaaatctacaagttgaccattgaattttcccgcaactgctttttttcttaatcctggactaattgattgagcgatgtcttctgtagtagtccctttatcaaattcttttgtattaccatctggaaattgaatattaatttgattcatattttttcctcctatttaataaaacatctgatcgttggcttattgaataaattaactttactgagcataaaaaaactcgtccctagcaagggacgagtttgtcgtggtaccaccctagttaagtatatgaaaagcatacgtgaccagtcatatactatactttacataagataacggtcttgagccggatattcattacaaatatcaatattaacgaagtagtaataatttaatgtgttagccatattctcatcaattaatgactttctgtgtaacagagattaaattatcgtatcttcaatagtttcaacgattaagatttatctctattatacaccacatactataaaattcaattgtttctaaaatttttaccagtcaaataataaggtgtcgataaagtcttaattctttcaataattcgtgctgctttagtcttttcagtgccatctctagttattgaaagatgatgctcaagctcactataattaaagttagaactaaaaaatgtaggaagttcatgtaccattctataatgtaataaaggaccaatcacttcatctcttacccacggtgtgacttcttctgcgccaatatcatctaacatcaaaatattagcttctcgcacacgttgtaattttttctcaaaactaccgtctttaaagccaccttttaaagtgcgaataaatt

SEQ ID NO: 3579 - DNA, 4067 bp, Artificial Sequence
  Description of Artificial Sequence: synthetic nucleic acid sequence
ctaatagatggtgaacgttcaagttcatttgttaattcatcactaacttttttgattcttggaccaatttctttaatacgtctaggtacatgaacactccatgttttatctcgtaaatatcttttaatctcaccaataactgttggtactaagaaggcttcaaacttacgatcaaatgataaatcaaatctattaatagcacctattagaccaaccataccaacttgaactaaatcttcatgatgtgattgtcccttagagtacctataagctaaagattcaatcagcttacgataatgttttactaatttatcttgagcttggctatcttcgttttcttgatgttgtttaatccattggttaatttgttcaggtgatacttcactagctgatttcgactctttcgccattatttcgcacctgctctttttttatatacttaatcatactgattgttacaccagattctttataaacagtaacttcatccattaaagactcaattaaaaataatcctagaccaccttcacgtagaaaatcaatattttcattatcattatatggacctaaatgtgattttgtggcttcataatcaaaactttcaccttggtctgaaataacgattttaattctatcatcaaatatttcaaaacaaagattaatcatgcctatttcagaattttttttatatgcatgtttaaccgcatttgtcaccgcttcactcactgctattttagaatcctctatatcatcgtaagatgcgccagctcttgaaaatacccctgaaagcgtcaaacgtattaaacttacgtattctgcagaagctggcaaccgcatttcaatataatcttgtgtagattgcatgttattctacctccgttccttcattaacatgcattaaatcttttaaacctgtaatatcaaacaatctacctatccgctctgaaacacctaagatatagagatttttatcattttgatttaatgcttttagcgtgcctacgaataaaccgaggcctgttgaatccatatagctcacattagctaagttaacgtgaacatcatgtgtgccttcttgtctcattggtactagtacctcttctaattcaggtacagtatatacgtccaattctccaccaactttaacctcataaaaatcatcatgagttattgtttcaatatttagattcatttaatacactcctagtttttatcaaatgtgtttatcctacatatgtactcaaaatcacctataccctacatgaattaactttaatctatattttataaattagtttactctttttataattaaaatagtcatatcatcttttctcgcaggattttgtaattttaaaatcgcttcgtaaataatttgaactatatcctgtggatgcatatgcttatatttttgaattaagtctaacaacttatctttatcaataaaattaccctctacatctcgtgcctctgtaacaccatcagtaaaaattatgattaaatcatcaaggtaaatagggatttcctgttggctataacgtgttttgggactcacacctagaactcttcctcgcacaccaatttcctcaaacgcttcagtttctgcgcgatatatatagccaggttcatgcccagctgagctacagtaaagaagatgattcatctcttcatacagtccataaaacattgtgacaaacatattttggttaacgttcttttcaacaacacggttcaaacgcttcaaaccatcactaggtagttgtgaatgtccataagcatccatgccaaattttatcatactcatagctaaagctgctggaatacctgaacctataacgtctgccacagcaaaactcattgtgccatctttatgatcaataagattaaaataatcaccacttactttttgtgcagcaacagatatcactcctatttgaatgctatcaaattgtggaatatcaactttcagcatagtttgttgaagtcttgaggctaaatccatttctttatcgtggacttgaagcttattaacaagtctttggtaatctcggtaactatatccaaatcctttaacgacttcttgtaacacatcgagcgtttctaaaatatcttcttcagttaaatctaatgtattaatataatctttatgtatctcaactatatcttcaggtaaaacatctttctttataacttcatttgtgaatgcttcacatttcttaattaataatgttttattgttagttattaaactttctttaacaagggctttataactttttgtgaattcttccacgaaatgcgcctccttacttccacttcaatatcccatcatttttataacaatatgaaacctttatttactttctgcgaatagcataatttttggtgttaaaactttgttgatagctaaaaaagactttaggaatggataacctaaagccttaaaaactcaagacatccttttataataaatacattttcataataactatagtgatacgtcttaaatcaaatataaatagacatatcgacaactatataagtgtttaaatatcctaatattacttaaacacttaattattataaagttattgccttttatttcaatatttttttatgtttactgcatataattatttaagatttatgatgatcaaagttatttaatcccaaactaatatctaaggcattatcaacctctatcattttactctctgataaaaatgttaatttttcttttaaacgctttttatctagtgttctaatttgttcaagaagaataactgaatctttgtctaatttatactttttcttttcaatttctacgtgggttggtattttcgctttattaatcctaccagtaatcgcagctacaattacagttggactatatttattaccagtatcattttgaatgataactacaggtcttactcccccttgttcagacccttgaaaatacatacaatttgaggaggtaataatgatggcagttcaatatgaaactaaagcgactaacgtaggtggacgtaaaggtcatgtccatactgacgataatgcaataaatgtagatgtattaccaccacaacaagctgacggtaaagcgactaatccagaacaattatttgctgcaggttacgcttcatgctttaatggtgcatttgatttaattttaaaacaaaataaagtgcgcgatgctgaacctgaagtaacgttaacggtacgcttggaagacgatccagatgccgaaagcccaaaacttagcgttgatattcatgcaaaagttaaaaatgttttatcacaagaagatgctgaaaaatatttacaagatgcgcacgacttttgtccgtattcaaaagctacacgtggcaatatcgatgtaaacttaaatgttgaagtagtagaataacattttatcgattaattatattctccacccacaatttgtgttatcaaattgtgggtggttttttgaggctgggacaaaaaggttcaagataagtaaaaaagacaatttctattgaaaaaatatagaaattgtcttttttataatttttttgattattttcagctcgttgagctgttacttttcttatattaagccacaatgatgtctgaattcatcgaattcagtatcgggaattgtttctacaatatcatttacatgtcgtgaaatatcatttgtggggataagaactgaagtttccattggcagagtatgttgagtcaagttatattctttatacataaggcacctcgttaatttagtttattgatatttattacattatacgaaagggctttattttttaaaagtattttggcgagactcttgagggaacaggacaagctgaagactacaggctgaagctgtcccctaagaaagcgagccaacaatacgaagtattataaataaatagctagtaaatgaatttatgaaaactcatttactggctattatgctagggaattatgtaccagcctcgtttttttatttaatttaaatttcttatgttatcaatcttacttgtttaattggcctttataacatacttttcaataatttt

SEQ ID NO: 3580 - DNA, 2999 bp, Artificial Sequence
  Description of Artificial Sequence: synthetic nucleic acid sequence
atatactcaatggttaagtacacgcgataatttgaaagcatagtagttattagcctttatcacctataccccctcactgttacaagtagagggggttaatatatatgtgaatacttatttctgactatctatcaatcagttgaagaatgtaaaaaattttttcatgaattgaataaaaaatataaaaagcagtatatgtattaactaaaattatcacgatctttaattaatttataatatgaatttaaaatatggatatggaaatataaagtgtttcaacattatatgcgtaattaattattagaaaatattgatgtagattaaatttttatagaagagtatttataattatttgcaggaaaaataaaaaggttaatgtagttagcttactatcagcgcacgaatagtggttgatcaatagaaaaaattatagatgcaaagtaaaccatccgtttgtacgggtggttttgattttgtaaggtaaaaactcattattgcaggatatacaagagtattgtctatcgagcgaaatatagaaaggtaatttgaaaatttgagatgatatataactttaaacattgagtagactcaactcaaaaagtaagattagttattaaaaatgtttcgcatgctacttttttcatttaatgatacttgaattgttattaataaataagattattttatcaattttaattgtgattaatgcgataaaatagataaatataatcgaaaataatgtattagattattttaaatgctgtaatagaatcaataaaatgttttaaaaactaaaaagttaacaaaaatttaaccaaattagttaaaaaaattaataacttttatgttattttgaatttagcagttattttttcattctttataagggaaaaatcttatagaggtgatttctttgacaaataataatagaataaaaagatttagcattagaaaatacgcagtgggagtagtatcaattattacaggtgtaacaattttcatcggagggcaacaagctcaagcagctgaaacttcagtgcaacatgcggatgcacacccagaagactcgcaaacaacacaacaattaaaaaatgataaggtagaagaaacgttaaaagcttcaaaacaaggtactgcttatagtcaacaagtacaaacaattaatcaatctaaaacaaatcaaaacaaccaacattctgtagctgaaagtgaacaactgaaaagtgatgagacagctaatcagccaaaaaaagaagaaggtagttcagtaaaacaagacgtccaaccatctaaaaatgtaaatcaacaagacgcagctactcaatcaaatgagagaaaaaatattgacataaaaggtgaaggtcaaacttcaaagacaagcaatcaacatattcagagttctaacagtcataatcaatcaacagaaacaaaagacagcgactcagaagaaatcgatcaaccattagtgaaattacaaaagccgtctaatgattctacatatcaaacacaatcaaaagctaaacaagatagttctaaacagctccctcaagaaaaaacaacaaaacgtcaaatccaaacaactgaaaatgaacagacaactaaagttgattctaaaaaagctaatgacactcaaaatgttgaacaacatactcaagagcctaaaaatgatacatcaacatcacaaaaaaatcatcatcaagtagctacaaaagaacaatctaatagaagtacaacaagggagacgcaaaagcaatcagcaaatgctaatcaaaatcatcagtctacacatcaagcacagttcaaaaaccaatatccagtagtatttgtccatggtttcctaggctttgcaggtgataatcaatttagtttagctccaaaatattggggtggtacaaaatacaatattgacagaaatttaactaatgagggatacaatgtacatgaggcaaatattggtgcttttagtagtaactatgatcgcgcagtagaattgtattactatgtcaaaggaggacgtgttgattacggtgcagcgcatgcagctaaatatggtcatcatcgctatggtcgaacatacaagggcatcatgcgtgattgggaacctggcaaaaaaattcattttataggtcacagtatgggtggtcaaaccattcgtcaaatggaagaattcttaagaaatggtaaccaagaagaaatagaatatataactggaaatgtttctgctggaacctctataatatttaagttctttagaataagtaaaccaatactttggactgtaatagcaataagcaatgcataaaacattttgttactcttttgaacgtacatatctctaaatccaccagctaaacaaaatcttgttctctgcattacaaatcctagcaatatgccaacgactaatccgcttataattgtccacaccattttatcaccttttccgatataaatactaaggtattatagtagaaaggactatattttgcaaattcttaattttatttattatgttttaatataaatattttgtgagtttgattaagtcactcttagataagttactaaatttataccactcctggtcagaataataaataaacaatttatttcctaataaccctttcgatattctataccgcacaatgctagagagttcgaattgaatattgaatggattattgttttgactatatgccttaaactccaacttattttcatgtattaacaatataccgggaactgtcattattctgggaatatgtgatttgaaattacaatttatttcttgagtcatttgtttcaatctcccattacaataaatatcaacttacaatttttgttaaaaagtttcgtatttataatctattgtaactgtttaatataaaaaaagcactctcacttctcacttgagagtactatgttaatgtgatttttattaattatttactataatttttcatgaagaacaataatgattgtaactctataccaaaatcaat

SEQ ID NO: 3581 - DNA, 3073 bp, Artificial Sequence
  Description of Artificial Sequence: synthetic nucleic acid sequence
tcatgcatctgagtcaataaaacaaaaaagagaacaaaataagattaaaaaagaagaaaaagcccaattaaaagaggcaaaaattgaacgaaaaaaacaaaaaaaatcacgtcagaataataatgtcattaaagatgttagtgattttccagagatttctcagtcagacgatattccaatatatggtcataatgagcaagaagataaaagaccaaatactgctaaccaacgtcaaaaacgtgttttggataatgaacaatttcaacaatcattaccaagtaccaaaaatcaatcaataaataataatcagccatctacaaccgctgaaaacaatcaacaacaaagtcaggctgaaggctcaatatctgaagctggtgaagaagccaatattgagtatacggtgccacctttatccttattaaaacagcctactaaacaaaaaactacttcaaaagctgaagtccaacgtaaaggtcaggttttagaatctacactaaaaaactttggagttaatgctaaagtaacacaaattaaaatcggtcctgcagttacgcaatatgaaattcaaccagcgcaaggtgttaaagtaagtaaaatagtcaatctccataatgacattgcattagctttggctgcgaaagatgtacgaatagaagcacctattccaggtcgctctgcggtaggaattgaggttcccaatgataaaatctcacttgtcactctaaaagaagttttagaagataagttcccatctaagtataaattagaagtcggcattggtagagatatttctggtgatccaatatcaattcaattaaatgaaatgcctcacttactcgttgctggttcaacaggaagcggtaaatcagtttgtattaatggtattataacgagtatattactcaacacaaaaccgcacgaagttaaacttatgttaatcgatcctaaaatggtagagttaaatgtttacaatggtattcctcatttacttataccggttgtaacaaacccacataaagcgtctcaagctttagaaaaaattgtttcagaaatggaacgtcgttatgatttgtttcaacattcatcgacacgaaatattgaaggatataaccaatatatacgcaaacagaatgaagaacttgatgaaaaacaacctgagttaccgtatatcgtcgtaatagtggatgaattggctgatttaatgatggttgcaggtaaagaagtagaaaatgctatccaacgtattactcaaatggctagagcagcgggtatacacttaattgtagctactcaaagaccttccgttgatgttattactggtattattaaaaataacattccatcaagaattgcgttcgctgtaagttctcaaactgactctagaacaataattggtgctggtggagctgaaaagctacttggtaaaggtgatatgctatatgttggtaacggagaatctactacaacccgaattcaaggtgcttttttaagtgatcaagaagtgcaagatgttgttaattatgttgtagagcaacagaaagcaaattatgttaaagaaatggaaccagatgcacctgtagataaatcagaaatgaagagtgaggatgctttatatgatgaagcttatttatttgtaatagaaaagcaaaaagctagtacttctttattacaacgacaatttagaatcggttataatcgagcttcaaggctcatggatgatttggaacgtaaccaagttattggtccacaaaaaggaagtaaacctagacaaatattagttgatttagaaaatgacgaggtgtaaaaatgtcggaaatgagtgcaatctatagagtaaaacaatacattttaaatttaatcaaagatggtgaactaaccaatggaagtaaattacctagtaatttgtcaattgcgagagcattaaatgttaaaacagatgatgtttatgatggtatagatgagttgattactgaacaagtagtaacggataattttgaagaggggactagcgtaaaagtaaagccccctttctattacccgttaaataaaattattagtatagggactatgattaaagaagcgggttatgaagcaggaacagaatatctgaatcttgacgagcaacctgcaactattttagatgctgaacatttaggtatagaaacaaaagaacctataacaattattgagagactaaggactgctaatcataagcctgtcgtatattgtttagacaaaatagcaaaaacttatctaacttgtacagattatcaacagagtagtggttcaatgttagaagctattaaagcatctacaaatcatcaaatcatgcatgcagaaatggatttagaagcaattagttacgaaccccatatctctgaagtgcttaatgcttcacctcacgaagggcttatgttacttaaagtagtacattatgacgaaaagcatcaaccaattttgtattctttaaattatattaagagtagtttagttaaattcactattactaaaagtgaataaattgtcatattaaaaccaggaggttagattttgaagagattcaatcaagataacacaaaagttcgagtcaatgttttgcctaccgataaatttaaaacaacgacaattacatttaaatttatggcaccattaaactataaaacaattacttcacgttcaattttaagtaaagtattagttcgtgcaacacaacaatggcccaccgataaaactttaaataaacagttatcagaattgtatggcgcctatgttaatagttttgtttctaagtttaaagataagcatgttattacaatctcattagaagtagttaatgaaaaattcttaaaagataaaacccctttatttgaaaagggattagatacgttaaaagaaataatttggaatccattaatcaaagatagatgctttgatcatacatatgtagctcaagaaaagtctttacttagcaaaaaacttgaagcaatggaagataataaagcacagtattcatttcttcagttaatgaattatatgtttaaacaagaaccctatcgatatatagcgacaggtc

SEQ ID NO: 3582 - DNA, 3602 bp, Artificial Sequence
  Description of Artificial Sequence: synthetic nucleic acid sequence
tgtacggtatgcgcaccacgaattgaattcatcgtttctagttgaatttgtttaattctatcaagtgcccattgttttataaagtaagaagcagattgattatttagtatttgctgagttttgtttactacaacatatcctaatttatgttctgctatatgtttttcacctagtaaatgtgcttggtttaaaatatgttcatatctattattaaactcttgttgtaattgatttaattctactaaattatgagcatgctcgactttttctaaaaattctttttgtagtgcagttaattgtttatcaaactgagttttttcattagaagttaaaccttttattgtttcaatttctttgaaaccattttggatttgagtattaacatcagtaatgatatcctttttagctttatttagcgtaaagcgtttaggatcaaactgatctatttcttcaaaatcagttcgttttactgtttcaatatctttaatcgatttagaatgagtcactttatcgatggcttgctttttcaatctttcaatttcagcttttgcatcttcacgttgagtagacgttaattcgttattagaatctatatctttgattttttgttttaccagaacatcaattgtttttatagcatcctttttagctatttgtaattctttttctacaactttgactggaacatttacagtgacaaatgagccatcagctaaaataaccttaactttagcggttaggtgatcagctactttatcagtgttcggtaatgaaacaatattgactttaagttcatcagttaaagtcatagctccaattatagattctaatgaaatagtttcatctctgtgaacaaccacctcacttgttactagagcattttgaaggctcaattcaggtagttcaaaaactaatggttgctgatcagtatcccaaataatgatatgagctaaagtattaaatgcatgctctttattgttattgatatcatcaattgaattagaattttcgatatgttgaagtgcatctttttctgttttatcaatatctgctaaagcatgtgccttttgagaaggtgttaaatcagtgttgttatttattgcatctcgtttcttttgtgataactcttttatcacttgtttagcttctgctttggcgataattaattttttagtagtttcaatgacttcatctagttttgttgtagcattttctatttgttgtttgtttatagcttgttgaatttcattcttaattccatttactaacttattaatttgagatattagtttatttttttcttcatttgataagtttggattttgactaattaagtgatttatatcttcaactttttggtcaatcatttgattagcatctagttttgctttaggtaattcatctgcatgtatgtgttcaattgcagattgcccttcatcttttgcttgattaactaaatcatttgatgttgcgtgattaatattagaaaacgcttttctagcttcctcatttaccatttgttttgcttgagctttagaatttgatgttgcattagcgtgttcaatttcatcaagttgacgtttgagcgtatctttaatgtcattatgtgcttttgtttgagcatctttaagtctttcaattccatttagaagtgctctagcatcatccatgttttgaatcattccaattatgatattagcgtctttatttgtaccgttttctttgtcaagaacattattcgctaagttgatagcgtaatcatattgtattttaaggtcttcatcagcatttaaatattcaatgttgtcttttgtagttgctgttaattgagctacatgttcttttaaaccttgcatagcatcatttaattctattgcattatcaacgatttgattaattattttaatgtctttagacgctctaatctgattaattattgcagctttttgagcattattaagtatatctaattctttaataataaatacttcagatttttgttgatgttcttttagacgtcgttcaccatttaattggtctttagcattatctatttgtgttaaaagatgttgaatgtcattgatattgacatttgtaccgctatttttatttaatacgcctttagcttcttttaaagctttgttaaattgacgttttaaattataatcagcgtttctataatttaaacttgctttaacaggatttactaaggttttaagcttatctctcaataatttcattttatcgtttaattttaacgttgattgagtgagctgagataactctgttaaagtatttgctgaatttaccttgtttgtgacatcttcaagttgtgctttatttaaatcttttaatccttttattaattttaaatctttgctcttctcagttgcaagacgttgttcaccattcaatgcattttttgtatcgtaaatggcttgactaagacctaatacttcttcaatcgttgctggattttctgaagttttagaacttgttgcacttgcttgttgtagcgcctcatcaaattcaatttgtaaattcttatcagcattaatataattcacactatttggaacagaagttgaattactttctagagtatctcgtaagtctttcattgcattatctaaatcactagctttagataatgtatttgctaaagatgataaatcatcagagttgtgaatattactttcagcaatatgacgctgtgcatcattgatataagataaagattgtacgtattgaattgctttagctttagcttttgataaacgttggataccatttaaagcatctttagtatcctcaatcacttgtttgagtccctcaatttgtatttcatctaaatttttaccattttcttttgcaagtacttttcgagcattacttaaagcatggtcaaattgttgttttaaatcttcatctgaatttatataatttgagcttgcttggacaggaaaagcttgattattaagttcatctcttaaagatttcattgcatcatttaaatcaaatgcttgattcacgattctagacaattgtgcaatagaattagtattcataatttcatcatttgcatgtgtgaattgagctttattaataaattttaaactatcaattagtttttctgcttttgattttgcagctgttaaacgttcaataccgttaagtgcatctttagttttgaatatatcatctttaaatgtatcaattgcattgaaatctaagttctgaccttgagttttgttgagtgcatcacgtgcattgttgatagcttgagtaaagttatctttgcgtaggttatcggcgttaatataatttatacttgctttggttggagcatagttattaacgattgcgttagctaattcacccataatgtcattgaggtttgtgccctcgttgacaagatgttctaattctaataaatcatgcgattgcgttactttatcctctaaagcagacttttgagcattgtttattttttctagtgatttaatatattctaaagctcgtggtctagcatgatttaatctttcgaaaccatttaacgatgtttctgcatttattaattgttgtaacgcttgttttgcttc

SEQ ID NO: 3583 - DNA, 3148 bp, Artificial Sequence
  Description of Artificial Sequence: synthetic nucleic acid sequence
atggtgcatagttagtctatcgttcaaatcattcaatttaaaactgcgacgtgccatactcactagttgctcttgtatttctattccttcaataggttgagttgatttagcagctaataataatggaataacaccattgccggagcataaatccataactttatcatttttgcgaacttcggttaaataccctaacaatagggcatcagtagaaaaagagaatacttcatcattttgtataatctcatatccttcttttattaaatggtcaacgcgttcattatcttctaacatatctttactcctaaaaaaggatgttattacagtatgacttaaactacacacttataatacatccttatatttaaacatttatttatcgaaagaattaatcactcaacacattaaggcataataagcaatcttcaccatgacgatgtttcccgaataattcacccttacaaatatgaaaaccttcacgatataacattgctaaattatctttacttggagatggtgtttttacatgcttataattatctttatctaagtgagtttcaaccgattcttcagttttgttcatcaatcgttttaaattttcattttcaacttgcaaagcaacattctcctcaacaagttcgactgttaaatctttaagttctgacatgtcggttgtaagttgttcaacgtgatgttctaatttcataagtctttcgaataattcgtttcgattcaaaggttattcaacctccttaattcaatacttctatctcttccattttatattctaaaggttgttctagaccctctattttaacttgcatagaaatatctaaaatatttaatcctatcacttttccgtgaccatctggtgtttgaatcatatctccaacatcaggtaattgagttcgagcctcttcatagtagtcattttcatatttaagacaacacatcaatctaccacaagctcctgaaatcttagttggatttaatgataggttctgatctttcgccattttaatggatacaggttcgaaatctcctaaaaatgtagaacaacataaagaacgtccacaaggaccgataccacccaataatttcgcttcatctcttaccccaatttgacgtaattctattctagtctttagattttgagctaaaactttaacaagtttgcgaaaatcaatgcgatcatctgcggtaaaattaaaaatcactttagatttatctaatgtatattcacaattaactaatcgcatatctaattgctgatctttaactacttttttacataattctaacgcatcattggcatcgcgttcattacgataatatgtttcttgatcatcttcattcattttacgaatgatattttttagcggtaatgtgacatcttctacatcaacttcacgtaatggaaactttacgtggccaatttctatacctcttttagattggacaacaacccagtcaccaacctctacatctaattgattcggcgcgtagtattctaatttccctgctttttgaaactgaacacctacaacattgggcattttaaatcacaccttttattactatttgttcaaaaacaagtgttggattaacattttgatttaactttttatgcgcttcagtaatctgatcatacatgaggattaattgattaaaagttaattgatttgcataattttcaatttcttcagttaaatcactaaatgtataataattatccatttctatctttgcatgcattatatcttcgaaaaagccattgacggctgataaagtaagtaattgtaatttacgattcttagcttgttttaataactcaatgacacctataagagccatagctttattagataatattaattgacaccatctgatgattgattttcttaaagtaactaaatcaaattcctcatttaacgacgatgctgcttctatttgagttgtataggtacttagcatttctgctaccggtcttgctattgacatctctactaaacgctctataaactgccgcttatcaataggcttaaaatatacatgctgacatcttgaatgtatagtgtctaatatttgttccggtttcgttgataaaagtatcgcaattgtattatcagggggctcttctaaaaattttagtatactattttccccttgaacagttaatttttcaaaatcctcaataatatatactttatattgaccctcaataggtagttggttcatatgatgaacaagtttttcaatttgttcttttttaattgtattttcatcagaagacacatatgaaaagtcaggatgattaaaagtatcaactttcagttcgcattgattactattattacaaagaattaatttagtaaaatggattgcgacacgtttcatcgtttgtgcatcatcaccctcaaacaaatatgcatgtgacaatttgttagaatgatatgcgttagctaactgttgttgttcatccataagcgacttactccctttatgatattcattatgtaaaaagactacttaaatgatagttctagactgttgagcatcgtcttcaaacaatttcgaattagcaactgcattccttgaattaaacgcatataattactaactttcacgctaaaaactcaaaggatgaagtataaattttgaatgaatatgccttcaatctcaaactacatttcaagtagccaaataaaaaatacatctataataattacattttaaacacttttcgttaacataaatatgtaaatgaaaagtagattttttataaacaactagaattgatgaaatgcttcaatcggcattacaaatactgtcgcgccacctacttcaacttcaactggataaggaatatatgaatctgcactaccacccattggtgttattggtgaaacaagttggtctctattaccacaagtattatcaatgacagatagaacctcgtcgacacggtcatccttaaccccacataagaaagttgtattgcctgctcttaaaaatccaccagtagttgctaactttgtagctctgaaattgttttttacgagttggtctgaaagctcttgactatcttgatcttgaacgatcgctataatcattttcatttttatacacctctttttatcattacttt

SEQ ID NO: 3584 - DNA, 3743 bp, Artificial Sequence
  Description of Artificial Sequence: synthetic nucleic acid sequence
ctttactcatccagacatggttcttgatatcgacaaggaggtactgattacacatatattcaattctacagataagggaatgtcaatggataaagctacaaaatatgcacttcaattaagggtgattgctcaagaaagctatcctaatgtcgatagacattcctttctagtcgaaaaattacgcttacttattcaacaattaaaacaatctattcatcatctcaaacaattagatgatgccatgattcaattagcacaacaactcgattattttgaaaatattcattcgatacctggtattggtaagctaagcacagctatgattattggggagattggtgatattaagcgatttaaatcaaataaacaactcaatgcttttgttggcattgatatcaaacgatatcaatcaggtcatacacactgtagagataccatcaacaagcgtggtaataaaaaagcgagaaaacttttattttgggtgattatgaatataataagagggcagcatcattatgacaatcatgtcgtcgattattactacaaactaagaaagcagcctaatgagaaacctcataagactgccatcattgcttgtataaatcgattattaaaaacaattcattatcttgtaatgaatcataaattgtacgattatcaaatgtcaccacattagccaaacgtacaattaaatatagtttaacaccttattcaaaaaaattaaaatgaacggtttagttaagtaatgcttattttaattataagtacttgactaatcgtaggaaagaggctgggacaaacacaggctttttcaatacattggcagattgagtgtcatttgttagataaagaatcctgcaatagccgctgatataaacgaaacaagtgttgcaccaaataataattttattccgaaacgagcaacaacgtcacctttttcatcattcaatgatttaatagctcctgaaataataccaattgaactaaagtttgcgaatgatactaagaagacagaggtaattcctttagcatgttccgataatccagtcgctttacctaaatcttgcattgctacaaattcattagatagtaattttgtagccattactgaaccagattgaactgcatcttgccacggtattccagttaggaaagcgaaaggtgcaaaaataaatccaataagcgtttggaagttccattgaatagcaccaccagacataaagcttaagattccactcaccattccatttaataaagcaataattgcaatataacctatcagcatagcgcctacaataactgctactttaaatccatctagtatatactccccaagcatttcaaagaaagattgtttttttgtttcgttctcatcaattaataatttgtcgtcttcctcattgactttataaggattaatgatagatgcaatgataaaaccaccaaacaagttaagcactactgcagtaacaacatattttggttcaataagtgtaaaataagcgcctataattgatgctgataccgttgacatcgctgaagcagttaatgtatataagcgttgtttaggtatgtaaggtaattgtttttttaatgagataaagacttcagattgtcctagaattgctgccgcgaccgcattgtaagattctaaacggcccattccattaatttttgaaattaaaaagcccagtaagttaataattagtggaagtattcgtgtatattgtaatataccaatcaatgctgaaataaaaacaataggtaacaaaacgctaaagaagaatggtggttgtttaggatcaataaatttaaagccaccaaatacaaaattgacaccgaccgctgctttagctaataaataattaaaaccatctgaaatactcccaataactgaaattcccaaattagttttaagtaatataaatgcaaatattagttgaattactaatagcaatccaacatatcgccagcgaatattttttctgtctgaactaaataaaactgcgagtgctaaaaagaaaatgattcctaatatcccaatcacaatatgcatatttcttcattcctttaaattttttctattttctatcatacaacaaaatgaacacgctaacatcattaatttgaaattttaaaatcaaattggttgaaaaaggtcaaagatggtcatataatatagtcaaagaaggtcaaaaaagaggtgatatctatgcacaatatgtccgacatcatagaacaatacattaagcggttatttgaagaagcagatgaagatgttgtagaaatacaacgcgctcatattgctcaacgtttcgattgtgttccttctcaacttaactatgttattaagacacgttttactaatgaacatggttatgaaatagaaagtaaacgtggtggcggtggttacattcgaatcactaaaattgaaaataaagatgctacaggttatattaatcacttactacaattaataggtccatctatttctcaacaacaagggtattatgtcatagatggtttgttagataaaggtttgatcaatgaaagagaagctaaaatgatacagaccattattgatagagaaactttaaaaatggatgttgttgcacgcgatattattagagctaatatcttaaaacgattactaccagttattaattattactaggttaggtgaggtgtttaaaattgctttgtgaaaattgccattttaatgaagcggaagttaaacttactgttaaaggtatagatagtacgcatgaaaaatgggtatgttcagtatgtgcccaaggagaaaacccctggttacattctaacgatgataatacgtatcatacacaccaagacgatatagaagaagcatttgtagtgaaacagatacttcaacaccttgctgcaaaacatggtattaattttcatgagatggcatttaaagaagaaaaaaaatgcccaacgtgtcagatgacacttaaggatattgcacatgttggtaagcttgggtgtgctgattgttatgctacgtttaaagaagacatcattgatatagttcaacgtgttcaaggtggtcaatttgaacatgtaggaaaaacaccacaatcatcgtataagaaacttgcaataaaaaagcaaattgaagaaaaatcaaaatatctaaataaattgatagatggtcaagagtttgaagaggcagcgattgttcgtgatgaaattaaagctttaaaaagtgagagcgaggtgtctcatgatgagtaatatccatactaatattagtgagtggatgaagatgtctgaggagacacctgttattatttcttccagaattcgattagctagaaatcttgaaaaccatgtccacccacttatgttcccttcagagcaagaaggatatcgagtgataaatgaagttcaagatgcgctttccaacttaactttaaatcgattagatacgatggatcaacaaagtaaaatgaaattggttgcgaaacatcttgtgagtcctgaactagtgaaacaacctgcttcagcagtaatgttaaatgatgatgaatcggtaagtgttatgataaacgaagaagatcatatacgaatacaggctctaggaactgatttatcgctaaaggatttatatcaacgcgcttctaaaattgatgatgaattagataaagcgttagacattagttatgatgagcatttaggatatttaactacctgtcctactaatattggtacaggaatgc

SEQ ID NO: 3585 - DNA, 3058 bp, Artificial Sequence
  Description of Artificial Sequence: synthetic nucleic acid sequence
cgttgccaggcaaatatcgtataagatgcgatgagcctaatcgagaccgaaaggtctcttttttttatgcaaaaatagttctaaaaaagaaagtattaataaataaattcgctacttaacaacttttataagaggtaatttcatatgtggcttataaaggttaagtaacatatccaaccttaaatgctttaattactgttgtgtatcgtaacaataattaaaacattttaaagtttcttaaaatctagtatttatataacgagtgaatgaattaatgcattaacatgatcttctaattcttctttttttatccccccaaatcctaaaataaattttggataaactttagaataattttcgtaatgataaggttttaattttaaattattttttttcgcattttttaaacattgtttcattgacaatccattattaacagttattgtaaaatgcattccagttagtgcgccttcaatctttatttgagtattgtagggctttaatcgttttaaaatataatcaagtttatctctatatatctttcgcattttattcaaatgtctttcaaatttcccacttatcatgaattgagcaatcatgtgttgaacatgcacaggcactgtatttccctctttatatttttgattattatatttgtgcattaaattttgtggcaaaacaatatatgcaatcctacagcttggatataaagattttgagaaagtactcaccacccctaacaatgcagcaacaattgcggctattaaaattgctaggtatgaaggtagaattgaacttagaagaagcatcatcacaatcacacatacaatgagtacaatatatattctcaatcgtgatttcttaatcccttcaaattgagatatacataaaaaaataaacattgcggtaattgcaaagtctaggccgagcgcatcaggatttgaaatatactctccgaaaatggcaccgattacacaggaaacagtccaaaataagtaagcagtaatatttagtccgtgtagccatcgatcgttaattttttcacctttaacatatggtgttatagcaacgccaaaagtttcatctgttaataacgttccaagccctaccctattccaaaatccatattgcttataattaggtgctaaagtcatacttaataagaacattcgagagttaacgataagtattgtaagcacaattgcagaaataggggtgcctgcaatcactaatgtacaaataataaattgagctgcaccagcataaataatcagacacaataaaataatttctaaaacactgaaattttgggagactgccacaattccaaacgatagtcctacacctgcataaccaagtaacgtgggaatacactctttcacaccttgtttaaacgtaaggtgagtcatattatcagccccagtctctccaataaaataataaaatcagtctaatacacttaattattttattcaatatatttaaagaccggtatgtgtgccgtcatacataccgatgtctaaaaaagtgaacatgtaaaggttttattttttcagaattttctttcttatttttagaccctctttttaacttctagctttaaaatcaaaatgtttacaacattacttttaaagtttatcaaaaaataatagttactgaacttttgcaactttttaaaacatcattgatttttaattttttattaaaattttatttagaaatagtaatttccaaaagatacttaattttgtttgatataatcacaccatcaaatgaaacgaggtgtaacaatattgaattggcaacgtaaatgtatactaactactttgttggttttaagtagtttatttttagtattttcgactatcacatatgcgagtgaacgtgattttaaagacagtcttaaaatcactacacataacgtgtatttcttacctactgctatctaccctaattggggacaatctcagcgcgctgatttaatttcaaaagcagattacattcaaaatcaagatgtcgtgattctaaatgaattatttgataaaaaagcttcaaaaagattgttaacacgtctacattcacagtacccttatcaaacacctatcgttggtaaaggtacagaaggttggcaaaatacttctggtacttatagaaaaattaaaaaagtaagtggtggcgttggtattgtgagtaaatggcctatcgtacaacaagaacaacatatttataaaaaaggttgtggggctgatatggcaggtaataaaggctttgcctacattaaaattaataagaatggcaaataccaccatattatcggaacacatctacaagctgaagatccaacatgctttaaaggaaaagataaagacattagacagagtcaaatgagtgaaattaaacagtttatcaaagacaagaatatccctaaaaatgaacccgtctatatcggtggtgacttaaatgtcattaaagattcagatgaatatcaacaaatggcaaataacttaaatgtttcattacctactcaattcgatggtaatgcatatagttgggatactagcagtaatagtattgcgaaatataattatcctaaattagaacctcaacacttagattatattttattagatcatgaccatgcacaaccaagctcatggcataatgatacacatagagtgaagtcaccagaatggtccgtgaaatcttggggaaaaacatacaaatacaatgattactcagatcattacccactctcaggctatgcatcaaatgaataggacgattgatacatttaattattaaattttaatatttagaataggagctatatgaaacattggcattatacttcgaatttcatatagcttctttatgatattattttatggttatataaaaataaacgttgtttgacaaactaagttaaatattttgaatatgaatgataacgtttaaaaaatcaatttccactattttatatttttacaggcgttatctaaaagataaatacttgctacttcatgtactattttcatgattttataactcaatctatgac

SEQ ID NO: 3586 - DNA, 3233 bp, Artificial Sequence
  Description of Artificial Sequence: synthetic nucleic acid sequence
agtgatcagttcctaaaactataccttgagtattagaagcaattgaaaattgaactttcattcgttcacgtgctttttcattacccttttgaaaatcagtaagtttgatgcctgcttcactaagtgattgaacactctgatcaactgctggtttaatattaactgtatatgttgtgtcaggattaataaactcaagtgcatcttctacttcatgagcgtcttgttgcacaccataaggtaatttcactgctataaatttacagttacgtccctcttctttcaattcatttactgctaattgtgctaacttacctgttagagtagagtcttgaccacctgatattccaagaacaagagtttgtataaatgaatgtgattttacatacgctttaataaattgcttaatttcctggatttcctctacactgtcaatttgtttttttactttcatttcattaaccacaacatcttgcaatctactcattttcatcctccatctctttaacgtgttcagcaacttcaaaaatacgcttatgcttattttcccaacatttagtgcttaaatctactggataatcttgcgggttaagatatcgtttattttcttcccataaaatacttaaattatttttaagatagtcctgagcttcatattcatctggaagatggtatacaagtttgccattttcaaatatagattgatgtagattaaccgctttaaatgatttaataaacttcattttgtaagtgtgaacaggatggaacattttcaatggagattcgtcattaggattttcaccttctagcgtaatatagtcgccctcagccttgcctgttttattattaataatacgataaacattttttttgcctggtgtagtaactttctcagcattatttgataatttaatgcgatcactcattgtgccatcatctgtttcaatagaaaccaatttataaactgcacctaaggctggttgatcatatcctgtaatcagttttgtacctactccccatccgtcaactttagcgccttgtgcttttaaacttgtaatagtctgctcatccaaatcatttgatgcgataattttagcttctgtaaaaccagcctcatctaacattctacgagcttctttagataggtacgcaatatcaccagaatctaatctgatacctataaaattaatagtatctcctaactcttttgcaaccttaattgcggttggtactcctgattttaaagtatgaaaagtatcaactaagaacacacaatttttatgtcgctcagcatactttttgaatgctatatactcatcaccatatgtttgtactagtgcgtgtgcatgtgtgccagatacaggtatattaaaaagttttcctgctctaacattacttgtagaatcaaaccctccaataaaggctgctctagcgccccacagtgcagcatcgatctcttgagctcttcttgtaccaaattccatcaaagtgtcatgagttgctatttgacgaattcggctggctttagttgcaattaatgtttggaaattaatgatatttaacaaaatagtttcaataagttgcgcttggattaaaggtgcttcaactcttaataatggctcattaccaaaacaaatttcaccttcttgcatagatttaatattccctgtaaatttcaaatcttttaggtaatttagaaaatcttcttcataacctatcgattttaaatatgtgatatcttcatttgtaaacccaaagttttcgatgaaattcacaacgcgtttcaatccgttgaataccgcatatccactattaaatggcatttttcgaaaatacaaatcaaacactgctattctttcatggataccatcattccagtagctttcagccatattaatttgatataaatcattgtgtaacattaagctatcgtcgttatattggtacactttaacctctccaatcgacttaaatatttacaattattttatcataattcatatatagtaggtacttgcatgtttgatttacatttatttcctaataaattctaatatagtgtcgacaaatttatgacaattacctatattattcaagaaacagtatatgctcacgtataatgacgattgaggtgttttaaatgctaatagataaagcaagatcatttattcagaccatgtatagcgaattaaaatataatactaatgaaattgaaaatagaatgaaagagattgagcaagaaattaacttgactggtagttacacacatacttatgaagaattatcttacggtgcaaaaatggcatggagaaactcaaatcgttgtattggtagactgttttggaattctttaaatgttaaagatgcccgagatgtatgtgacgaaaaagaatttataaaatttatacatacacatattaaagaagctactaacggcggaaaaatcaaaccatatattacaatttttagtcctgaagatacacctaaaatttataataatcagttgattcgttatgctggttatgaaaatgttggcgatccatctgaaaaaaaggttactcgtttagctgaacatctaggttggaaaggtaaaggttcaaattttgatattttacctctgatttatcaattgcctaacgacactataaaaatacacgaacttccaaatgatattgtaaaagaagtttctatacatcatgaacactatcccaagctttcaaaattaggtttaaaatggtatgcggtacctattatttcaaatatggatttaaaaatcggtggtattacttaccctacagcaccttttaatggatggtatatggtaaccgaaattgctgtacgtaatttcacagacacctatcgtcttatgtaatgaacctagggcgagatgacaaagttttagatgcgtgcagcgcacctggtggtaaagcttgtcatatggcagaaattctttcaccagaaggtcacgtcgatgcaacagatattcatgaacataaaataaatcttataaagcaaaatattaaaaaattgaaattgaataatatcaaggcttttcaacatgatgctacagaagtatacgataaaatgtatgataagattcttgttgatgcaccatgtagtggattaggtgttcttagacacaaacctgaaattaaatatagtcaatcacaaaatagcattaagtctttagtagaattacaattacaaattttagaaaatgttaaagataatattaa

SEQ ID NO: 3587 - DNA, 3111 bp, Artificial Sequence
  Description of Artificial Sequence: synthetic nucleic acid sequence
aacctgactatgaacccatgtcagtatctgactttcaagatgcgttaggtttaaacagtgccgactcatttagagatttaattaaaatactcgttgaattagaacagtctggtttaattgaacgtacaagaacagacagatatcaacgtaaacaatccaacaaaacaaattcaaaactaatcaaaggaacgttaagtcaaaataaaaaaggctttgctttcttaagacctgaagatgacgagatggatgatatttttattccaccaactaaaatcaatagagcattagatggagatactgtcatcgtggaaattcaaaaatctcgtggagaacataaaggtaaaattgaaggtgaagtaaaatctattgaaaagcattcagttacacaagttgttggaacgtatagcgaagcaaagcattttggtttcgtattaccggatgacaaacgtattatgcaagatatctttatacctaaaggacaaaatttaggtgctgtagatggtcataaagtattagtacaaattacgaagtatgccgatagtactgacaatccagaaggccacgtctcagcaatattaggtcataaaaatgatccaggtgtagatatactttccatcatttaccagcatggaatagaaatcgagtttccagatgatgtattacaagaagctgaagaagtaccggatgtaatagaaccatctgaaatcgaagggcgtcgtgatttaagagatgaattaacaatcactatagatggcgcagatgctaaagatttagatgatgccattgctgtaaaaaaattaaaaaatggcaacaccgagcttacagttagtattgcagatgtaagttactatgtaaaagaaggatcagctttagataaagaagcttatgatcgtgcgacaagtgtgtatcttgtcgatcgagtaatcccgatgattccacaccgtctaagtaatggaatatgctcattaaatccagaagaagatcgtttaacattaagttgtcgaatggaaataaatgaacgaggcgaagttgtaaaacatgaaatctttgatagtgtaatacattcaaactacagaatgacatatgatgcagttaacaaaattatcactgatcaagattctgaaatacgttcacaatataaagatttaacacctatgttagatttagcgcaagatttatcaaatagattaattcatatgcgcaaacgtcgtggagaaattgattttgatattaatgaagcgaaagtacttgtgaatgacgaaggtattccaacagaagtgctaatgagagaacgtggcgaaggagaacgtttaattgaatcattcatgttagcagccaatgaaacagtagctgaacacttcaataaattggaagtaccatttatttatcgtgttcatgaacaaccaaaatctgaccgattaagacagttcttcgactttattaccaatttcggtattatgataaaaggtacaggtgaagatattcatccaacaacattacaaagcattcaagaagaagttgaaggtagaccagaacaaatggttatttcaacgatgatgttacgttctatgcaacaagcacattatgatgatgttaatttaggacattttggtttgtctgctgagtactatactcactttacgtctccaatacgccgttatcctgatttaacagtgcatagattaattcgtaaatatttaatagagaattctatggataaaaaagaaatacgtcattgggaagagacgttgccagaattagctgagcacacatcacaacgtgaacgccgtgccattgaagccgaacgtgatactgatgaattgaaaaaagctgagtatatgattcaacatattggtgatgaatttgaaggtatcattagctcggttgctaattttggtatgtttatagaattacctaatactattgagggtatggttcatatcgctaatatgacagacgattattatcattttgatgaacgacaaatggcactaatcggtgaacgtcaagcaaaggtctttcgcattggtgatacggtcaaagttaaagtgacacatgttgatgtggaagaacgcatgatagatttccaaattgttggcatgccattacctaaaaagacatcatcacaacgacctgctcgtgagaaaaccattcaagctaaaacacgtggcaagtcgttagaccacactaaaagtgatcgtaatggtaaaggtaaaaagaaaaaacgtaagcaacgtaaaggtaaaaatgcacgtaaaaaagataaacaaggtaatacgcatcacaaacctttttataaagataaaagtgtgaagaagaaatcgcgtcgaaagaaaaaatagtcagcaaagatgaggtgagtaatagtggctaagaaaaaatcaaaatcaccaggtacgttagctgaaaatcgtaaagcaagacatgactacaatattgaagatacaattgaagcgggtattgctttaagaggtactgaaattaaatctatacgtcgtggtagtgccaatttaaaagatagctttgcgcaagtgagacgaggcgaaatgtacctgaataatatgcatattgcaccatatgaagaagggaaccgttttaatcatgaccctttacgtacacgtaaattactcttgcacaaaaaagaaattcaaaaattaggtgagcgtacacgagaaataggttattctattattccgttgaagttatatttaaaacatggtcaatgtaaagttttattaggcgttgctagaggtaaaaagaaatacgacaaacgtcaagcacttaaagaaaaagcggtaaaacgagatattgatcgcgcagttaaagcccgttattaagcaatatcattgcttaatcgggccatctttgatatgattgattgcagtgtcaaattgttttattgatgatttaaccaaatattttgttagattgatttgaattgaggggacgttcttggattcgacaggggtcccccgagcttattaagcgtgtcggagggttggctccgtcatcaacacatttcggttaaatataactgacaaatcaaacaataatttcgcagtagctgcgtaatagccactgcatcgcctaacagcatctcctacgtgctgt

SEQ ID NO: 3588 - DNA, 3549 bp, Artificial Sequence
  Description of Artificial Sequence: synthetic nucleic acid sequence
aaacaaaataaaaaccgtacaataaatagattataacaattattgtacggaaaaatattttttatgacatatctgcatgagcataatcaatatctgtaaatttattgtattgtttcataaagtgaagtttcacagtacctgttggaccattacgctgcttggcgatgatgatttcaatttcaccgttatcatcatttgtctgtggttcaaaaccagcatcgtcagcatcgtcatcatcttcatcaccttcaccacgattataataatcatcacgatacaagaaagcgacgatgtcggcatcttgttctatagacccagattcacgaatatcactcatcataggacgtttgtcttgtcgctgttcaacgccacgtgatagctgactcagtgcaataactggacattctaattcacgtgcaatcgccttaagtgtacgtgaaatctccgaaacttcttgttgacggttatctgagaaacgtgatccgcttccttgaatcaattgtagataatcaatcacaatcatatcaagaccgtgctcttgtttgagtcgacgacatttagaacgtaaatcattgatacggatacctggcgtatcgtctatgaagattttagttcgtgatagcttacctaccgcaatcgtaaagcgactccaatcttcttcagtcatcgtcccagttcttaaacgattggaatcaacgttaccagaactacaaatcatacgtgtcgccaattggtcggcgcccatctcaagtgagaagataccgacagtatacatatcttcatgtgtggcaaccttttgcgcaatatttaaggcaaaggcagtcttacctactgaaggacgtgccgctagaataattaaatcattacgattaaaaccagcagtcatttggtctaagtcacgataaccagttggaatacctggtgtttgaccactattttggtcgagttcttctgcggtttcatatacctgtcctaagacatctctaatatctttaaaaccatcactttctcttgtagaagatagttctaaaatacgtcgttcggcgtcacttaaaatcgtatctaattctaattcatcattatagccatcattcgctatactatcagcggtttgaataagtttccgtttcaacgcatgtttaaaaacgatatccgtatagtactgaacatttcgcgttgtcggtacactcgtcgatagttcggcgagatattgagggccacccgcttcgtttaagctaccttcacttgataattgatccatcaatgtgacaacatcaatttctttattatcctcatttaggtgcatcattgctcgaaaaatatgttgatgggcgcctctataaaacgactcaggaagcaagacttcctgagtagtattaatgagttctggatctataataatggcacctaagacagattgttcagcttcattgctatgcggcatttgattttgctcatacattccatccattatctacttacacctcttatttcaatccatcttttattttatcgtcatctgatattgtcacgagatacactacagatattttagaggttaacaaattatataagtcatacatcttatataattgcacctataatagtaatcatgtactatcctcgcgtcatatctttaaattattgttctacagtatgcacacggattgtaccttcgacttctttgtctaatttcactggaacgttcgtatatcctagtgcgtgaataccatgtggtaagtccattttacgtttgtcgattttaatatcatgttgtttttttagcgcttcggcaatttgtttcgtactgattgaaccaaatagtttgccaccttcacctgttttagctgatacttcaacttcgatatcttttaattgttctttaagtgcttttgcatcatcgatttcttgttgtctatctgctgctgcacgtttattttgctgttctaattgttttaaattaccaggagttgcttctacagcatatttatttttaagtaagaagttatttgcgtaacctactggtacatctttaacttcgccttttttacctttacctttaacatcttgtgtgaaaattactttcatgcgtcttcactcctactcatttgttctgtaattgcttgttgtaattgttctattgcttcatctattgtcgcaccttttatttgtgtcgcagcatttgtcagatggccaccgccacctaacgcttccattgttaattgaacatttatggaacctaatgaacgtgctgagataccgatcaggttgtcttcacgtttagctactacataagatgcttcaatgccttctaaacttaacaactcgtcggcagcttgtgcaaccgttacaggatgataaattttatcatctgaaccatgtgcaatggctacaccttgatcttgtatcttaactgttcttatcaattctgaacgattgatatacgtatcgacatcatcttttaagaaatgctgcgttaagattgtatcagcgccatgtgcacgtaaataacttgcggcatcaaatgttctggaacctgttcttaaagtaaagtttcttgtatctactataatacctgcatacatgacagttgattctaaacgagtcaatctctgttcagttggttgatattctagtaattccgttacgagctcagcagttgagctagcgtaaggttccatatacacaagtaatggatttgaaataaagctttcgccacgtctatgatgatcaatgactactttgcggtttgctttatttaagacattttcatctaagaccatttcaggtttatgtgtatctacaacaacgacagtcgtcttagaagtcatcatatcccaagcctcatccgatgttacaaagcgttcttttagttccggtttcttatcaatctcgtccataacacgacgtaatgtcggatcaatatcagaatcattaagaacgataaatgcctctaaattattcattgatgcaaagcgcgaaactccgatagctgcacctatagcatctaaatctggtcgcttatgtcccataacgataactttatcgccttcagtaagaatatctttgagggcatgtgaaatcacacgcgcacgtacacgcgtacgtttttccatagggtcagtcttaccaccatagaatcttacattgccgttcatattcttaattgcaacttggtcaccaccacgacctaacgcgaggtctaaaccagattgtgataattcacctaaatcaataaggttctcagtaccttcacctacaccaatacttaatgttagttgtgcgcggtaacccacactcttttctcttaattggcttaagatttcaaaattagaatcttctaattcagccaatattttttggttaaagtaagctacaaattgatctgagttgtaacgtttgaagtaaatattgtaatcctgtgcccaacgactaatcacacgtgtcaccatagagttaatttcagaacgttgtgtatcgttcatgttttgagtgatttcatcgtaattatctaaaaatattgttgcaataatcggttttgaatcttca

SEQ ID NO: 3589 - DNA, 3826 bp, Artificial Sequence
  Description of Artificial Sequence: synthetic nucleic acid sequence
taacatgactcaacatactctactaatggaaacttcagttcttatccccacaaatgatatttcacgacatgtaaatgatattgcagaaacaattcccgatactgaattcgatgaattcagatatcatcgtggcttaatataagaaaagtaacagctcaacgagttgaaaatcatcaaaaaattataaaaaagacaatttctatattatttcaatagaaattgtcttttttacttatcttgaacctttttgtaccagcttctttttatatgaaaattataagttcattttcctaaatagtcactcttgctatttctcccatactattcataaattatgatttgtgtggaatgttattgcgctttatacccaattaaattaattaaatcttttggatgactataaggaggtgcatatgctacttcaaattctgttaaatcatccacagtagcattattcatcattgccattgataatacgtctattcttttatcggcaccttgtttaccaactgctgctgcgcgtataagttttctcgagtctttttcaaaataaacacgtaaatgtagtggtgaatttcctgggtaatatcctgcatgagctccttgcttaacttcaaccatatcataatcgaaatttttaagttcatttggtttgatgccaacacttgctaatgtatagtcaaaaaatttcactatattatttcctagataacctttaaagtgaatagacgaatttccagaaagttgttcagctataatacttgcaccacggtgtgctccccaagcaagtggaacctgtgccggtaaattcacatgacgataatgtgaagtaataacatcacctaatgcataaatatttggtatatttgtttggaaattatgatttactgggatataacctttatcattcagtatgacgttagatgatttaataaattgtgaatttggatgagtacctacaccttcgataataagatcaaagttttcaactttaccagatgtgaatgtaacttcatgtccatttacgtgactaatttcttcgttaaatctataagtgatatttctcttttctatttcgtcgatgatgggttgattcatatcttgatccatcagtttattaatatttgtagagcgatgaatccatgtgacatccaaacctctatgatgtaaattttcaaggacttctaaagagatgtaacccgcgccaacaacaagtgcacgttgtgctttggtattcgtaataaaggtatcaattgtttcagtatcttcgagatttcgcacagtaaatgagatatcactatgagtgtttaatcgatttgcagatgcgccaggacttaaaatcaatgtatcgtaactttcttcaaaagtttgattagtttgatgatttaagacagtaactgtttgtctctcatcattgatttgtataacttcatggtatgtttttacagtgatttgctttttgtcataaaattgattgggcgtgtatgctaaaactttacgacggtcctcgataacgttgccaatataataaggtaatgcacaattagcaaagctcatgtctctatctttttcaaaaacaatgatttcactctctttatctaatcttcgaatttgacttgcacaagtcgcaccaccagcaactgcaccgactattataattttattcatagctgtctctcctttatatatgtatgatattaaaacacgtatgcctttttaatcatcacttggattgtttattcaacttaataataacgtattttcaaattaaaaaagtcatttaaataacgacctattccgtcttcattattactatacgtagtctcatttgctatttcctttaaatctttcaagccattggccattgcaatgccatgggtcgcaaactttatcatttctatatcattgtcctcatcaccaaacgcaatgatatgatcgtcggcgatgtttaaatagttttgaacatgcttgattccacgtgctttgttaatcccacgcttcacaatttctattactggaaacggtgcgccccaacgacgatgttcaatattttctgcataaaaatgtgttaacatatctttaatttcaggaatattttcttcttctgcttcaacaagtaatgacgtaggtgcttcattaagattttcaagtaaattacctgtttgaattttaggatttcccattgaaaaaccttcgtaaagtcttgaatcataactatttataaagacatagtcttttacttcagcaatgatatttgtaatatgagattgttgaagtgctgtaataatatttttagaaatttccacatcaagtacttcatgtatcactttaaaatcgtttgcttttggatgatgtacaaatgctccattaaagttaacaacaggtgtgctcatatttagttcatgataatacatctggcttgcgcgatagggtcttccagtagcaatcataacgtagtgtccacattgttgtaattcggttaatacttgtttagtgtaaggtgagatttctttattgtcatttaataatgtaccatctagatctagacaaattaaataaggttgcatatattactccttgtgttgttaattattatgtaacagtatcatagcattttattggcgttttgtcggatatttgatatattggtgtaaagaaaattttaaagaggtgatactgatggaagaagcactaaaagatagtatcttaggcgctcttgaaatggtaatagatcctgagttagggatagatatcgttaatttaggtttagtatataaagttgatgttgatgatgaaggtttatgtacagttgaaatgacattgacttcgatgggatgtccattaggaccacaaattattgaacaagttaagagtgttttggctgagattcctgaaatttctgatacagaagtgatgattgtatggagtccaccttggaataaagatatgatgtcacgatatgccaaaatagctttaggcatcggataatataaaggatagctactcattgtttggaataatgatgtagctatcctttttaattattaaagaaaattcaataagaattatcgtatgttcatttaatatttttataaattaggcctataataaaattgaattaatattacaaatgtattacaatacttaagacttataaccttttaatgaggtatatcttacgaagtatgataattaactcaatggaaacgtgcgctatatgatagggatagctataacataagagaatgaccttgttaatttgaatgagataaaatttgtttgaataagttgattagaagcaatagcgttcgtcttatgaaattgattagtaaaaaagttacttgtctaacgaaatttattattaatagggaagaatgtaacaatgagaaaaaaattaaataatgaatatcgctctgctaaaaaaatacgatatatgcctggattagatggtttgcgagcaattgcagtcattggtattattatttatcacttgaataaacaatggttaacaggtggttttttaggcgtagatactttttttgttatttcaggttatttgattacgagcttattacttaaagagtatgaagatactggaacaataaatcttaaaaatttttggattcgtcgtattaaaaggttattaccagcggtatttgcattaatagtagtagttggaattgcaactttattattgcaccccgagcatattgtaagagttaaacatgatatgatagcagcaatattttacgtatctaattggtggtatattgctaaagatgtcaattatttcgagcaattttcttttatgcctttaaagcaccta

SEQ ID NO: 3590 - DNA, 3748 bp, Artificial Sequence
  Description of Artificial Sequence: synthetic nucleic acid sequence
acaatcaaagaagaatatggaatgtctaaagaggaaattttgattttacttacacttttggaaaaaggctcaatgactttaaaggaaatggataaatatgttcatattaaaccgtataaacgtacacgtacttataataatttagttaatcttgagtggatttacaaagaaagacctcaagatgatgaacgtacagttattattcattttaatgacaagcaaaattctaaaaaagaagatttattaaagtttattgatgactcaattaaaatcaagtctgaaccaatgtaatctagtttacaatctattttagcagtttaatttaacgtgctttaaatctttaactgaacaaattattttatttgaatcatgggtataattatgagaattagttgttgaactatattaaagagtgttttcaaaattatgaggatcagtaaacttaatagcaattaaaagtaaggtatacttcatgatgaaatttataattaaaaaacctgggacaaaatgtttgcttgtctcaggttctttttacgtacacgtgtataaattttttaattacgcttttcaatagcacagataaaaggagcgttattcttttgatttatgaattgatattgcaatatatgagctttattttgatcaaagttttgtaaaaattcaagtagtgcttctttttctactttaccttcttcatgaccgtgatatataactaatataataattccttcaatacttaagatatcaaagatttcattaatagccataattgttgtttcaggtttagtgacaatttctttgttacctttcggtaaataacctaaattaaaaatagcagcatctatgcaaccgtgatgttgggcgggaatgtgcaatttagcattttcatgaccagattggattaattttacattcgaataatcttttgtttttttgtgcgtattcaaaattgcttgttcttgtatatcgaatccatagacaagtccatttggaacatgttgagcaaaataagcagtatcattcccattaccacttgttgcatcaattacaatactattatgattaatatgagaatcaattaacgatttagagaagggtaaaatacgttctagtttcatgattgtatactctgcttgttcattttaccttgataggagtttcgtctagtaagctcattatcaatttcatttaatacttcccatttattaacactccacattggtccgaccattagatctataggtccatctccagtgattctgtgcacaatcatttctgggggtaatacttcaagttgatcacaaacaagattggtataatcttgttgactcataaactcgagcatacctttttcatattgtttaaccataggcgttccttttagcaagtgtaataaatgaattttaataccttgaacgtccatctgagcgacttctttagcagtctccatcatcatgtcataattttcacctggtaagccgttgattatgtgcgtacaaacatttatattatgtttgcgtaattttgttacgccgtcatagtatgtttgcatatcatgagcacgatttattaaatcggaagttgactgatgcacagtttgtaggcccaattctacccataagtaagtgcgctgattaagttcagctaaatattctacaacatcatcaggcaaacaatcaggtcttgtcgcgattgataaaccaacgacgccatcttcttttaagacaggttcatatttttcttttagtacttcaacaggtgcatgcgtatttgtaaacgcctgaaagtatgcaatatattgaccttcactccatttttcatgcatacgttcttttatttttttgaattgaacttcaattggttcagctctattacctgcaaagtcaccgcttcctgctgcagaacaaaatgtgcaacttatcttttagatgatggacaatcatattcttatttgatttttgttcaggaaacatggtcgatgttgcatgagaatagagataaacgaatcattattaataatcatttagaactaaagcatttccaagaagaattagattatgttttgaataacatagaaggaaacaataactatggtaaggagtttgtttcagctgttgaaaaaactttcgaactagagtgaagcggagtgaaacaaaatgaaccagtgggatcaatttttaacgccatataagcaagctgttgatgagttaaaagtaaaacttaaaggattaagaaaacaatatgaagtgggagaacataattcaccaattgaatttgtgactggaagggtaaaacctatttcaagcgttatagacaaagcgaacaaaaggggtatcccttttgattgtttacatgaagaaatgtacgatatagctggtcttagaattatgtgtcaattcgtggatgatattgacatagttgttgatatattaagacaacgtcaagatttcaaggttatagaagaaagagattacattcgaaatacaaaagcaagtggctatcgttcttatcacgtgattattaaatatcctattgaaacactaagtggacaaaagcacatcttggctgaaattcaaatcagaaccttagcaatgaacttctgggctacaatcgaacatacattaaggtataaatatgatggggcatacccagatgagattcaacatcgtttagaaagagcagcagaagcggcatatttattagatgaagaaatgtccgaaattaaagatgaaattcaagaagctcaaaagtattacacgcaaaaacgtgctaagaaacatgaaaatgattaatgaggtgtaaatcatgcgttatacaatccttactaaaggtgattcaaaatcgaatgcattaaagcataaaatgatcaatcatatgaaagattttcaaatggtagaagatagtgaaaatcctgaaattgtcatttcagttgggggagatggaacgttactacaagctttccatcaatatagtcatatgttatccaaagttgcttttgtcgggatacacaccggtcatttaggattttatgcagattggttacctcatgaagttgaaaagcttattattgaaattaataattcggagtttcaagttattgaatatccacttttagaattaatagtcaggtataacgataatggttatgaaacgagataccttgctttaaatgaagcaacaatgaaaactgaaaatggctcaacattggttgtagacgtcaatataagaggtaaacatttcgaacgatttagaggagatgggttgtgtatatctacaccttcgggttcgacagcttataataaagctttaggtggtgcgctcatacatccatcacttgaagcgatgcaaattgctgaaattgcatctattaataatagagtgtttagaacagtaggctcgccattagtacttcctaaacatcatacgtgtttaattacgccggtaaatcacgatacgattagaaccacaatcgatcatgttagcattaagcacaaaaacgtcaatgcaatacagtatagagttgctaatgagaaagtgcgttttgccagatttcgtccatttccgttttggaaaagggtacatgactcatttatttctagtgatgatgaacgatgattttaacatatcaaattgtacagtcagaaccagtgaaaacttttttgaaaaatcaagattattctaaacgcacgttgagcgccattaaattaaatggcgctttactattaaacggttcacctgtaactgtcag

SEQ ID NO: 3591 - DNA, 3016 bp, Artificial Sequence
  Description of Artificial Sequence: synthetic nucleic acid sequence
cactaataatataaagaagttaatacggtttattcaactaacatacctcttacattttgattctaatctaccttcattatttaaaatgtgttaaattcactttaattgaattttctaaattctttaaagttggttttaacttaaacataaaccttttttgacaaatttcacactattcaaattcaatgttaataaaaagttcattgatttattaataaaaaattacaatttttgagttaagttgaaaactacaaggaaacgcttacaataaaattgtaattcattcacaaggagttgttattgatgaaaaatttacgtaacagaagctttttaactttattagacttttcacgacaagaggtagaatttttattaacactctccgaagatttgaagcgtgccaaatatatcggcactgaaaagcctatgctaaaaaataaaaatatcgcgcttctttttgaaaaagattccactagaacacgttgcgcattcgaagttgccgcacatgatcaaggtgcacacgtcacttatcttggacctacaggttctcaaatgggtaaaaaagaaactgctaaagatacagcacgtgtacttggtggtatgtatgatggtattgagtaccgaggtttctctcaacgtactgtagaaacattagcgcaatattcaggtgttccggtatggaatggattaaccgatgaagatcaccctacacaagtgcttgctgactttttaactgctaaagaagtattgaaaaaagagtatgctgatatcaactttacttatgttggcgatggacgtaacaatgttgctaacgcattaatgcaaggtgctgccattatgggtatgaatttccatcttgtttgtcctaaagaactcaatccgacagaagaattattaaatcgttgcgaacgtattgcgacggaaaatggcggtaacattttaatatcattactttaattaaataccattctgatttcgtcgtcttcttgattgatgttgatttttaaaattcttgggtaacactttatcatagaaacttaaaaataacagtgcaaaacttaataatataatcatcccaataaacatcatactcatattaaatgtatctacaagtatacccccaataaatggtccaaatgctttacccactgtagatgctgaattaacaaatccttggtattgcccttgctttccaactggtgcaagttgatttgctatagttggtactgcaggccaaacaaacatttctccaaaagttaaaatgaccatgccaactacaaatatagcaaagtgatttgcaaaactcgtcactaggaaagaactcataaaaattaaaatacctacaaacatttgatgttttaaattaccttttaataagataataattggtcttattaaaggttgagctactaaaatcataattccattaattgtccataatacactatattgagacattgaaatattaattgattgtgtgaatgaagctatcgttgtttcccattgaatatatgcaatccaacaaattgcaaacattgcacatactagcatcatagcagtaaatcgttttttattttctttgctttttaaatctatcgaatcttgtggtttaaatttagcattaatctctaaattgaactgtgtaatcgccacgatggcaaaaagtacatacataatgaggtttgccataaaaatataattgaaactaaattcagccacaaaacctcctaatgccgcgcctaaagcaacccctatattttgtgctaagtagatagcattaaaagtttgtcttcctccattaggccaaacggcacctgccatcgcataaatagcaggaactatcattccgccaccaaatccaagtagtactaaccaaattgcataccatggccagccatgaaacaagttgagtaatgtggtactacataaacacgtaaatgtacctattaaaatcgttttgtaaccaccaagtttatcaaacaaaaaaccacctaacaaattacctacaaccattccaaatgaattaatcatcaaaacgatacctgcaattgttaaactcttatgaagttcttccttcatgaaaattgtatttaaaggccacaaaaaactggcgccggttatattaagtgccatacctataactagccaccatactgatttaggtatattcatatcatgagtccctctctttatatttttctcaatctacaatagacactataacactaaaatatgttaaaatctgtacttagaacctaaatagaaaggaaaatgtattatgggtaactatttcccgtatgcctttgaagataaacgctatcacacatggaactatcatttaaaaaacaagtttggtcagaaaatatttaaggtcgcattagacggaggttttgattgcccaaatagagatggtactgtagctcatggaggttgcacattttgttctgcagcaggaagcggtgactttgcaggtaatagagctgaaccaattgaagttcaattcaaaaaaataaaagaacgtatgcatgaaaaatggagtgaaggtcaatatattgcatactttcaggcgtttacaaatacgcatgcacctgttgaagtactaaaagaaaaatatgaacctgtcttaaaagaagatggcgtcgttggtttatcaatcgcgacaagacctgattgtttgcctgatgatgttgtagaatatttagctgaacttaatcagcgcacttacttatgggtagaattgggcctacaaactgtgcatcagtcaacttccgatttaataaatcgtgctcatgatatgcaaacatactatgacggcgtaacaaaattacgcaaacataatataaatgtttgtacgcacataatcaacggcttaccaggtgaaaattatgacatgatgatggagactgctaaagaagtcgctcagatggacgttcaaggtattaaaattcatttattacacttgctaaaaggaacgcctatggttaaacaatatgaaaaaggtatgctcgagtttatg

SEQ ID NO: 3592 - DNA, 3705 bp, Artificial Sequence
  Description of Artificial Sequence: synthetic nucleic acid sequence
tttttataaattcatttactggcttctttatttacaatacctcgtattgttggctcgctttcttaggggacagcttcagcctgtagtcttcaacttgtcctgctccctcaatagtctcgccaaaatactttgtgtttatatgtaatttcacattgaaatactttaaaaaataaggtctttcgtataatttaataaatagcaataaactaaattaacgaggtgccttatgtataaagattataatatgacttaacttactctaccaatggaaatttcagttcttatccccacacatgatatttcacgacatgtaaatgatattgtagaaataattccagatacagaattcgatgaattcagacatcatcgtggcttaatataaaaaataatagctcaacgagctgaaaataatcaaaaaattataaaaaagacaatttctatattatttcaatagaaattgtctttaattacttatcttggacctttttgttccagcctcttgtaaatttttaaaattattaaaatgtgaagaagttaaactaagattttttcatcgttagatttcttctctttgtgtactactaatttattattttttgtctttttaaactgtcgtttcttaagcatgccccataatggtacagcaatgaaaattgacgagaatacaccagataataatccaattagtaatgctaaagagaaattaaatattgttggtgcacctaatattaatattgcaactacaactacaactacagtcaacactgtattaatagaacgtgtcatagtttgtctaatagagcggttgactatatcatcaatttgatcagtatgcgtaattactttaactttatgcagattttctcgaacacggtcgaaagttacgattgtatcattgattgaataaccaacgatagttaatactgctgcaataaatgttaaatctacttctaatctaaacaaactaaagattgcaatgatgataaatacgtcatgtaataatgcaagtacagaagatagacccatacgccattcaaatcttagtgaaacatagataataatgcctatagaagcaagtattaatgcagttacagcatttttagctagctcttggcctatgagaggtgaaacggtattaatttgtggattatctccaaattcagatttcaccttagcacttaatttattgtcttcctcacgtgataaatcttttttaaactgaactgtggcatttttatttccactaccattaatctgtatttgatctggttccaatccaactgattttacagttttctcaacctgtgcttgtgttatagcatttttagattgaatatctgctcttgttccggatgagaaatcaatacctaagtttaatttaaatattgaaatgataatcaaaccaataattacaattaaaatactaagtgaaataagtggcttagctaatttaacaaagtttaacctttcatatgatgtttttaaatcatgtacatctttaccttcattaatatcatgtctatccttcttcttaacaccaaataaccagtattgttttttaaagaagtttgaagataccagtaatgataacaaccctcttgataagaatactgcggttacaaatatcattaaaatacctaagagtaacatggttgcgaagcctttgactgaactttctccaaagaagaaaagcacagctgcagcgatgacagttgttaagttggaatcaaatatagttaagaatgaacttttatttgcttttgaatacgcttgtttaagcgtgcgtccaattcttagttcatctttaatacgttcatacattatgatattggcatcgacagccatacctacacctaaaactaatgccgccaatccaggtagagttaatacacctgatatgaaattgaatgcgactaaagttaaataaatataagtggttaaggcaatgattgcaactaaaccaggcaaacgatagaaaccaagcataaataaataaattaatgctatacctacaattgatgcaaacatggtcttatcaagagcatcttgaccaaattgtgcaccaacagagttagagtaaatttcttttaaatcaactggtaatgagccggcatttaataactcagctatttgtttcgcttcttcaacaccttttttcccattgaagccacctgaaatttcaacactactagaattaataggttggtctacactcgctgcagatataaatttaggctttttaccttcttgttgctttttagcttctttcttgtaactatcgcctttttcgaaatctaaccaaactaccatgacattgtcacgttttttagaaatcttttcagttactttcttaaatttatctttactttttactttaaatgtaactgttggttgattagtttcttgtttaaattcttgtttagcagagccttgtttaatgtctgaaccagacattaaaacatgatcttcagcatctctaattgttaaattagcttgtgtcgataataatttacgcgcttgtgcttgatccttgatacctgctaattgtacacgaattcgatttggatcttcgatttgtattttcggttctgatacacctagaacatttacacgattttctaatgtttgagatgtagcttgaagtgcttttttatcaattttatctcctttatttaaaggatctacttggaagaggacttcaaaaccaccttgcaaatctagacctaaattaacatttttaactacattcttatacgtcatacccattcctgtgaatagtagagctatgaggagtatgaatgcaattattctactcgttttcttcacatgaacacctcattatttacttatgtatctagaatactcgatgaataaattatcgtgcaagttaaaatgatattacgttcactttaacggacttacttatattaacatactcatagaaatagtgaaattattgtctaaaaatgcaacaattttataataattattatgtttaaaaaatactaaaaaaacctgagacagaaattgtcccaggcattcttaacattataacaatcaatacagaagttaaaataaatttattttaatcatttaagattagaattctattacagtagaaagataaaacattctatcccctacatttagatatcaatctgtatttatgaaggatctacttgttttatagctggtttttcaaaagtcatttctgttccattactatttactgtaatgattacagaagtttcatctacagcttttatagttcctttaataccaccgattgtagtaatcttttgacccgcttcaacacggttaatcattgcacgatgttcttttgcacgtttttgttgtggtcttattaataagaaatacattacgaccaataataaaattggtataatcaatgaagttaattccattttagttactcctctttaaaagtttttagggttttctacatttaatccatattgttcaaagaattcatctttaaaatctaaaagacggtcttctcgaatggcttgtctaatatcttccattaattttagcagaaaatgtaaattatgaatagtagtaagacggataccaaaagtctcttccgctttaactagatgtctaatataagctcttgtgtaatgttgacatgtataacagtcacattgttcatcaagtggtcttaaatcatctgcatatttagca

SEQ ID NO: 3593 - DNA, 3594 bp, Artificial Sequence
  Description of Artificial Sequence: synthetic nucleic acid sequence
acgtttctccgtttatatctagttgtacacctaacttcttaaattctgcttctaagaattcagcttgttctttttgactggaagaccctttgtcataatacaacttaagattcaaatctttgccctctttttgacgaacttgtcgatcttttgaaagcacccatccagccttgtctaataacgcttgcgcttttttcttatcatatgttcttgttggtaaattaaagtttatatctgtcacatttttagcaaatagttgtgtggctggcttttcttgtttgtctaaaatatcttgagctattttatctctatttaccatgtgacctaatgcttgtctgactgctttatcactgactgcactatctttcttaccagaattaacaacaagcatttttgtattcatagcctggctacgttttacttggtagcttccggtttcttttaattgttttaaactatctttatctaagctgtctgtacctctatcatctgtataagcaaagttggtttctccttttttcattgataaaaatgttgtttctcctgcaggtttaacttttgcttctactttatttaattttgccttttctccccaatattgattatttttattaaactctgcagatatatcttttttgtgttcacccattttaaatggtcctgtaccgtcaaatgatttcacaccatctttggttgtgccgtgtttaaaatctttaggcgatacaaaaacgtatggtcgtggcatagctagttctgctaacgcaggttgataagcttccttcaaatgtagttgtatcgtatacttatccttaactttgacatcatcaatcagtgttgaaagtcttaaccatgaatgtagtttcttattttgttgtactgcatcgatgtttttcttcactgcatctgcatcaaatttcgtaccatcatgaaaagatacatcatcccttaaatgaaacgtatatgtcttaccatcaggtgaaatgtcccatttttttgctaataatggcttaataccatccttggtattgcgaactaacggctcataaatcatactttctgctgacattgaacctccataaacatggggattcatatctccaatatctttgacagttgtatatgataatactttattctcttttttctctgttagttctttgttatttccacaaccggctaaaataattccagatacaaaaatgactgtacttagttttgtgagtttattcattgctttcctctttcttttcgaaaatatgtaaacttatatcattacgttttttatttataaaaagttaagtagttcgtcactaacgctaaatcctgtttaaaatgatgtaattcgaattgccttgatagttgttgatgtaaatgtgtgtcacagtattgtttaacagtattttcataacgtaataacaatgtgtcaatcatcggtgttgcaacgtttaatgctcttccaatcgcttgaattatcaaagtacgataataatcttcactcggcatgcgtggtatatgtatgactccttgttcatcagtatcaacatgtttgtatggtacggcagaaaaatcaaaatatgcaccttgatcgtccggattagaaaacggatcgattaaaattgctgtatatcgcacataaagtagatactcttgatgaatagctggtaaatttttaaagttttcaatatctacttcgcgcatggtctcataacgtatagggtagttttctttcaccataaactttagaagattgaccgaaggtacctttaatttttttaatatcatcatcatttcttgccacattaatcgcatttcgtgtattaaggtcattgtgattggaccctctggaaatagcttatatacatatactggtactttcgtcccttcaaataccgcctttaatgaaaattgattcataaacaatggtgggtgtacataaagtgaactattatgtatctccgcatgtagtggtgtgtccatcgttgttaattctatattcaaatagtcaaataaagacttaagcttacacaacgtcatagactgagattgagtcgaacctacgaataattttgatttaactcgtgtggttaggacacaatgtggttgtgctttatcaaatattcgggtatcgcctagataagtggaaaatgaaatcacttcaccttcacattgaacatctgatagtaattgcttaacaagcatatgtgatcctaatgttggtgagaccaagatgatttgcttaatacgctttaatgtggacttagataattgctgtaatatcggtcgatacgcatcggcagtacatgctaaaatcaccacgtcataatattcagtaatatctttaacatctttaaaaaaatgtctaaccgtaaacttacctgaaaaacactgatgtgcatcattttgagtcattactgaaaaaaagccgtcacgttgataagcatcaaagactctcttagatttggttgatgcatgaacgcgactcaccatatcaactatatgttctccatgtaaatgacatagtcgagcaagttgaatagcgaccggtccactaccaaccattaatattttagacatgttcaacaccaacttttgatgccactttacaataaagtgcaatatcaaaaatctgcttcggtcgtgtttgtagttcttcacatcgccactgtgtttcgtcagttgcttgagatggataattaaacaatgcttttatatcatcaccgtatcgcatagctacaacaacttcatcattcgtcaatgtgtaaagttcattcaaaatgtcatatttgataggtatcgtcgaactgaatataatatgtgtcacagattggatgtcttctaattgatcaactgtttgattactaataacgatatcttcatttggcgctagtacattgacgacacgttgccctaaatcaactgcttccgaatctatatctataccaatgaccgcagcgccagtttctttagcaacttgaatcaatgtcataggatatgcacccgaaccaatcagtaataatttgtcattttttccaatttgccatcttccgaattcttcattaatgcaatgctctatattttcgaaataacctgacgtggtcgccctaccattcaacaaacgttgtgcgcgaatgacttctacttgtttcacacattttgctgatacctcttgaagcttcttggttaagctcatttttgtttctaaatcgttccatgttaaatagtgatgctctgccaaaggttgaagtatccattgactgtattcatcaatcaaattttctaaatcaacaatatgccgactatcttccaaaacgagttgatgtaagtacgtaaattgttctaaataatattgtaattggttctctatttttgtatgatcattcatatttgcgtcattgtctcctgttctatatatgcttgtcctgttgcgacagttgaaacttgacacttaatcgttgtttggtattcattttgtccagactttctggatgagacaataatactgcctccgggttggttaactaggtaatcttgaatatcatgatctgttagataattaactaacacaccgatagaagccgctcctgaaccacagct

SEQ ID NO: 3594 - DNA, 3077 bp, Artificial Sequence
  Description of Artificial Sequence: synthetic nucleic acid sequence
ctggtagagatactagagggttaattcgtttacatcaatttgataaagttgaaatggttcgtattgtacaacctgaagattcttgggatgctttagaagaaatgacacaaaatgctgaagctattcttgaagaattaggtttaccataccgtcgtgttatcttatgtactggcgatattggtttcagtgctagtaaaacatatgatttagaagtttggttaccaagttacaatgattataaagaaatcagttcttgctctaactgtactgatttccaagcacgtcgcgcaaatatcagattcaaacgtgatgctgcttctaaaccagaattagtacacacattaaatggtagtggtttagcagtaggtcgtacatttgcagccatcgttgaaaactatcaaaacgaagatggtacattaacaattcctgaagcattagtaccatttatgggtggcaaaactaaaattgaaaaaccaatcaaataatcatataaacttaactagatgattacaatattaaaaagttatttaactgtcgataagattctataaacttatcgacagttttttaatatataaaggcgaaattggtatttttatattcaattagggatggatgtctaaaatagtttaaaatgattttcacgatttaaaatactggtataaaagcgattttatagatacggttgtctgacgtcacacaaacgaatgtctaaaaaatagtgaatatttattgtcatagattgagttataaaatcatgaaaatagtacatgaagtagcaagtatttatcttttagataacgcctgtaaaaatataaaatagtggaaattgattttttaaacgttatcattcatattcaaaatatttaacttagtttgtcaaacaacgtttatttttatataaccataaaataatatcataaagaagctatatgaaattcgaagtataatgccaatgtttcatatagctcctattctaaatattaaaatttaataattaaatgtatcaatcgtcctattcatttgatgcatagcctgagagtgggtaatgatctgagtaatcattgtatttgtatgtttttccccaagatttcacggaccattctggtgacttcactctatgtgtatcattatgccatgagcttggttgtgcatggtcatgatctaataaaatataatctaagtgttgaggttctaatttaggataattatatttcgcaatactattactgctagtatcccaactatatgcattaccatcgaattgagtaggtaatgaaacatttaagttatttgccatttgttgatattcatctgaatctttaatgacatttaagtcaccaccgatatagacgggttcatttttagggatattcttgtctttgataaactgtttaatttcactcatttgactctgtctaatgtctttatcttttcctttaaagcatgttggatcttcagcttgtagatgtgttccgataatatggtggtatttgccattcttattaattttaatgtaggcaaagcctttattacctgccatatcagccccacaaccttttttataaatatgttgttcttgttgtacgataggccatttactcacaataccaacgccaccacttacttttttaatttttctataagtaccagaagtattttgccaaccttctgtacctttaccaacgataggtgtttgataagggtactgtgaatgtagacgtgttaacaatctttttgaagcttttttatcaaataattcatttagaatcacgacatcttgattttgaatgtaatctgcttttgaaattaaatcagcgcgctgagattgtccccaattagggtagatagcagtaggtaagaaatacacgttatgtgtagtgattttaagactgtctttaaaatcacgttcactcgcatatgtgatagtcgaaaatactaaaaataaactacttaaaaccaacaaagtagttagtatacatttacgttgccaattcaatattgttacacctcgtttcatttgatggtgtgattatatcaaacaaaattaagtatcttttggaaattactatttctaaataaaattttaataaaaaattaaaaatcaatgatgttttaaaaagttgcaaaagttcagtaactattattttttgataaactttaaaagtaatgttgtaaacattttgattttaaagctagaagttaaaaagagggtctaaaaataagaaagaaaattctgaaaaaataaaacctttacatgttcacttttttagacatcggtatgtatgacggcacacataccggtctttaaatatattgaataaaataattaagtgtattagactgattttattattttattggagagactggggctgataatatgactcaccttacgtttaaacaaggtgtgaaagagtgtattcccacgttacttggttatgcaggtgtaggactatcgtttggaattgtggcagtctcccaaaatttcagtgttttagaaattattttattgtgtctgattatttatgctggtgcagctcaatttattatttgtacattagtgattgcaggcacccctatttctgcaattgtgcttacaatacttatcgttaactctcgaatgttcttattaagtatgactttagcacctaattataagcaatatggattttggaatagggtagggcttggaacgttattaacagatgaaacttttggcgttgctataacaccatatgttaaaggtgaaaaaattaacgatcgatggctacacggactaaatattactgcttacttattttggactgtttcctgtgtaatcggtgccattttcggagagtatatttcaaatcctgatgcgctcggcctagactttgcaattaccgcaatgtttatttttttatgtatatctcaatttgaagggattaagaaatcacgattgagaatatatattgtactcattgtatgtgtgattgtgatgatgcttcttctaagttcaattctaccttcatacctagcaattttaatagccgcaattgttgctgcattgttaggggtggtgatggacaaatgac

SEQ ID NO: 3595 - DNA, 3263 bp, Artificial Sequence
  Description of Artificial Sequence: synthetic nucleic acid sequence
aaggtttaccatctttatacgtccaaatacgtccaccttcaccacgagctgattcactcataagacgtaatttgtcatctccaggaatcgcagtcggatgtatttggatgaattcaccatttgcataaatcgcaccttgctgataaacgattgacgccgctgaacctgtattaatcattgaattcgtcgttttaccaaagataataccaggaccacctgttgccatgatgacagcatctgaaccgaatgattgaatttctgatgttgtcatattttgagcaacaatacctcttgcagcatcttcttcgtctttaacaatacctagaaattcccatccttcgtatttagttactaaaccatctacctcaaatgaacgaacttgctcatctaatgcataaagcaattgttgacctgtcgttgcgccagcaaaagctgttctatgatgtagtgtaccgccaaaacgtctaaagtctaataagccttctttcgttctgttaaacataacccccatacgatctaacagatggatgattttaggtgcagcatcagccattgctttgactggtggttgattagccaggaagtctccaccataaacagtatcatcaaagtgaatccacggtgaatctccctcacctttagtattaacagcaccatttatgccaccttgtgcacaaacagagtgcgaacgctttaccggtacaatggaaaataaatctacatgtgcaccttgttctgccgctttaattgttgacatcagaccagctagtcctccaccgacaacaataatttttttctctgccatagaaatgtcactcccctgaatatttaaatctaaagccctacttttaatttcagatataaactaaatacgaaacagttaatttttaacgtttcataatttctaagtagtaaatttatctatactcgcttgtttcaaaatgaaaattcgtatacttatataaacgcaataacggctgcaacaccaatataagaaatcactaaaaatactatgagtgaaatccaagtaaaaacacgttgtgattttttagattgtaaaaagccccatgttacacaaaatgaccataaaccattagcaaaatggaaaacaacagcaatgacacaaataatgtaaaagattgcccataacggatgttgtaatgtttcatgcattagattatagtccacagatttaccataaaaagctttttgcaaacgtgtttgccataagtgcattgcaataaaaacaaatgctaaaataccacttacacgttggaagaaaaacatccagtttctaaataatgagtaatgcccgatgttctccttagcagtgaatgcgatgtgtaaaccgaacaaaccatggtataacaatggtatataaataagtataaattccatcacaataaggaatggtaaagattccataaatcctgaagctctattaaaagcttcagcaccttgcgttgcttgatggtttaccattaagtgtacaattaaaaatgcacctatcggaataacccctaataacgaatgtaatcttctaaggtaaaattcattctttgattgagccaaaaagagtcccccctgcgaaacatataatttaaattgctaattcttagaaacttgtatgcaaaatgccctaaagttttacataaaagaccagcgttgatttacttttttatttagtacttgtctatataattaatatcgacctatacacaagtaggacttaaaaaagtaaaaagccagtcattgagcagaaagtttaaaagttttggaaatctattagttgtgacaatcaacatgaagtgataactcttcttatttagaaaacgcttccatacaactttaaaaaaattagcttttgttacgtacattgtaacattaatttcacaatttttgggcatgagaatgattctcatgcccactttttaataattatttgttttgtaacgcgttttgaaggtttttagcaaccttttcaggcaagcctgcttgtcgtaattcatcaaaggatgcttctttcattttcttaatcgatccaaatgtacgtaataatgaagtttttctcttagttccaataccatcaatgtcatctagaacagatttcagacctgttttttgacgtgtttgtcggtggaatgtaattgcaaatcgatgaacctcatcttgtatgcggtgtaatagataaaatgcttggctgttcttttttaaaggtactatttcagcacttgctccataaagtagttcagatgtttggtgtttatcatttttttgtaaaccagcaactggtatatctagcccaagctcattttcgagtacatccatcacaccattcatatgacctttcccaccatcaactattattaaatctggtagaggtagcccctcgttgagtacacgtgtatagcgtctacgaacgacctctctcatagatttataatcatcaggtccttccactgttttaatcttatattttcgataatcttttttatgaggtttgccatctacaaatgtaaccattgctgaaactggatcaacaccttgaatatttgaattatcaaaagcttcaattcttattggtgtttggatacccatacgctctcctaattcttcaattgctttgattgttcttgactcatctctagcaattaattcaaatttattatcgagttgtacttcagcattgtgattcgctaaattaatcatgtcttttttagctcctcgtactggttgaacaatcttagtatctaccactgactgaatgatgtctttatcaagatttttaggtacatgaacttccttaggtaatagatgctgatttaaactataaaattgacctataaaagtataaaattcttcttcctctgtttgttgtaacggtatcattgtagcatcacgttttatcatattaccttgtctaacgaagaagacttgaacacacatccagcctttagaaacactataaccaaaaacatctctaattgtattatctgaagacataatcttttgttttttagttaaattgtgaatgtgttgaatcatatctctatattcttttgcttgttcaaaatctaactgttcactcgctttattcatgcggtcttctaaatgatgcaatattgttttatcttccccatttagaaagtccgtaatttcttttgtcatttgagcatacttctctaaatcaacatcatagacacacggtcccatgcattgtccaatatggtaataaagaaacagcttatctggcatattatcgc

SEQ ID NO: 3596 - DNA, 3432 bp, Artificial Sequence
  Description of Artificial Sequence: synthetic nucleic acid sequence
agcaaattgtaccctcagataccattccagcttcttgaacagcttcattcgctactttcatttgatcaacccagttcaatgagtcgaatatacggaaaacatctacaccagcttttgcactttcatgaacgaatttcttaattacattatcaggatagtttttataacctactgcgttcgaagctcgtaataacatttggaataacacattcggaatggctttgcgcaatctttctaaacgttcccatggattctctttcaagaaattataggcgacatcaaatgttgcaccaccccacatttctaatgaaaaactatctttaaaaacttcagcagttttagatgcaatgttcatcatatcttttgttcttacacgtgttgcaagtaaagattggtgtgcatctctaaatgtagtatcggtaattaaaacatcttcttgttctctaacccaatttgtaacacctgttggtccatgttgctcaagaatttgttttgttccaaataactgattgattttcttttgagaaatttttgggattttggtagattcatattctggttttggacgcttttctacattaggaaatccgtttatcgtcacattaccaatatactctaaagtcttggtacctctgtccaatgtcggtgcaatatcgaaaagttcaggtgtttcttcaataaatttagtagtataatcaccacttctaaatttatcattacgcataacattgatgagaaatggaatattcgtctttacgccacgaattcgcatttcgcgtaatgaacgttccattttctcttcagcttgtttaaatgaaacggcatgtgtagaaagcttaactaatagtgaatcgtagtaaggtgaaatttctgcaccttggaatccatcccctgcatcaagtctcacaccaaaaccgccacttgatcgatatgcaataattgtgccagaatctggcataaaatcattagtaggatcttcagttgttatacgacattgtatcgcataccctaatgtttgaatttcattttgctgtggcatagagattttatctccaaataacgattctccatcagcaactaaaatttgcgttttcacaatgtctataccagtaatcatttcagtaattgtatgctcaacttgaacacgtggattaacctcaatgaagaaaaattcatccccagaaactaaaaattctactgttccagcgttgacgtattttatattttccatcagttgaattgcggcatcacaaattcgctctcttaatttgttagaaagacctactgaaggtgcaacttcaacaaccttttgatgacgtcgttgtacggagcaatctctttcatacaaatgaatgatattcccgaattcatcaccaataacttgaacctctatatgctttggattatcaatatatctttcgatataaacttcgctattaccaaatgacttttcggcttctgatttcgcacgatggaaagcgtcttctaattcgcttgattcacgaacgattcgcatacctttaccaccgccaccgcttgtggccttaatcataagtgggtaacctgcttcattagcaaactgttctgcagcttcaaaactttcaataggaccatctgtacccgggattacaggtaagttagcgttaatagcagttgttctagccttaaccttatctccaaacatgtctagatgttcaagatgcggacctataaatttaatgccttcctcagcacatcggcgtgcaaattgttcattttcacttaaaaaaccatacccaggatgaattgcatcgacacctgcgcgaagagctacttcgatgatacgttcgatattcaaataactttcagcaggtcctaaatcacttccaactagataggattcatctgctttatatctatgtaacgaacttttatcttcattagaataaattgctactgtactgatatttaattctgctgccgctctaaaaattctaatggcgatttcaccacggttagcaacaagtaatttctttatttgtttcaaaagccaagacaccccttagaatgttacgaattttctaaataattagataataaaattttatctcaaatgtttgaataattctatagtaattcatgaaagaatcatatcatttatcaatttgtaacatttaattaaataaattagttcaaactgactacactatgtgtaagttaagttgtcagtcaattacaagaaaacttataaatgttaataatttaatattatcatctatatacgaatgacgctagttaaagtatgcatatttacagaatcttaaattatgataatgagtagtgactaactataccaaacattatgatatgaaaagcccaagaggaataatttacattcatcttgggctatagtctaaacttaatattaaaattttatatactatttaattaattatatcgacgtttaatatctaccttacgttgtttcagtcgtttatcatcttgttttatctgttttgctgtaataagtagtaatcccatagctatacttaaactaatcatcgatgaaccaccaaaactaataaatggtaacggtacaccagtaagtggaattgtagcagaaataccaccgatatttacgaatgtttggcttccgatataactagctatcccaacgcaaactaatttataaaaatacgattgcgttttattagcaagttggaaagcgcgatatacaataaagtactctaaaattaaaacgattaagccaccgattaatcccatctcttcacaaataatagcaaatataaagtctgtatgtggctctggcaaataaccaagcttcataatactatttcctagaccacgtccgaacaacccaccattgccaattgccaaaagagaattagaaatatgatatcctgtgcctgattcttgactaaatggattggttaacgtactaaaacgtgcttgcaaataacttggaaccatatctaacatgaacataaatgtagctacgatgataaaaccaatagctaccaaagcgccccattttaacatattctgcacaccgatacctgagtaaaaaataattgagaagaatatgatcacaatcagcattgtttgaccaacatctttttgaaaaagaacaagtatcaaacaagttacaacaaacaaaattggtcctaatattaattttatattatgcctcaccgcaggcatcttcttttcaatcataaatggtatgtatagaattattgaaatcttcaataactccgaagcttgtaagttcatgaaccctaagttaatccaacttttagaaccattgatattttttcctattactaatgttagtagtaaaagtataaaaataccaatcatcatacctttttgaacattaggcttttttaatactttaacattcataataaaagccataaaaaatacgataac

SEQ ID NO: 3597 - DNA, 3961 bp, Artificial Sequence
  Description of Artificial Sequence: synthetic nucleic acid sequence
gatgatgaaatcgtcgatgtaaatgaagtgcctcaattggataaaaataaaaatcacacaattgaagttgttgttgatagacttgtagttaaagatggcattgagacgcgtttagcggactctattgagacagcacttgaacttgctgaaggtaatttaacagttgacgttattaatggagaagaacttaaattctctgagaaccacgcatgtcctatatgtggtttctctattggtgaattagaacctagaatgtttagtttcaacagtccgtttggtgcgtgtccaacttgtgatggtttaggtcaaaaactaaaagtagacctagatttagtcattcctgataaaaataaaactttaaatgaaggtgcaattgaaccatgggaaccaacaagttcggatttttatccaactttattaaaacgtgtatgtgaagtctacaaaattaatatggataagccatataaaaaattgactgatagacaaaaaaatatacttatgaatggttctggagaaaaagaaattgaatttactttcacgcaacgaaatggtggtactcgtaaacgtaaaatggtttttgaaggtgtggtacctaacattgaccgtcgttaccatgaatctccctctgaatatacacgcgaaatgatgagtaaatatatgacagagttaccgtgtgaaacttgtcatggcaaacgcttaagcaaagaagcgttatctgtatacgtaggcgactataatataggtgaagtcgttgaatattcaattaaaaacgcgctttattatttcgaaaatttaaaattaagcgaccaagataaatcgattgcagatcaaattttaaaagagattatttcaagattatcatttttaaataatgttggtttggaatatttgactttagatcgctcatcagggactttatctggaggggaagcacaacgtattcgtttagcaacacaaattggttcacgattaaccggagtactatatgttttagatgaaccttctattggattacatcaaagagataatgatagattaattaatactttaaaagaaatgcgtgatttaggtaatacacttattgtcgttgaacatgacgatgatactatgagagcagctgattatttagttgatgtgggtccgggagctggtaaccacggtggagaggttgtctcaagtggtacccctaataaagtaatgaaagataaaaaatccttaactggtcaatatttaagtggaaaaaaacgaattgaagtccctgaatacagacgagaaatcaccgatagaaagattcaaattaaaggtgctaaaagtaataatttgaaaaatgtaaatgtagacttcccactatctgtcttaactgttgttacaggtgtgtcaggttctggtaaaagttcactcgtcaatgaaattttatataaagcattagctcaaaaaattaataaatctaaagtgaaacctgggaattttgatgaaattaaaggaattgatcaattagataaaatcattgatattgatcaatcgccaataggtagaacaccacgttctaacccagccacatacactggtgtctttgatgacataagagatgtctttgcacaaacgaatgaagctaaaatacgaggttatcaaaaaggtagatttagttttaatgtcaaaggtggacgatgtgaagcttgtaaaggtgatggaattataaaaattgaaatgcattttttaccagatgtctatgtaccttgtgaagtatgtgatggtaaacgctataatcgtgagactttagaggtaacatacaaaggtaaaaatattgcggatgtattagaaatgactgttgaagaagctacgcatttctttgaaaatattcctaagattaaacgtaaattacaaacacttgtagatgttgggttggggtacattactttaggtcaacaagctactacattatctggtggcgaagcgcaacgtgtaaaactcgcatcagaattgcacaaacgttcaacggggcgttctatttatattcttgatgaaccaactacaggattacatgtcgacgatataagtcgtttattaaaggtattgaatcgtatagtggaaaatggtgatacggtcgttattatcgaacacaatcttgatgttattaaaacggctgatcatattattgatttaggtccagaaggcggtgaaggtggaggaacaatcatcgcaactggtacacctgaagagattgctcaaaataaagggtcttacactggtcaatacttaaaaccagtattagagagagacagcgttgaatagtaaggtgtatgactagtaataaaatgatagattaacttaaaaagctttaagatgacttttacacaaagaatcttagagctttttatattaaattaatttcattaatttgagcataaatcatcaaatagttatttgaaattcgatttagattattatttaaggtatattttttaactcaatcagtcaactactcgattgtaaaatggagataaaatctagtttgtcttaaaacagtaatgatttaagaaacttttaaaattttaaatcatcattttaatataaaacatgtgttgatttttgatatgataatagaaaaggaagatacgaatggcttatgaaatttgaggtgaatgcatgttaacaacagatagattagttaatacgttaaatttagaattacttactggtgaagaaggtttagatagaccaattaaaaacacagatatttcacgtccaggtttagaaatggctggatatttttcacattatgcttcagaccgtattcaattattagggacaacggagttatcattttataatttacttccagatgaagagaagaaaggaagaatgagaaaattatgccgacctgaaactccagcgattattgttacacgtgggttagaaccacccgaagaacttatacaagcatctcaagaaacgcatacaccaattattgttgcgaaagatgccacaacgagtttaatgagtaggttaacgacatttctcgaacatgaactcgcgaaaactacttctttgcacggtgtacttgttgatgtttacggtgtaggtgtactaattacaggagattctggcattgggaaaagtgaaactgcattagaattagtcaaacgaggccatagattagtggctgatgataatgtagaaatcaaagaaattactaaggatgaacttgtagggaaaccgcctaaacttatcgaacatttgctagagattcgtggtctcggaatcattaatgttatgactttgtttggagcaggatcaatattaactgaaaaacaagttcgattaaatattaatttagaaaattggaataagaataaattatacgatcgtgtaggtcttaatgaagaaacattgaaaattcttgatacggaaatcactaaaaaaacgataccagttagaccagggcgtaatgtagcagtaattattgaagtagctgctatgaattatcgtcttaatatcatgggtattaatacagcagttgaatttaatgagagacttaatgaagaaatcgttcgaaatagtcataaaagtgaggagtaacacacatgaatataacattaggatatatcgatcctgttgcctttagcttgggaccaatccaagttcgatggtatggaattattattgcttgtggtatcttacttggatacttcattgcacaagcagcattgaaacaggttggattacataaagacaccttaatcgatattatattttatagcgcgattgttggattcatagttgcgagaatatactttgttacatttcaatggccatattacatgaatcacttgagtgagataccaaaaatttggcatggtggtattgccatacatggtggcttaattggtggacttatctctgggattattgtttgtaaaatcaaaaatctacatccgtttcaaataggagatattgtggc

SEQ ID NO: 3598 - DNA, 3827 bp, Artificial Sequence
  Description of Artificial Sequence: synthetic nucleic acid sequence
agataacattgaagggagataatatcatgaaatttgctgttatcactgatattcatggaaactttgatgcgcttcaaactgttttagatgatattgatagtagagatgatatcgaaaaaatttataacctaggtgataacatagggattggacatgagacaaataaagtactggatactatatttgaccgggatgatatggaaatgattgcaggtaatcatgatgaagctattatgtcactcgtcaatggaacaccttatcctgaagatttaaaagggaaattttatgagcatcatcaatggatagaaggacatttagatgagtcctattacgatgaaattaatcaattgcctagatatattgaaatgaccataaaagggaaaaagattttatttattcattatgaaattgaaaatgataaaatgtcagctcctattgatgaacaaccttttgcacctattacaaaagatgacgaacaagctatttctgaattatttaaagacaaagaagccgatttaattttatttggacataaccataggttgcatatgtttgatgataaatcaacagtatattttaatcctggatcagtaggtttgaacaatggttcaaacaccgtatatggtattattaccgttaatgaaaaaggaatttcagtagagagagtgaaattagcgtacaataatgaagaatttttagcaggatttgaagaaaagcaagtaccagctagagaatttattggtggctgcgtttaaatctacactagaagaagctaaaggtgcagacgtacttatgcatgtcgtcgatgcaagtcattcggaataccgtactcaaattgacactgtaaatcaaattattaatgatttagatatggaccatattccacaagtagttatttttaataaaaaagacttatgtaacgaacagatggatgtacctgtatctaaatctgcgcatgtttttgtatctagtcgtgatgaaaatgataaacaaaaggtgaaaaatttagtaattcaagaaataaaaaatagtctcagcccatacgaagaaattgtagatagtgctgatgcagatagattatattttcttaaacaacacacgcttgttactgaattaatatttgacgaaacacaagcatcttatcgtatcaaaggatttaaaaaattataaaaaggaagacagattatgcaagattttagcaatttagttgaagaagttgaaaacacacttattccttactttagaaaaattgaaaagcgtgcattatttaatcaggaaaaggtcttaaatgcttttcaccatgttaaagctagcgaaagtgatttacaggggtctacgggttatggatatgatgattttgggagagaccatttagaacaaatttatgcgcacacatttaaagcagatgacgcacttgtaagacctcaaattatttcaggtactcatgctattactttagctttacaaagtacgttaaaaaacaatgatgaactactttatattacaggtagtccatatgatacacttctagaagtcattggtataaatggcaatggtgttgaaagtcttaaagaatatggtgttcgctataatgaagtcgaattacgtgacggtcgaattgatattcctaaagtcatcactgcaattaatgacaatacaaaagttgtagcaattcaacgatcaaaaggatatgatcaacgtccatcaattacaattaatgaaattgaacaagcaataacatctattaaagaggtttatcccaatatcattatttttgttgataattgttatggagaatttgtagaagataaagaaccgattgaagtaggtgctgatttaatcgccggatcattaattaaaaatccaggtggaggtttagctaaaattggaggatatattgctggtagacaagacttaattgaacgctgtggttatcgtttaacagcaccaggcattggtaaggaagcaggagcctcacttaattctttacaagaaatgtatcaaggattctttctagcgccacatgtggttagccaaagtttaaaaggtgcactgtttactagtttgttattagaaaaaataaacatgaagacctcccctaaatataatgtttatcgtacagacttaattcaaacggttcaatttgagaccaaagagcaaatgatttcattttgccaaagtatacaacacgcttcaccaattaacgcacattttagtccagaacctagctatatgcctggatacgaagatgatgtcatcatggctgcaggtacatttattcagggctcgtctattgaattatccgcagacggacctatacgtccgccttatgaagcatatgttcaaggtggtttaacttatgaacatgtcaaattagctgttacacgtgcggtgcaacatatgcaagaaaacaatttactataatttttaagagattgagatcaaagtataaaaggttgggctcaatataagaatatagaataaaagcattctcgtataattcattaaaacatcaaggaaatatgatataaatgataacgatgttataaggagtttgttttagataagattttcgactccccaaaagtaataggtatagagagaatggaccatgttctagccttattcttagagttgttacgcctaagataaaagtttttaagcttagttatactttgaaaagcaatctctttttatttcaaacattataaaatgtctgaaaattataaaaaattttgtgtcataagccattttcatttctaattttaattaattactaataactaaacattgatataataaggtttagagggtttatgtcagaaaaccttacataattttgtaattaaagtaaaactatgctaaattaataacaagttcaaaagtagaggagaggttcaagtaatgtctaatgattcaatcagacgaaacatggccgttttctctatgagtgtggttagtaaattgacagatttatcaccaagacaaattcgttactatgaaacacatgaacttgtgatgcctgaaagaacagatggaaataagagattattttctatgaacgatttagagaggttgttagaaataaagtctcttatcgaaaagggatttaatattagaggtattaaacaaattatattcgatgagcaagggcatttaactactgatgaacaagagacaagaaagagaatgattgttgacgcaacgcagaaaccacgtagtgaaacattaccaataaatcgcggcgatttatctcgatttattaaatgaaattggaggatttataccatgccaaaacgtagttttacaaaagatgatattcgtaaatttgctgaagaagaaaacgtaagatatttaagattacaattcactgatattttagggactattaaaaatgttgaagttccagtaagtcaattagaaaaagtattagataatgaaatgatgtttgatggttcatctattgaaggtttcgttcgtatcgaagaatcagatatgtatttacatcctgatttagatacttgggttatcttcccttggactgctggacaaggaaaagttgcacgactaatctgtgatgtatttaaaacagatggtacaccatttgaaggtgatccacgagctaacttgaagcgtgtattaagaagaatggaagatatgggctttactgattttaatctagggcctgaaccagaatttttcttatttaaattagacgaaaaaggcgaacctacattagaattaaacgatgatggtggttatttcgatttagctcctacagatttaggtgaaaattgtcgccgtgacatcgttttagaattagaaga

SEQ ID NO: 3599 - DNA, 3090 bp, Artificial Sequence
  Description of Artificial Sequence: synthetic nucleic acid sequence
tcccgatacaaatattattattaatttcttcagcttatgcagcattgattgcacatagagtgggattaaaatggaaggatttagaagaggggattactcatcgattgagcacggcgatgccagctatctttattattttagctgttggaatcattgtaggaagttggatgtattctggaacagttccagcgttaatttactatggacttaaatttttaaacccaagttatttattagtatctgcatttataatcagtgcaatgacttcaatcgctacaggaacggcttggggatcggcatctacagcaggcattgcactcatatcaattgctaatcaattaggtgtgccagcaggtatggctgctggtgccattattgcaggggcggtttttggtgataaaatgtctccattatctgatactacaaatttggcagctcttgtaactaaagttaatatttttgctcacattaaatcgatgatgtggacaacaatccctgcttcaataataggattggctatatggtttattgttggattacaatataagggagacgcaaatacacaacaaattcaaaatctattaaaagaattaacaacaatttataacttgaatttttgggtatggatcccacttattatcatagttttatgtttaatatttagaatctctacagtaccgtcaatgcttatctctagtatcagtgctttagttattggaacattcgatcatcaatttaatatgaaagatggttttaaagcttcttttgatggatttaatcatacaatgctacaccagtctcatatttcagataatgctaagacgttgattgagcagggtggtatgatgagtatgactcaaatcattgtaactatattttgtggttatgcttttgctggtattgttgaaaaggcaggttgtttagacgtaattttagagacaatagctaaaggcgtaaagtcagttggaacactaatattaataactgtagtttgtagtattatgctagtatttgcagctggagttgcttcaatagttattattatggtaggcgtacttatgaaagatatgttcgaaaagatgaatgtctcaaagtcagtgttatctcgtacacttgaagattcaagtacaatggtattgccactcattccatggggcacatctggtatatattatgcacaccaacttaatgtttcagttgatcagttctttatatgggcaatcccatgttacttatgtgcattcattgcaataatttatggctttacaggtataggaattaaaaaaataagtagaaaataagtttaaatattattgtaagtggaatgtagataatagttgaaacattaacttacgatataaattgtagctatagtatcataaggcgtttcaagtttgttaatatcctttaagtacatatcatgtatttgttatgtagcgaaataaatgcatgacagtacacgacgaattcttttgacactatttttgagatgacataattattgagaaaactaccacaacaattgaatttgtttaaagttgtaattgaggttaaagcgtttattaatacgttttaatctcaattttttaatatctataatcatagagcgtcgatgtattgttttaatcttatataaagaaaaatggttctacactgtataagttgataaaatactgcttaaaaaatacctgagacattgattatcattgtctcaggtatttgactatgttatacaagttttatatgtgattagtgaatatagttatatgaagcagcttgactcgcagagattgtacgtgaagtgacaacacctgcaccgtgaccgtagttcatttctgaaactctgattgaaccattgctgtttacaccttcaacgtatgctacgtgtccgtatgcaccttgtgacgtttgtaagattgcacctttagcaggtgaattgtttactgtgtaaccagaacgtgctgcagcgtttgcccagttgtttgcgttaccccacgttgaaccgattttgccacctactctgtcaaatacataatatgtacattgacctgaagtgtataagttaccagatgctgagcgagcgtttgataaagatacaccgtttgatgatggcgcagaagttgttgtaacgtgaacattactacttgatgttgaatagcttgcgcctaaaccaccagtcggttgagttgttctttgtgattgcgtgttgtttgattgatagttgttgtaattgttgtaattactgtagttattgtagttgctatagttattgtaaccatagtagttgtagttattataattattatagttatatgaagtatttacacgatctggactccagttacctttccaagtgtagtggtagttaccttcagcatcgattgtgtaagtgtagctatatgaataagggtcgtttggattgtacccatcattattttgttctgctgcttgtgcgtcatggtgtgcaaatgcgaaagtagcgattcctgcagttgcaattgtagctgtagcgatttttttcattgttaaatatcctcctaaaaattaaactagttttttataattaataatcatgtgatcaatgagttacaaaataaatttttattcgttcttgtttaacgacaagccatactctaacagaaaaattgatgtttgtgtgcattgttattgatttgtaattttttgctaatattgttacacaatctcatttaacccaattaatttatgtaatatgaatagaaatgatacgctcagcttttttaaagtattttattttgagcaacacaaacactgttacatgaatgtaaaattactgaaaattctccactatacacttaatttcaaatcgaaatgttctaaaaataatctaaatattaagtaaccaattatgaaacaattatatatcatacttaaatttatttaaacttgtaccaattactaactatcaatggttacctaaatgatgcacatgagataataaatatatataaagtatttatattaacagtcttatcgatatatgaatgtcattttgagaattagcagcaaaaatttattaaaagtgttgtcttatctttcaaaacaaaaaat

SEQ ID NO: 3600 - DNA, 3285 bp, Artificial Sequence
  Description of Artificial Sequence: synthetic nucleic acid sequence
acgaatataacgattgaaaatgacttgttgtgatttaatataagcaatttttttcttcaccaattttaataataaattgtcatatacatagttcatgcaatccatataaattatttcccaaagtaaaaaagaagaaattgtgacgcttatttgaagttatccacttatacacataatttctcgcaaaaattgtggataacacatgcgctatacacacagttattcaaaatttaacaacatattcacagccatttgacatcacttggagttaaaaagtataattatgtggataagtcgttcaaattatgattttacaaggatttatttattaaatttatatacataaatggtgtgcataaatcatagttatgtttaagttatccactgattgtgattaacttgtggataattattaacatgctgtgattatttttatccacctatgttatttctgtgtataagtctaaaattttaagaaagatggagttatttatgtcagagaaagaaatttgggataaagttttagaaattgcccaggaaagaatttcaaacactagttatcaaacgttcataaaagatacgcaactctactcacttaaaaatgacgaagccattatattagtaagtctgcctttcaatgcgagttggcttaatcagcgatattcagaaattatgcaggctattatttatgatgtcatcggttatgaagtgaaaccacattttatttcagaagatgaacttgcatcctacaacaatgtaaatacacaagaagttcaagaaccccaagtacaacattcttctatagatgataagacttggggaaaagaacaatttaatatgcacaatacatgcatggtttgaaagtaaagggagagcataaaacgctctaaagcttagactattaccatctattaatactaatttattcaaaatacgtaacctccagaacagatttacatatattttagcatatatacaaatacataacgagtaagcgagtttagtattcactacgcattagctattactaatatttaacttataaatgctaaagaaatattaagttaaatgtttcttaaaaaatttccactcatcttatgtctgtcaatgacaagatgtattttgattttaattaatagcataagtcttaacattatatttctaaataatcactacaacaaaggacaccacattgtctgtaccgacaatgtagtgccctcaaatttaattatcattaaatagaactttgaatatcgaacctttgccaggtgcacttttcacgtctattctaccattatgtgcttcaacaatatgttttgttatagacagaccaagtcctgtaccacctgaatctctacttctcgctttatctacacgatagaaacgttcaaatatacgcttttgatctgtttcacttataccaataccataatcttgaatctctaaataaactttattgtcatttctatatactcttactattaccttattatcttctgaagaataatttatagcatttgatagcaaattagtaataacttgcgctattttattttcatgtgcctcaatgatgacatctttttcaatttcagattgtattttgattctcttattgtatgcttgtgtttgcaaattatctattatattaatagctaattcagataaattcatgtaatttatttcaagttctttttgctgttctatatgtgataaatctaataagtctgtaaccaatgactctattctattagattcttttaaaataatatttaaaaacatatcaagcgattgttcatcatttttagcaccttcaatcagagtttctgcaaaacctttgattgaagtaatcggtgtttttagttcatgtgacacatttgcaacaaattcccttctaaggttttctaatttctgcaaattagtaatgtcatgaagcacaaccaccataccttgtaaattttttttagatttagttaaaatggggatacaagatacatcgaaatatttagtatgtacgttattaatagcaacttctaattgttcatagataactttttcagttctaaaactttcaataattaatttttcaatactatcatctatgaaaccaatgtaacttttattttctaccatttgatcagggttaaacacctgataataagcatgattagcaactacaatttctccatgtttatcaatcatcagtactgaactcggtatattttctaaggtagtttttaatctattggattgaattttttgactattgtttaatttttgcagccattaaatgagctgttgaatgacgaagtacttctaacgcttcttcactcccaggagtaataatttcaatagctccatcttgttctaaagggcgtgttaaatctacaagttgaccattgaattttcccgcaactgctttttttcttaatcctggactaattgattgagcgatgtcttctgtagtagtccctttatcaaattcttttgtattaccatctggaaattgaatattaatttgattcatattttttcctcctatttaataaaacatctgatcgttggcttattgaataaattaactttactgagcataaaaaaactcgtccctagcaagggacgagtttgtcgtggtaccaccctagttaagtatatgaaaagcatacgtgaccagtcatatactatactttacataagataacggtcttgagccggatattcattacaaatatcaatattaacgaagtagtaataatttaatgtgttagccatattctcatcaattaatgactttctgtgtaacagagattaaattatcgtatcttcaatagtttcaacgattaagatttatctctattatacaccacatactataaaattcaattgtttctaaaatttttaccagtcaaataataaggtgtcgataaagtcttaattctttcaataattcgtgctgctttagtcttttcagtgccatctctagttattgaaagatgatgctcaagctcactataattaaagttagaactaaaaaatgtaggaagttcatgtaccattctataatgtaataaaggaccaatcacttcatctcttacccacggtgtgacttcttctgcgccaatatcatctaacatcaaaatattagcttctcgcacacgttgtaattttttctcaaaactaccgtctttaaagccaccttttaaagtgcgaataaattctggtaaatatacaattgttgatgaaatcttttgcgatttaagttgatttgcaatagcacccaatatgaat

SEQ ID NO: 3601 - DNA, 3096 bp, Artificial Sequence
  Description of Artificial Sequence: synthetic nucleic acid sequence
agatggtcacttggttgctatgcatgacgaaaaggtcaatcgtacaactaatggccatggacgtgtcgaccaacttactttaaaagagttaaaacaacttgatgcaggaagctggtttaatcgaaagcaccctgaatatgccaaaaataaatataaaaatgctaaagttcctactttagacgaaattttaaatcgctatggcaaaaatgcaaactattatattgaaactaaatcgccagatgtttatcctggcatggaaaaacaattattagatacattagataaacatgacttgttaacacaaaaatcacttaaacatggacatgtgatgatccaatcattttcagggagtagtttagaaaaggtacatcacatgaacgccaatataccacttattagactaatgaataaatttgaacttaaaaaagctactaatcaagatttaaaaaatattaaatcttatgccattggagtaggtcctgaatacacagatttaaatattaagaacacaagacatttaaaaaatttaggatttttagttcatccttatacagttgatgatgaaaatcaaatgagaaacttaaatcaatatggtgttgatggtgtattcactaattttgctgatagatataaaaaagtttcagaaacacaacaataaaatattagcgttgagttgaactgacttcatattgattttatcgtcgcattttacttacaaacatttgagaaagtattacttttaacattaactcacaattaataaaattatcaattgcataaacatgatagaaaccctaagactatcatctgatgtcttagggtttctatcatatacttataatatttttcttatgcccaacctctatatcttgctgcttcagcagtacgtttaatacctactatatatgctgctaatctcatatcaatttttctattttgtgacaattcataaatcgtatcaaatgctgttactaacttctcacgtagtttgtcattgacttcttcttcagtccaataataaccttgattattttgtacccactcgaaataagatacagtcacacctcctgcacttgcaagtacatccggcactagtaatatatctctttctgttaaaatacgtgttgcttcaggcgtcgtagggccattagcagcttcaactacaatgcttgctttaatatcgtgcgcattatcttcagtgatttgattggaaattgcagcaggaacaaggatgtcacaatccaattcgaataattctttgttagaaattgtatcttcgaatagatttgtaactgtaccgaagctatcacgtcgatctaataaataatctatatcaagtccattagggtcatgtaaggctccatatgcatcacttataccaactactttagcacctaaatcgtataagaatttagctaagaaactacctgcattgccgaaaccttgaatcacaattttggcatctttaatatccatgccacgacgttttgccgcttgttcaattgcaatgactacacctaaagctgtagagcgatcacgtccttgagatccacctaatacaataggtttgcctgttataaaacctggcgaattaaatttatctaatgcactatactcatccatcatccaagccataatttgagagtttgtaaaaacgtctggtgctggaatatctttgttaggcccaacaaattgagatatagctcttacataccctcgagatagacgctcaacttcgtgtatactcatttgacgtggatcacaaacaataccgcctttacccccaccataaggtaaattaacaatgccacattttaaagtcatccacattgataatgccttcacttcttcttcatcaacttctggatggaaacgaacgccacctttagtagggccaactgcatcattatgttgtgcacggtatccagtaaatgttttaactgtcccatcgtccattcgtactggaatgcgcacttgtaaaaatctaattggttcttttataaggtcatacataccatcatcaaagcccaacttgtgtaatgcttctttaataatcccttgagtggaagttactaaattattattctcagtcatgatcctattcgcctctttttactaaatgatttcgctttcattcgtaattgtaacacaattgaaagcattttaaagattttctaaactaattgttacaactatttgaacctatgcaaatacactcttaatcttctctaaagccatgtctaactcttctttcgttatcactaatggaggtgcaaatctaataacggtgtcgtgagtttctttacataataatccttgttctttcaaagcttcacaatatggtctggcactttcatgtaattcaataccgataaataatcctcgtcccctaacttctttaatagatggatgctcaatttttttcaattcagacttaaaatattctcctaattctaatgaacgaccaggtaaatcctcgtcaataatgacatctatagctgcaatagaaactgcactcgctagtggatttccaccaaatgtagaaccatgtgagccaggagtaaatacatctaatacctcattatctgcaagaactaccgagataggaaatacccctccacctaacgcttttcctaaaatataaacatccggttttacatgatcccaatccgttgcaaataattttcctgaacgtcctaatcctgcttgaatttcatcagcaataaataaaatttgatgttcatcacataattctctaattgttttcaaatatccttctggtggtacgttaatccctgcttctccctgtataggttctactaaaattgctgctgtatttttattaattgctgcttttaattgattaacgtcaccaaactcaacttttcgaaagccatctaacaatggaccatagcctcgttgatactcagcttctgaagacaatgatactggtgccatcgtacgtccatggaaattaccattaaaagcgataatttcagctttgttcggctcaatacccttaacatcataagcccaacgacgagcagcttttaaagctgtttcaaccgcctctgctcccgtattcataggcaatgc

SEQ ID NO: 3602 - DNA, 3081 bp, Artificial Sequence
  Description of Artificial Sequence: synthetic nucleic acid sequence
gacatcgggatcatgttcaacaattaacacagtattacctttttcttttaatgattttaaaatttcattgattttagctatatcttccggatgcaagccaacacttggttcatctataatgtaaactaaatccgataaagaactatttaaatgacgtattaatttaagccgttgcgcttcaccgcctgataatgtcgttgtgacacggttaagcgttaaataacttaatccaatatattctagtgcttctaactgctttttgagaggatcaataatatatttggctgttggatcctctaatttattaagaaactctaaattttccttaattgtcatttgtgtgaaatcagaaatatttttactcataattttagaacttaatattttcgagtttagacgttgacctttacatgttgaacagattttattatttactacatttttaagatgtttggcgtagcgtttcttattaaattctttatcacctaaaaatattctactgaatctaggtattagtcctacatatttagctgactttctccattctttaggaggattttttaatgtcattggctcttgatataaaaacaattctaattcatcttctgtataatctttcaattttttattattatcaaataaaccactatctcgataggctttaccacgctctttgtctggtccaaaagaaggaaagtctattgcaccttcatttaaagacttatcccaatctagcaattcatctaagttaatgtcttcaatatatcctaatccctcacaagttttacacatgcccttaggactattgaaggaatatgcatctgaataaccaacaaacggttcgcctattctagaccacagtaatctaacagaagcatatatatctgaaactgttcctaccgtggagcgagaattcccattgaatcttttctgattaatcgtcattgctacaggaagatttttaattttctttactttcggtctgggttgttgatttaaatgaaattgaatataactagaataactttcatttagtagctgttcagactccgcagcaacagtattaaacactaaagatgatttccctgaaccagaacgacctgtaaataccgttactaagtgttttgggatatttacatctatgtttttcaagttattttgtgaagcacctgtaatattaataaaatccattaattgtcctccctttataaactttataacattgattattgcatattaattaaggattaactactcattcaaaacacgacaactttaggtcttttatattacaaattattccaccaattcaatccgtcttcactaagtaatttttcactttctttaggcccatagcatccaaaggcataattaggaaactgtggctattcttgtttccatacattttcaatatcatcaataaatttccaagaatttttaattcttcccaatgcgtaaattttgtttgttctccaattaatgtatcgtaaataagattttcatatgcatcaactgtgttcattttatctttaatcggcatagtataagaaagcttcactttttgcatttcattattttgattacttttcttaccattcacacataaagaaaatccttcattaggttgtacgttgatgactaataagtttgatgcattctgttcacaattactataataaaattgcattggattttttaaactctataacgatttggatagatttttttcattcttttttctgtacgaatataaaatgtaacactagcccatttagagttttcaatttctattttacctgctacaaaagtttcagtattagattgtgaatttacattaggttcatttctatatgcaggaacgaactcattattcatcattcccccatcatattgaccacgaacgaaactttctttaatttcatttggattaaaacatttcaaggattttaagacttgaaatgttttcttttcttatatcactactttttctactaattggaggttctattgcaagtaattaaaccatttgtaataaatgattttgaaccatgaattttagggcgccgcttgattcgtagtaaccaccacgatattctatactaatcgtttctgaagaagttgcttgtatattggaaatatacttattattccaaagtggttcaaatatagtgtttcaaaatcgtagacgttcaatattttgaatcatttctttacctaaatagtgatcaattccaaatattttttcttcttaaaagactttcttatttgattatttaattttttgcagattttaaatcatcaccaaatggtttttctataattattcgcatcaccccttttacgttcgttaatccagactctttcaagtggtttgttgcaactccaaaaaatttaggggacattgcaagatagaacaatcgattttcttttaggtcaaactttgctaacgataatcctacacaagcaggagaactaacaggtgcaaatcaaaaatggttaatgagtcataacatgaatgccatgaaagataatactaataaattgcatcaagcgttaactaaaatacaacaaaaaatgcccggggatgggggagacacgcctcatcaagatatggctaaaccatataaactaacaacgcactatttatatggttcatcagattctacgtattttgatatgataaatcctattttaattggattttttgtctttttctttacgtttttaatttctggcattggcttattaaaagagcgtacttctggcacattagaacgtttacttgcctctccaataaaaagaagtgaaattatttttggttatgttttcggttatggtagttttagcgttatccaaacaatagttgtcgtattatatgcaatttatattctgcatatagacttagtaggttcgatatggttcgtactattaacggcaatattaacagcgcttgtcgctgtgacattcggtatattattatctacctttgcttcctcagaattccaaatgattcaatttataccattagtcatagtgccacaagtactatttgcaggcattataccaattgaatcaatgaat

SEQ ID NO: 3603 - DNA, 3090 bp, Artificial Sequence
  Description of Artificial Sequence: synthetic nucleic acid sequence
aaaaatactatttagagaagtagttagaacgaccagacaagcatatgaagtgctaaaacgaatgtcacgatatcaaaatgatttatatcaactaaataatcaattacttttacaaatcaaattagaacttgattcattagttactttacatgaacaaatatttaagagtctatcaaaaaaagctagatatgatgtcactcaattagattatgaagttgacaatcctcagaagaaaaacttgatggatgcttttcagcaagaattaattaaaaacccacatcagacgcaatattcttatagcaatatgatgcaaattattgctgaaattgaagaatacagatatcaacttgaacacttagatagaatccgtttaagtttctttacctatcaccgttctgatactgatatagacatttcaaatgaggactttgacttataataaaacggtaaatcagaattttattggattaatcagtgaaattctcctagttagcagttttgattataggtaaaatagttcttatttttaataactgccaacagtacaaaaatgcctgagacaataacagtctcaggcattttcaatgttataagtgctttataaattttgaatactataaagatgctcataagcaccacgtttattaattaattgttggtgtgtgccagtctcaacaattcgtccattttccattacaactattctatctgcatgagtaatggtagatagacgatgtgagtgaatttccttaaaacatttctaccagaattaattgaaaagaatgttaaaattgaaacaatagggttttatgaaggtttaccacaatctacaattgatgctattgattttgctaaagctaagactcagcacaatactgggttaactcttgtgtttgctataaattatggtggacgagctgagattattcagagtatgaaagcaatatataacgaattacaattaaacggacaaggatctgaagtgattgatgaggcgttaataaagcgtcatttaatgactcatagttatccagatccagacttattaatacgcacttcaggagaacaaagaataagcaatttcttaatatggcaagcttcatatagtgaatttatttttaatgaaaagctatggccagattttgatgaaaaagagttaagagagtgtttgaaaatatatcaatcacgccaaagacgttttggaggattaagtgaggagtaaaaaatgaaagtaagaacattaaccgcgattatagccttattaatattcttgcccatcttgctcaaaggtggcttaatattaatgcttttcgcattcttattagctttgatagccttaaaagaactacttaatatgaatatgatcaaatttttatctatacctggtctgattagtgctttagccctaattattatcatgttacctcaagattaatctaataactcgtcaaaagcgatactactagaaattgtagaaatagccgaagaaaattctggttttctgatacccatttgtgacggtgtatgaattctcactttttcactaaccatatcttgtagtaattcttttacacctagtaaatttgcagatccaccagtaactacaaatcctccgtttacttttgtaagtcctagctcttgtaaaacgtcaaagacttcaaagaatatatcctcgactctttgttcaataaagtcacttaaatctttttgagtatattgaacatgttcatctgaatcaacttgatctactgaaaagacatcttgatctgaagcagagtcataaaatgcatgaccatattgatgttttaccttttcagctgtgtcatatgtagtatttagtccttgagcaatatcatccgtaatgtctcgaccggccatttctatagattcagcatctacaagttctcctcgttcatagaaagcaacttgcgttaagtcttcaccgatatcaataacacaagcgcctaattccttctccgttggtgtgagaataaaaccataattgtacgcatcagaataaacatctaacacgtcaacaccacatgcctcaacacatttaatcatattgattaaaatagatttttggattgcgatgacacctgcatctacttttaatgaatgtcttgcaattaattctttaggatctgaaacttcattgtctttgtcaactacaaaacgaattgggaatacatttatcacttcagtttcaggcacatcatttttatcccggataccttctaaaactgattcaatatgcgtgccatcaatttcagtatcctcataaaattcaatttcatttgattcatcatatacttcggtaccgatgataggtagttttaaaaatacatcttttatatctacaccagaggcaattgaagccttcttaattgtatctttaattgcttgtcttgcaatatcaaaatcatcaattaaaccattcttgataccacttgtgtaggtttgccctgtacctatcacattaattccgttgtgaaatttttcgcctactattgtttttacgcttgatgaacctatatctatgctcacatagtaatgttcctccatagataggcacctcctgacaaattatactatttaagtacactatgtttagtgtacaatacgttgaatagcttgtgaactataaacacatactattatcgaaattttttaattattttctttagattgtttatttattttattcaacacattttgaagttcttcttttgcatcattttcttcttgtgttgacttggttacattttgttctgtacccgattgaacagttgatgaaccttgataaggaataaatgacgctccaaccgataaatcaatatagccatttgtcttaagttcgccagagtcatctctgcttaatgattgtgacatttgaggataatattgcattttgtctgcaatcgttgtaatgtcaccaataacttgcatattatctttggtgaagatttttatgcgactttgtttatttttagttggtgcgtaactcacctctgcaattaagtttctcactttaggtgacatttctgataaagcttttataattcgtgtttttttgtctcctttgaaacc

SEQ ID NO: 3604 - DNA, 4198 bp, Artificial Sequence
  Description of Artificial Sequence: synthetic nucleic acid sequence
tcaacatgcattaaagacattcaaaacaatgaaagaggaggaataatatgtctgaccctacactttttgattattcaatgatcaaaggtacagttgatgctattttatttcaaaatacggataatttttatactgttctaaaagtagatactatagaatcaaatgaaaaatttgatagtatgccaactgtggtagggtttcttcccaatgtagttgaaggcgatgtttatacttttaaagggcaagtcgtacaacatccacgttatggtaagcaattaaaggctgaaacatttgaaaaagaattacctcaaactaaagaagccattattagttacttatcaagtgatttatttaaaggcatcggtaaaaaaacggctcaaaacattgtaaatacactaggtgaaaatgctataaatgatattttaactcgtccagaaatcttagaaagtgtacctagtttaccaaagaagaaacaaaagcaaattgctgatcagattaatgcaaaccaagaatctgagaaaattatgatacgtttacacgacctagggtttggtccgaaattatcaatggctatatatcagttctatatgggtgatactttaaatgtcttagataaaaatccttaccaattagtatatgacattaaaggtattggttttaataaggctgaccaacttgctcgaaatgtcggtattgagccacattcacctgaaagattaaaagcagcattattatttacgttagaagaagaatgtatcaaacaaggacatacatatctacctcgtacaattgttatagaaacaacacaaaatttactcaatgaagatattgagaaaccaattgaaacagagcaattactagaaatcattgacgttttatcagaagagaaaaaattaatatctgaagctgatcaggtatcaattccaagtttatactattcagaattgaaaagtgtgcaaaacttataccgaattaaaacaaacacatctaaattaaaagaaatagaacagtctgatttacaaatacatattggtgatattgagtcacaaaatgaggttaattactctgcctctcaaaaagaagcgcttgaaacagcaataaattctaaaattatgcttttaactggtggtccgggtaccggtaaaaccacagtcattaaaggtatagttgaattatatgcagaaatacatgggctctcgctcgattatgatgattacaatgaagatgattatccagtagtgttagctgcacccactggtcgtgcttctaagcgccttcacgaatcgacaggtttagaagcaatgacaattcatcgtttaatcggttggaaccaagatacacaaccacaggatattttagaaaatgagatcaatgcaagactcattatcatcgatgaaatgtcaatggtagatacttggttgttccatcaatttttaagcgctgtgcctttagaagcacaaattgtatttgtcggagatgaagatcagttaccatcagtaggtccaggacaggtatttaaagaccttattgattctgaaataataccgcgtgttaatcttaccgaagtatatcgtcagcaagatggttccagtattattgacttagctcaccgtatgaaattaaatgaacctatcgatattactaaacgttatcatgatcgtagttttattcgttgtggtacgaatcaaattccagacgttgttgataaagtagttaaaagcgctgtagctaaaggctatgatatgagtgatatacaagttttggctcctatgtataaaggtaacgctggtattaagagacttaaccaagttctacaatctattcttaatccgaagcaacaagatgatcgtgaaatagaatttggtgaagctgtgtttagaaaaggggataaagtacttcagttagttaatcgacctaatgataatatatttaatggggatataggtataatagtaggtatattttgggccaaagaaaatgctctaaataaggatgtgttagttgtagattttgaaggtaatgaaattacatttactaaacaagatttaatggaactaacacatgcatattgtacatctatccataaatcacaaggttcagaatttcctattgtaattatgcctattgttagacaatattataggatgttacaacgtcccattctttatacaggattaactagagctaaacaatcacttgttttatcgttaaagagagatatacatttttatttatttttaagatttctcagaaaaattaggtttttctcatttaattttaatcttagccatttataataataagtgtaagattaagaaagctaaaaacttaatttctttaattaacaaataattttaaaataatgaattaaattcattctaaaagttcatattctaaatgttttactctatcttctaattgttctttagtatcgtccggttttatatcacattgctgttgttcaataatttctcccgtatccatcccactatctacataatggacagttgatccagttacagtatctccactttctaacgcttgacctatggcatctaaacctttgaatttaggcaataatgagggatgtatatttaatatccgtccttcataagcttgtaataagtcttggccaactagtctcatataaccagctaatacaatccactgaacttcctcactggataataatttaagtagatgctgttcatataaagatttggatgaaaagtcttttggcttgttaatatgaattggaatatttaaatttttagctctatcaatacagggtaccccttcattatctgtatacagtgccgttacattgataccagataattgccctgtttggatatgttttacaatattttcaaagttactacctgatcctgaggcaaaaatcgctatattggtcactattctacctccaataaatgaataggtgtatcatcatcttttataatctcaccaatttcatatgcagttgtatccattgcacgtaacgttgttaatgttgtttgaacatcttttttgtcaacaataattgtatatccaatacccatattaaatatgttatacatttcattcgttgaaatgttgccctgtttttgaagccaattaaagacttccaacgttgggaatgattgtgtatctatttttgctgataaacctttaggaagggcacgcggaatattttcatagaaacctccaccagtaatatggctcatcgctttgatatcaatatgtttctttaattcaagaataggctttacatacaattttgttggtgcaaggaaggtttctaaaaaggtttgaccattaaattgatcatgtaattgaactcctgattcttttatcatttttctaactagactatagccatttgaatgaataccacttgaagctaaaccaataattgcttgtccttcttcaacatttgaaccatcaatatagtcctctttctctaccgctcctactgcaaaaccagcaatatcatattcaccttcatgatacatttctcccatttcagcagtttcaccgcctataagtgccgtattggtttgttcgcaaccgtcacttatacctttaacgatttgctctatagtacttggcactactttattcgtggcaatatagtctaaaaagtataaaggttcagcacctgttgttaaaatatcatttacacacattgcgacagcatcaataccaattgtgtcatgctttccatagtcaattgctaattttaactttgtacccacaccgtcagtacctgataccagaactggcgctttcatttttaattgagacaaatcaaatgttgcaccaaatccacctaaaccacctaatacttctttgcgcaatgtacgttcaacatgacttgttattctttcgactgcttcatatcctgcttgaatatttacaccagattcctcatatgctttagacatgtaaatttccctcactatcaaaataatgtttattattagctatatatgatttttgacgttcacttaaatgctttttataatttttctcataatcgtaaagtcctgctggataatcacctgtaaaactttctacacacaagccatgatatggcgcatcataatcaagtcctatagactcgattaagccatcaacgcttaaataagcaagagaatctgcaccaatatgatttttaatttcctcaggagactta

SEQ ID NO: 3605 - DNA, 3478 bp, Artificial Sequence
  Description of Artificial Sequence: synthetic nucleic acid sequence
atggtatgttgtcagaggcaattactgtaactgaaaagccaacaccaattttcccaagattagacactgaagcagaaattgcttatatcaaagaatcaatgcaaccacctaaatcaataaaacagtctgatgaacccggtaaagagcaaattgatatcaaagattttgataaagttgaaatcaaagcagcaaccattattgatgcggaaaatgtaaaaaaatcggagaaactattaaaaataaaagttgaattagataatgaacaacgtcaaatagtatctggtatagctaagttttatcgtccggaagacattattggtaaaaaagttgcagttgttactaatttaaaaccagctaaattgatgggacaaaaatccgaaggtatgattttgtcagctgaaaaagatggcgtacttaccttgataagcttgcctagcgcaattccaaatggtgcagtaattaaatagtataatctaaggataggagagataatgatgttaatcgatacgcatgtacatttaaatgatgaacaatatgatgaggatttaaatgaagtgatatctcgtgcgagagaagcaggcgtagatagaatgtttgtagtaggttttgatacacctactattgaacgtactatggagctaatagataagtatgactttatctatggtattatcggttggcatcctgttgatgcaatagattgtactgatgaaagattggaatggatagaaagtctttctaaacatcctaaaattattggtattggtgagatggggttagattatcattgggataaatcaccttctgatgtacaaaaagaggtatttaaaaagcaaattgcattagctaaacgtgttcaattacctattattattcataatcgtgaagcgactcaagattgcatagatattttgattgaagaacatgcagaagaagtgggcggaataatgcatagttttagtgcttcacctgaaattgctgatgtcgtgattaataaattgaacttctatgtttcgcttggaggacccgtcactttcaaaaatgcaaaacaaccaaaagaagttgctaaacacgtaccaatggatcgtttgttatgcgagacagatgccccgtatctatccccgcacccttatagaggtaaacgtaatgaaccagaacgtgttactttagtagcacaacaaattgcagatttgcgtggtatgacttatgaagaggtctgtcgccaaacaaccgaaaatgctgaacgtttattcaatttgaattaactcaatgaatttttagtgggaaaggtgtctaactttaaaaagatgaggaacatcacttttttataagtttaagatatctttctcatttttttaatttaaactgaggttagtgtaagaaattatgatttgatagttattattttaatattgccaaaagattctataaaattaataattaagatatcaatattgtggaaggttaatttatgaaaataaacgaatttattgttgttgaaggtaaagatgatactgaacgagtaaaaagtgctgtagattgtgatactattgaaacaaacggtagtgcaattgatacatatactttagaagtgatacaacacgcgcagcaaactagaggtgtgattgtactgacagatccagatttcccaggtgataaaattagaaatactatacgggaacatgtttctggtgttaaacacgcatatgtagatagagaaaaggccaaaagtaaaagaggtaaaataggaatagaacatgcaaacattaaagatattcaagaagcattaatgcatgtaagttcaccacttgaagaagctaaagaaactattgataaaagtgtactcattgatttgggattaattatcggtaaagatgcaagataccgtagaaatatcttaggtcgaaaattacacatcggtcactctaatggaaagcaattattaaagaaacttaatgcttttggctatactgaagacgatgtcagaaaagcgctatttgaagaagaggagaattaaatggaatataaagatatagcaacaccatctcgaacacgtgctttgcttgatcaatatgggtttaattttaagaaaagtttaggacaaaattttctaatagatgtaaatatcattaataaaattatcgaagcgagtcatatagattgtacaacgggtgtaattgaagttggaccaggtatgggatcattgactgaacaacttgcaaagaatgctaagaaggtgatggcttttgaaattgatcaaagattaatacctgtgcttaaagatacactttcaccatacgataatgtaacaattatcaatgaagatatacttaaagctgatattgctaaagctgtagatacacatctacaagattgtgacaagattatggttgttgctaatttaccgtattatattaccacacctattttacttaatttgatgcaacaggatgtacctattgatggttttgtcgtaatgatgcaaaaagaggtaggagaacgtttgaacgctcaagtaggtaccaaagcatacggttcgttatcgattgttgctcaatactatacggagacaagtaaagttttaacagttcctaaaactgtatttatgcctcctccaaacgttgattctatcgttgtaaaattgatgcaacgccaagaaccacttgtacaggttgatgatgaggaaggcttttttaagttagcaaaggccgcttttgcacaacgacgtaaaacaattaataataactaccaaaacttctttaaagatggtaagaagaataaagaaactatacgacagtggctagaaagcgctggtattgatcctaaaagacgtggagaaacactcacgattcaagatttcgccacattatatgaacaaaagaaaaaattctccgaattaacaaattaaaatgttgacaaaggcccttcacattgataaaatttaaattttatttgacgaaaacgactcaaatatggtaaaatgtaatgtgtagtgaggtggggcaatatgccaaaatcaattttggacatcaaaaattctattgattgtcatttaggaaatcgtattgtacttaaagccaatggtggacgtaaaaagacaattgaacgatcaggggttttaaaagaaacatatccatctgtttttattgtcgaattagatcaagataaacacaactttgaacgcgtatcttatacatacactgatgtgcttacagaaaatgtacaagtttcatttgaagaagataatcatcaagaagcagttgcacactaacaaaaacataatttatgagcgtcgtcgataactctaaatttaatattttttatttaaggtgagtctggacattgaatatatgttcagactctttgttattgtagtctttatttattcccattttcatgagattatgcaacttacgtttattattaatacacaattcatttaaattaaacgaataaccatttgaataagtccaatttt

SEQ ID NO: 3606 - DNA, 3073 bp, Artificial Sequence
  Description of Artificial Sequence: synthetic nucleic acid sequence
gagcacctaaatatgcgcctagaatacctgctatattgactatagcagtacctaataatacacctattttatccttactaataagataagttgcaataataggtatgtataaaccgacaccatagtactgcataccttgtaatgttgaaatcgcagtcgccaggataattctttttatatatctcggtttaaataagtctgtccaagaattatgtggcgaagtcacatcagaacttaaatcatcttcaagcgttccctctaggtggatgtctttatgataatattttcttacaaattcagttgctttttctaaagaataatgattaatcacccatgtcggactttcgtgtaaatatttaattcgcaagatgtacaagacaaaagcaataagtgcaccaaatccaattgcatatctccacaaatgtgcaccagcccctagcataaagaacgcaatgaccactaaagcagaagtaactattgcaacataccaaacgacttgccaatagttaacatttcttcctttgtgctttaaattacttatttccgcaataaaagtgaaagcaactggactatccattccaatagcaaaccccattatacaacgacatattattagaataattacatttggtgcgagtgccgcaccaagagaggttacagtgagtgttagtaaggcaattgataaaatatgcttgcgtccaaactgatgtgctaatgtaccaccaagtaatgcaccaaataatgcaccaataggtaaagaggtcattactatagatagcgttgatggtgataagtgaaactgttgagtgagttgatcagtcattgtacctaaaatagtaatatcatatgcatctaaaaatatagttcctaatattaagaataaaaccatcttagatgtcgatgtttgcgcttcattgtctatgagtctaaataagtcagtttttgatttaacgaaatccatattttcatcccttattttcattttcttttcaatcgtaatccaaggtcattaattcaatataaaattaagattaaaaaattattaatgtttttaaagatgagaagtgatttgtggataactagataggtaaaaaatagaaaagttgttatagcaacgttttaagttagggtgtaattatccacagcagctggattatatgtgtataatttacagaattgtgtgacaatcatagctgtttatttgctatcaacagttttaaatgttggagatatagattgtatgataaattacgtttaatttattattaaagttaaaggttgtatattttttataatttcaaataatctaattagaaaattcttttgattaaatataatttgttgtattatttaataaatgaaaagcaattagatttttgtaatagtttagaaaatatttggtgttgagaaaggtttatttttaaaatgaataaatatatagaatatcctctcaattgaaacaaattttatcactcgaattcctcaaatttcttaggatcttcttcaagagattgactagatatcattttaaacgtattagataatttcaaaaatttcttaacttaaagattttctacaggagagttgtgaaagaaaaatcatttagctcaatcgctttatctttgggtttgaaaaattagatagagtttttgtataaaattgactatcactattttgaggtttctagcacttacagctaatagtcttctccatgattcatatttccaaacaatcctataatttaagctttatttatgaataaatttggtaaatattaaaaatttatagttaagactgtatcgaaatttgataaagattaatataaatatgtggtggttcaatttattttgcaagatgtttgtaaaaaccttgttttaactctcttaccaacgaaaattctatagaaaatgtaaagtttttaagatatctataaaaataaattgcataattttattattaaatcatcattgttttaaagttttctatagaaagaaataattatttaatttttcatctgttttgtactgctaatttagaactagtagcaaagattattagtttctaacctccattatagagcatttttactccaaaaagttaaatgcttttatacttttataataaagcatctttaaactttatttatagaaataaaagccgaaaaatgaaagtaattaaaagtaattataaaaataattggggtaatttatattattatattaatttatttttttaaaaaattattgttttgttttattggataaattatgcttataaagtatttacataaaaatgtaaatgcaatttacaagtaaatattcaaattatttccttgtaaaatatttattttaactggaggtatagtatgaaaaagagaagacaaggaccaattaacaagagagtggattttctatccaacaaggtaaacaagtactcgattaggaagttcacagtaggtacagcttcaatactcgtgggtgctacgttaatgtttggtgccgcagacaatgaggctaaagcggctgaagacaatcaattagaatcagcttcaaaagaagaacagaaaggtagtcgtgataatgaaagctcaaaacttaatcaagtcgatttagacaacggatcacatagttctgagaaaacaacaaatgtaaacaatgcaactgaagtaaaaaaagttgaagcaccaacgacaagtgacgtatctaagcctaaagctaatgaagcagtagtgacgaacgagtcaactaaaccaaaaacaacagaagcaccaactgttaatgaggaatcaatagctgaaacacccaaaacctcaactacacaacaagattcgactgagaagaataatccatctttaaaagataatttaaattcatcctcaacgacatctaaagaaagtaaaacagacgaacattctactaagcaagctcaaatgtctactaataaatcaaatttagacacaaatgactctccaactcaaagtgagaaaacttcatcacaagcaaataacgacagtacagacaatcagtcagcaccttctaaacaattagattcaaaaccatcagaacaaaaagta

SEQ ID NO: 3607 - DNA, 4057 bp, Artificial Sequence
  Description of Artificial Sequence: synthetic nucleic acid sequence
aatcaaaatctattaaatcttcagcaatgtcttcgaaactttcttcagattcatcatagaaatcattccaagtttctctgtcccaaatctctatacgatttgagacaccaattactgtacattccttacttaaattggcatattttcttaaattttgcggaatattaatacgcccttgtttatctaattctacttctacagcacctgagaagaacatacgcataaatttacgcgcgtctttttttgtcataggtaaggttttcatcttctcttcaatttgctgccactcttctagagtgtaaccaaataaacatttatcaaggcctcttgtgataataaaacgttcatttagatcataacgaaatttggacggtataatcatacgtccttttgtatccaattgatgatcgaattctcccatgaacattttttatcacctcaccttatttataatttaccacatctccccactatcctccactaattatacaaaaaaggtgcaaataatttgctcaaacacaaaaaaaaccgttttatctttaagataaaacgggcaaaaacactgtcatatcaaggatttataatcaaatgatcaaacgagtaagaaagtggtggataggtggagggactgaacacatctatcccaaaatcattcataatttgaagtggattccaaactctttcttgtagaccacccattggatggagtgtttcactaatttctctaaactgtcgcatacttatatcattttctctttcaatattcagtaagtaccgtttgattaaataatcgtactgattgagatgaatttgattatttttttctaaaagaagttggttgtcatgattattttccacataggtgaataaattgttataaagttcttgttgctgaattttcatttcttctacttcatttataaaattatttgatgctttttcacgaacaaaacgttgacgttcctgttctactccattagcaatgacagactctatcgataaattatattgttttaataactttttagttctagcatacaaatacgtgattcttaatcttggcataacaataggcatttctacatttaacgtatcaaaaacaccttttaattctgcccaatatttgatttcgcttggacctccgataaatgctactgtgttaaacaaccattcctctacaactggacgagtaacaacattattagaaattctttcaggctctctttctataatatctaataaattttgtttcgtgtaacgtttctcagttttattcagtttaaaataagtgccatcaaaatttaaaagctgtctcattccgtcttcatggataaataaatgtgtgtttgtctctgtttgtatcattgatggaagttgttgttgagttgttcgtatctgagtttcacgaaaagattgatcgacttgattcctcttttctaatatctctttaaacaacggtttctccatctgtcttaattcagggtattgagcatcaataagtaaaatcccataatccttaaacacttcatgtatcaatcccttaaaaatatcaatccatgaatcaaattgattaataatattgacgcacatttgataaacatcttgagtatgtacagtttccttcatttctttaaaaaagtgatttaatgatgcttttaattcgttcttatcaggagtatatcttgaaacattactatctggtggtgtcatcgtatgatactttacttttttcaaggtagtttctttattattgaatgcatacgtatgattcacctcttcaaaatcatggtcctcacctgcaatccaaaacacaggtacaataggagtatcatattcctcagaaagttgacgacttaaagttataattgagaaaatcttatgaaacgtatacagtggacccccaaaaagaccagcttgttgtccaccaatcactacttttgcaccatcagctaaagcatctatgttattcagctgctgatgtgttaactttaattcattcatgtaagatttaatcactcgtgataaatgaaattcccttccattattaggtgtttttaatcttctataaaagctttcctttttcgctgcatcatattcataaaaagatgtaatttgagattcactattttttattttattaatgaactgatcctgttcagttaactttaacgtattacacttcatgtatttactccttcattatcactattcctcatatagtataaagattatatttctcattgacaatttaacggcttataaattaatttatctaaattttttacaaatcaactaagtatgattattaaatgaaaaagcattttaaagagggtataataaaataaagaaacaaagggggataacgttatgggtgaagttaaacatttacaaatcaattacaaaacagatgagcttttcgctgatttcagagaatttggtaacaagaacctatatatgattgaggagttaaagggacaaatgattgatgcaagttccgattctcctttttatggaatttttgttggtaataaattagttgcgagaatggcattacttgataaaggagaagtagaagaaacctatttccctaatagcaatgactatattcttctttggaaattagaagtattagatacgtaccaaagacgtggatatgctaagcaactattaaactttgctaaagaaaataaaaaaccaattaaagctattgctagaaataactcaaaagaattctttttaaaacagggttttaaagatgtagaaaccaaaaatcctgaggggcacgacatcttaatatggaatccataatgtcgtaacaataatatatatcaactaaactgagccaacacttgtaatgataaattctacaagtgttggctcaacttatacttcttcaattgtctttatctcttctattcactcaacaatgcgaatcatttctgataaatcattaatgatataatccggttgaatagacgtatggttttctttttgtctaatattaaaccaacatgttgatatattagcatttttaccacctaaaatgtcagacgttaaagaatctcccacaattagagtttgattcctgttattctctccgatatgttcaaacacaaaatcgaagaactctgtcatcgacttttgaaatccagcttgttcagatataaagacatcttgaaatatttcattaaattgtgtctgagcaattcgtcgtagctgtgtttctgttacaccattggttactatatagagagaatgatttaattttaattgttgtataacttctaatgtatgatcaaataatttaactggtgcctttgctaattcagctctaaagcactcatcagcttcttttccatttacatgaatttgatagtcattaaaataattaataaatcgttgtgacagcacttcatctttagtcaatttattttgttgaaatgcttcccaatgcgcttggttcactttcttaaaatgttcgaaatcctgttgagttggctgatgattgtatttctgcgctaaattataaaacgcttttttctcagcgtcataaaaatccactaatgtatcgtcgaaatcaaataatatatacaatttcatctccttgccatgtactattgagtaatggatttacttttaaagcctctgcaacagcttttacaaaaaacgcaaagaaagttaaattgtaaccctcattctgtttaaattgagctttatgatagtttctagtatctgatgattttttaattacgaatattttaacccatacctaaaaaagcttctcaaaagtctattcaacttttgagaggcttgatagtaatttaaattaaatacttatattgatgtctaaaatcaataaaatatttacatcatacctggcatgccacccattccaggttgttcattattttctggctctggaatactagcaacgactgcttcagttgttaagaacatagcagctacactttcaaataataaagaaaacaacgcagcgactcatcaaaatgttgattcaacatctcatgatgagactagatcaaatgaaaatgacgta

SEQ ID NO: 3608 - DNA, 3378 bp, Artificial Sequence
  Description of Artificial Sequence: synthetic nucleic acid sequence
gtatgctaaaactcccaaaggaataccaaacaatggcgtggtaaaaatactcgctaaaaatatatacaatattaaataacatatttcttcagtttgccattttttatttatgagaactttccatatttcctttaaactcaaataaattctccttcttaaaaattttaattagtaaaatatatggttgagaatgttttaataaaataataattattgttattttattaaaacatttcttcaaaacctttaactattttaggacattagtttagattcgtattaaacaacttaataaagataccatatacctctaatacactaattaatctcattatagtttaacactgcagtatatcaacacattatatcgcaaaagttcattgataataaattgtgaaaaaataatatctgattatgacacatctctttttacattatcttagattatctacttctaagggtatttttacctttttctatattttcttcgtatgattatttaaaataagataaatatatagctaaactaaccataattaaagtaattacactatgtaaaaaagctaatctttatcattttcttatccatatttgtactattgtttctccttctataatccatatcagataagaatacaaaaattaatcctaatacgatggcaatgtaaatattcaatatgtctcccctcgtttaatatatatacaattagcaattttatatttaaaactacctctttcaacataatagaatatttctctaagctcttaaacacaaaaaactttaacgtatttatgaatattgtatattcataaatattgtaatgttattataatttaggtgaactttaacaacattttaaacggagggatataaaatgaaattgaaactattaggaacattagcactctcgtcaataatattaacagcatgtggacaagaaaatgtaaaaaaaaacagaaagcaatccaaaagaagaacaaaataaaacggataatatgcaaactaatgggagcgtaacaaattctaatagtaatcaaaaacaaaaaacagctcaaaaacaaatttccgctcaagaagcagaacaaattgtctcgaactattacattaataaagggattaataagcaacaagttcttgaatttaaaacaaatatagatagaagcaatgctaatgaatattatgttgaacaccttgtaagagatgcagccggaactcctataaaattttgtgctgtagtaaacaaaagtacaggtgaagtgatcaatcgatttaatgacatgaatgaggaagaaatgaaggaatttgaggaatttaaaaaaagaagtcctaagtaccataattctggtgaagaaaaaaataaaatgcaagaaaattcttcatcttccgaacaacaagaagtccacaattctgttatataacaaacaatcgatgaagtaaaaaaatttgataataatactgatgctgatataaaaatgagaaatccgaataaaatcttatcatacagattacaaaagataactatagcattatgatataaatatttttttaaagagaaatcacactaatttcgaagatattttaacttacatatagatttttcattatacttcactaaaactaaatgattattataataccgtatactctctttatattcatcacgtttatttacaacgtcatttatttcagcaccatcaccaactgtctcattaattgataattttgaaattgaatcaaacaaaagtttcaattattgaacgctatataaaattaatcaattctatgaagcttagctacacaacagcaaaaattattctttaagctactgttttttactctggtgcacgtaagggcgaaattagagccctcacatggcgtgatattaactacgatgatgagtttcatacatataaacaaaacagactatcacggtgaagtgacagcccctaaaacaaaagcagcaatacgtgatatatatttacctgttcatatgatgaatgatatcaaagaatatttaaaatggtacaaagaaaacaatgtatataaagatgactatgtattattcggtacattcttcaaagcttaaagcgaatcaactatagatcgtttgtttaccactgcattaaaaacattagatgaacaactgccagacggtcagaagttctctagaatcgttatacatgaattaagacatagccatgcgtctatgttagtcaatcacggtgcaagtatcatggtgatagctcaaggtttaggccatgcaaatagcaacgaagtatataacagatatggccatttatatcccagtacacaaaaagaaatagtaaaatacttataagggagattatatatgaaaataagtaggcgtcatttcatccgttgtaatcgtgccatctttatttacatctgctctatcgatttcatctgctaaaatttgagcttcctcatcattgacgttaaaagcttctcttaactgctttgctttttcactaagtgttttagttgatgtcccatttgatacttcgtttgtttggctattaacttgattttgcattttaccttgtgaagttgtatcttcatgagtgtttttattggaagtctgagtctcttttgaagctacatcagtgttcgattttgaatctttataatgactgtatcccaatccccctgcaaatcctagcattataatgagaaaaactagaatcagtcctgtaaaaaaccttttcaattaactgtcctccaactcttttatattttatttatattgttatattaatttatttttaaacacatttctactgttaatttaaggtatataaatattagtttaagaagtataaaagcatatgttataagttattttaagtttagttacttttaaatctataaatttttaaatattgtgcaaattatttaggtgattagtagcaattataattattataaattaaaataaatttaataacgggaattaacaatcaagggaacaataatgtttttacaaatttacgttattaaattatggatttagtaatcgtgtaaaactggttgaagtatgaacgacacatataatcacagcagtgacaatttctagatttaaaggagagaaacgaaatgaaaaaacatgtgttagcaatcggagcaattacagtaacaacattacttgcaggatgcgattttggagatttggtaggacagcatcagactgataagcaatcagaaaatagtaacactcaaaccgagcaagcttcaaataataaaaattcaaattctaataatggtcattcaagtaataacaataagtctagagatagagtcgaggatttaactcaatcgcaaaaagtagcattagctatcaatgatccctcagtttctca

SEQ ID NO: 3609 - DNA, 3121 bp, Artificial Sequence
  Description of Artificial Sequence: synthetic nucleic acid sequence
taaataaccagctaataaacttgtcacatctataaaaataatccattcgttgtgaaagaatcctttataaactgatgcccctattattaccagtgtgactaatgtaccaatccatttacttctagtcaccacactaaacagcacaactaatatacaaggaaagaaggccgcacaaacataccaaatcattatcgtcacccatttcttctgtttagaattgacattgttgtttcacgtaattcagttcgaggaataaagttttctgtgagcatttcaggtataacattttcaataaaatcttttacagattctaagtgatcaaattgtataatagtttctaaactcatttcatatatttcaaaaaatagtggctcaggattacgtttttgtatttctccaaatgtttcatacaataaatcaattttatcagcaacagatagaatttgaccttctagagaatcatctttaccttcttgtaaacgttcacgatacacgtgctgatattgtgttggtatctcctctttgataaacgtatcgaccatttcttcttcaacttgggagaataaatgttttaattccttacttgcgtattttaccggtgttttgatatcacctgtaaacacttcagcaaagtcgtggttgagtgacttttcataaagactcttccaatcgattttatttccatgatattcttcgacagtagccatatattgcgcaattttagttactttaaaagaatgagctgcgacattgtgttcaaaatatttaaatttacctggtaatcttattaatttttctaaatctgatagtcttttaaaatattgatgcattcccataataagacacctccttaatattaaaattagtctatattcttattgttattatatcaatcaatattattattgaaagtaaattatcatgtaaatcatttctattttattacaaaagaaaaagtagaataatgaattcattttgaactcactattctactctaatacgtaatttatgggtaaaacatgttgatatatatggaggtgttgttcaaccaacatgattttcaatttaattgtctagaacgtttatataacataagagacaattatacgcgcagttcattcacactttgaatataaatagccatttagtgaatgtaattatatgaattagggttgctaatagttctgtaagattttacgttaacgccaccattccagttcatttccgaaacagttacagaaccattagaattgattgattcaacaacgccaacatgtccataagcaccagccccattttgacccggaccactttggaatacagcaccaacctcaggtgtgtgatctacattaaagccagcctgattagctgaatatgcccagttactagcgttgccccatagacttccaattggtttccctagctcagctcgacgatcgaatgcataataagtacattgaccagtagtgtataaattacctgagttagatacacttcttagaccatcataggcgtttgacacagagtatgtatcagttgattcactatcataattatcataagtagtgttggatgtatcagttgatacattattatatcctactggaatgtagttagtttcataatttacgaatgtgtttgtgttattaaattgttcaaatgcagtttcagatactacaatttcatctcccggaaaaataagaggttctacaccaggatttaatgcataaagctcttctaaagaaagattatgttctaaagcaattttatataaactatctccaggttttacaatgtaaatacctaagtttgattgatttgtaattacatcacccgttgcatatgtgtctagttgcgacgtctcagattcttgtgcgttagctgcagtgttgattgcaataaaagctgcaatcgaacttaacgttacagttagcgtttttttcatctagttgtcattcctttgctagttgattattaattcacaaatttaatatagcacaatcaaatgaagctaagggtattgttatattgatgtaatataatagttaacaagtgtatttttacatctagaggtgattatctactccactagttcctaaccttatgatgtacaggtcaaattaaagtcattctcgtataagattgaatttactacggtaacattagaaaatgcagactacatataaagtaaatataactttaaaaattaactccctattctgtctgcttaatgaaaaatacgcataatcattgataaatcaaataatgattatgcgtatatcaattatacgtctcgactatccatttcttttcttaaataagcttctatgaatgggcctatttctccatccataacagcgtctactttaccagtttcttcattcgtacgatgatctttaatcattgaatatggatgaaagacgtaagaacgaatctgacttccccatccaatgtctttttgttcgcctcgaatttcagccatttcttgctcttgctcttctaactttaattgataaagtttggacttcaacattttcattgcagcttctctattttttatttgagatcgttcattttggttgttgactacaatacctgtagggtgatgtgtaattctaattgcagactcagttttgttaatatgttgtccaccagcgcctgaagctctaaaagtatccactgtgatatcatctgggttaatctcgatttcaatttcatcattattaaaatcaggaataacatcacatgatgcaaaagaagtatggcgtctaccagatgaatcgaaaggtgaaattctaactaaacgatgaacacctttttctgcctttaaataaccataagcattatgtcctttaataagtaatgtgacacttttaacgcctgcttcatctcctggaagataatcaaccgtttcaactttaaagccattttgttcacagtaacgttgatacatcctaagaagcatacttacccaatcttgtgattctgtaccgccagcaccgggatgaagctctaatatagcattatttgcatcatgtggtccgtcgaggagtaattgtaactcatattgatcaatttgttcttcaaattgctgaacttcctcttctaattctatcttcat

SEQ ID NO: 3610 - DNA, 3929 bp, Artificial Sequence
  Description of Artificial Sequence: synthetic nucleic acid sequence
acaattgacatttcaaatcatatattgctcacaggctctaatgcatcaggaaaatctacatttatgaaagcagttgcactaaatttgattttagctcaatcgatacaaactgcaacagctcactcatttatttatcaacctggctatgtaatgacatcaatggcaaatgcggatgacgttttaagtggtgacagttatttcatgtcagaacttaagcaactggtacaccagaggtatgtccatcccggtcctctcgtactaaggacagctcctctcaaatttcctacgcccacgacggatagggaccgaactgtctcacgacgttctgaacccagctcgcgtaccgctttaatgggcgaacagcccaacccttgggaccgactacagccccaggatgcgatgagccgacatcgaggtgccaaacctccccgtcgatgtgaactcttgggggagataagcctgttatccccggggtagcttttatccgttgagcgatggcccttccatgcggaaccaccggatcactaagtccgtctttcgaccctgctcgacttgtaggtctcgcagtcaagctcccttatgcctttacactctatgaatgatttccaaccattctgagggaacctttgagcgcctccgttaccttttaggaggcgaccgccccagtcaaactgcccgcctgacactgtctcccaccacgataagtggtgcgggttagaaagccaacacagctagggtagtatcccaccaacgcctccacgtaagctagcgctcacgtttcaaaggctcctacctatcctgtacaagctgtgccgaatttcaatatcaggctacagtaaagctccacggggtctttccgtcctgtcgcgggtaacctgcatcttcacaggtactatgatttcaccgagtctctcgttgagacagtgcccaaatcgttacgcctttcgtgcgggtcggaacttacccgacaaggaatttcgctaccttaggaccgttatagttacggccgccgtttactggggcttcgattcgtagcttcgcagaagctaaccactcctcttaaccttccagcaccgggcaggcgtcagcccctatacatcaccttacggtttagcagagacctgtgtttttgataaacagtcgcttgggcctattcactgcggctcttctgggcgtgaaccctaaagagcaccccttctcccgaagttacggggtcattttgccgagttccttaacgagagttcgctcgctcaccttagaattctcatcttgactacctgtgtcggtttgcggtacgggcacctgttatctatctagaggcttttctcggcagtgtgaaatcagcgactcgaggaaacaatttcctctccccatcacagctcagccttatgagtgccggatttgcctaacactcagccttactgcttggacgtgcactccaacagcacgcttcgcctatcctactgcgtccccccatcgattaaaacgatactaggtggtacaggaatatcaacctgttatccatcgcctacgcctgtcggcctcagcttaggacccgactaacccagagcggacgagccttcctctggaaaccttagtcaatcggtggacgggattctcacccgtctttcgctactcacaccggcattctcacttctaagcgctccacatgtccttgcgatcatgcttcgacgcccttagaacgctctcctaccattgtccaaaggacaatccacagcttcggtaatatgtttagccccggtacattttcggcgcagtgtcactcgactagtgagctattacgcactctttaaatgatggctgcttctaagccaacatcctagttgtctgggcaacgccacatccttttccacttaacatatattttgggaccttagctggtggtctgggctgtttccctttcgaacacggaccttatcacccatgttctgactcccaagttaaattaattggcattcggagtttgtctgaattcggtaacccgagaggggcccctcgtccaaacagtgctctacctccaataatcatcacttgaggctagccctaaagctatttcggagagaaccagctatctccaagttcgattggaatttctccgctaccctcagttcatccgctcacttttcaacgtaagtcggttcggtcctccattcagtgttacctgaacttcaacctgaccaagggtagatcacctggtttcgggtctacgaccaaatactcaacgccctattcagactcgctttcgctgcggctccacatttgctgcttaaccttgcatcagatcgtaactcgccggttcattctacaaaaggcacgccatcacccattaacgggctctgactacttgtaagcacacggtttcaagttctctttcactccccttccggggtacttttcacctttccctcacggtactggttcactatcggtcactagagagtatttagccttaggagatggtcctcccagattccgacggaatttcacgtgctccgtcgtactcaggatccactcaagagagaatatgttttcgactacaggattattaccttctttgattcatctttccagatgattcgtctaacatgttcttttgtaactccgtatagagtgtcctacaaccccaacaagcaagcttgttggtttgggctcttcccgtttcgctcgccgctactcagggaatcgatttttctttctcttcctccgggtactaagatgtttcagttctccgggtctgccttctgacatgctatgaattcacatgtcgataacatgacataactcatgctgggttcccccattcggaaatctctggatcaacgcttacttacagctacccaaagcatatcgtcgttagtaacgtccttcatcggcttctagtgccaaggcatccaccgtgcgcccttaataacttaatctatgtttccaccatattttgaattgttattcaaaataaatagctaaaactagttattaatcttgtgagtgttctttcgaacactagcgattatttatgaattcaagcttatttaaaactctattcactcggttttgcttggtaaaatcttacttacttatctagttttcaatgtacaaagaatgttaataaacattcaaaactgaatacaatatgtcacgttattccctcatcttcgtagaagatgttccgaatatatccttagaaaggaggtgatccagccgcaccttccgatacggctaccttgttacgacttcaccccaatcatttgtcccaccttcgacggctagctccaaatggttactccaccggcttcgggtgttacaaactctcgtggtgtgacgggcggtgtgtacaagacccgggaacgtattcaccgtagcatgctgatctacgattactagcgattccagcttcatatagtcgagttgcagactacaatccgaactgagaacaactttatgggatttgcttgacctcgcggtttcgctgccctttgtattgtccattgtagcacgtgtgtagcccaaatcataaggggcatgatgatttgacgtcatccccaccttcctccggtttgtcaccggcagtcaacttagagtgcccaacttaatgatggcaactaagcttaagggttgcgctcgttgcgggacttaacccaacatctcacgacacgagctgacgacaaccatgcaccacctgtcactctgtcccccgaaggggaaacctctatctctagagggatcagaggatgtcaagatttggtaaggttcttcgcgttgcttcgaattaaaccacatgctccaccgcttgtgcgggtccccgtcaattcctttgagtttcaaccttgcggtcgtactccccaggcggagtgcttaatgcgttagctgcagcactaaggggcggaaaccccctaacacttagcactcat

SEQ ID NO: 3611 - DNA, 4565 bp, Artificial Sequence
  Description of Artificial Sequence: synthetic nucleic acid sequence
tctaaatccagaatccagttggcaagatcgagcgcgcgttaaaaatctaagaaaacttgaaagctacaattatgaattagaagttatagctaagaatgaattgaatgaagttataggtcacgttgtgttagcagaggttaagttgtcgtctaaaaacaaaaaagcgatagcgttagccattggtgcactgtcagtagataaatctattcgaaaccaaggtttaggtcaagccctgttaaaagctgtagaagaacgtgctaaagaacaaggctattgtgctatttttgtaaataatcatcctcagtactttgagaaatctgattatgaagcagcccatttatataatatacatatagaagaaaaacgaaatcatcaatcattattagtaaaatttctaaaaccagttcaaaatgaatggtctggaatgacggtgtattatccggaagtactggattgattttaattgataagaaaatataagagcgtgatataataatgagtaattgttaatggaggtgctacggtctgatgaatcccctaatgattttggtaaaaatcattaagttaaggtggatacacatcttgtcatatgatcaaatggtttcgcgaaaaatcaataatcagacaacaagatgtgcgaactcgatattttacacgactctctttaccaattctgccccgaattacacttaaaacgactcaacagcttaacgttggcttgccacgcattacttgactgtaaaactctcactcttaccgaacttggccgtaacctgccaaccaaagcgagaacaaaacataacatcaaacgaatcgaccgattgttaggtaatcgtcacctccacaaagagcgactcgctgtataccgttggcatgctagctttatctgttcgggcaatacgatgcccattgtacttgttgactggtctgatattcgtgagcaaaaacgacttatggtattgcgagcttcagtcgcactacacggtcgttctgttactctttatgagaaagcgttcccgctttcagagcaatgttcaaagaaagctcatgaccaatttctagccgaccttgcgagcattctaccgagtaacaccacaccgctcattgtcagtgatgctggctttaaagtgccatggtataaatccgttgagaagctgggttggtactggttaagtcgagtaagaggaaaagtacaatatgcagacctaggagcggaaaactggaaacctatcagcaacttacatgatatgtcatctagtcactcaaagactttaggctataagaggctgactaaaagcaatccaatctcatgccaaattctattgtataaatctcgctctaaaggccgaaaaaatcagcgctcgacacggactcattgtcaccacccgtcacctaaaatctactcagcgtcggcaaaggagccatgggttctagcaactaacttacctgttgaaattcgaacacccaaacaacttgttaatatctattcgaagcgaatgcagattgaagaaaccttccgagacttgaaaagtcctgcctacggactaggcctacgccatagccgaacgagcagctcagagcgttttgatatcatgctgctaatcgccctgatgcttcaactaacatgttggcttgcgggcgttcatgctcagaaacaaggttgggacaagcacttccaggctaacacagtcagaaatcgaaacgtactctcaacagttcgcttaggcatggaagttttgcggcattctggctacacaataacaagggaagacttactcgtggctgcaaccctactagctcaaaatttattcacacatggttacgctttggggaaattatgaggggatctctcagtgctacggtggattaccaagctttgtatcgtatgtatagaccgcaaagttttgatgatgtggttggacaaacgcatgtaactaaaacgctgcgtaatgcaatttcaaaaggtaaacaatcccatgcatatatttttagtggtccgagaggtacgggtaaaactagtattgcaaaggtttttgccaaagctattaattgtcttaatagtgacgatggtgaaccttgtaatgaatgtgcgatttgtaaaggaatcacacaaggtacgaataacgatgtaattgaaattgatgctgcaagtaataacggtgtagatgaaataaggaatattagagataaagttaagtacgcacctagtgaatctaagtataaagtatatattattgatgaggttcatatgttaactactggtgctttcaatgctttgcttaaaacattagaagaaccaccagcgcatgctatatttatcttggcaacaacagaaccacataaaattccacccactattatttcgagagcgcaacgatttgactttaaagcaattagcagtgaccaaattatagatagacttaagtatgtagctaattctcaatctttggattacgatgacgcagcattagaatttattgctaaagcatcagaaggtggtatgcgagatgcattaagcattatggatcaagcaatagcgtttggagacgaacgacttactttacaagatgctttaaatgttacaggtagtgttgatgaagcggcattaaatgagttatttaatgacattgtaaaaagtgatgttaaagccgcatttaatagatatcatcattttatttcagaaggtaaagaagtcaacagactcattaatgatatgatttactttgttagagatacaattatgaataaaacgtctaacgaatccgttcattttgaatcacttattcatttcgacttagatatgttatacaggatgatagatatcatcaatgatacactagtatccattaggttcagtgtaaatcaaagtgttcattttgaagtgttgctagttaaacttgcagaaatgattaagacacagcctcaaactgtacaaaatgtagcaacagcatcggtagctaatgaaccagataatgagatgttattacaacgtttagaacaacttgaaaatgagcttaaaaccttaaaagaacaagggatcaaaactaataaagttagtcaacaacctaagaaaccaacacgtacgattcaacgatctaaaaatacgttttctatgcaacaaatagcgaaagtattagacaaagcaaacaaagatgatatcaaattgttgaagaaccattggcaagaagtgattgatcatgcaaaaagtaatgataaaaagtctttagtaagtttgctactgaattcagaaccagtagcagctagtgaagatcatgtgttagttaaatttgatgaagaaattcattgtgaaatagtaaataaagatgatgaaaagagaaacaatattgaaagtgtagtttgtaatatagttaataaaactgtcaaagtagttggagtgccggctgaccaatggctgagagtgagagcagagtacttacaaaatcgtaacaccaatgaaacacatcaaagcgaaaaacaaagcacacaacagtctcaacaaatagatattgctcaaaaagctaaagacttatttggtgaggaaactgtacacttagttgatgaagactgatacatgacaagcgatatcttggtatgtataatgtaataaaagctaaatttttatagaaattgtttactattaaggaggaaatgaaattatgcgcggtggcggaaatatgcaacaaatgatgaaacaaatgcagaaaatgcaaaagaaaatggctcaagaacaagagaaattaaaagaagaacgcgttgctggaacagcaggcggaggtatggtgactgttactgtaacaggtcataaagaagttgtggatgtagaaattaaagaagaagctgttgatccagaagatattgagatgcttcaagatttagtattggcggctacaaatgaagcgatgaataaagcagatgagttaacacaacaacgtttaggtaagcatactcaaggcttaaacatccctggaatgtgatgaaatatgcattatccagaacctatatcaaagcttatcgatagttttatgaaactgccaggcattggaccaaagacggctcaacgtctggcttttcatactttagatatgaaagaagacgatgttgttaagtttgctaaagcactagttgatgttaaaagagaacttacctattgtagtgtttgtgggcatattacagaaaatgatccttgttatatatgtgaagataaacagcgagatcgttctgtcatatgtgtagttgaagatgacaaggatgtcatagcaatggaaaaaatgcgtgaatataaaggtttatatcacgtgcttcatggttcgatttcaccaatggatggtattgggcctgaagacatcaatatacctgcattagttgaacgcctcaaaaacgatgaggtgaaagagcttatattagctatgaatcctaacctagaaggcgagtctactgcaatgtatatatctaggttggttaaaccaattgggattaaagtcacaagactggcacaaggtttatctgtaggcggcgatttagaatatgctgatgaagtgactttatctaaagcaattgcaggtata

SEQ ID NO: 3612 - DNA, 3512 bp, Artificial Sequence
  Description of Artificial Sequence: synthetic nucleic acid sequence
atgcacttacttcaaatcctttacgattcaactttttaactaaactgtgcatctcttttactcgtcgttccatatgatgaattggattgtgtttatattgatagttaaagttatcatctaaaatacttaattttgtacttatttctttaagtgctgaagaatataggtggtccagttccacaaatccaactaatgtattaaatgcttcatcatcatctttaaaatgttttaagctatttttgaattcgtctcgtaaatcttcgatataaagtgcaggctttctctctacatacatctttctcaacctccaatttctcttcaaacccattatagcgaattaaaatttaatatagaaactttatgtcatattacagttttatcatatatcatttatagataaaaaaacctgagacaacaataattgtctcaggtaacgtacatatttttaataattgataattcaatttcatatatttattagattttatgttccaataccaaatgtttatatgaagttatcacttcaacatacatccatcgccattactttgtttaaaatcactcatcttttcgatgctcaatcactttggtacctttattctctgcgatatgttgtgcacggttaactgcttcagattttgtgtcaaatgtatctgaagctcgttaccttcactttatttgatgtacattctctaaattagatattgattctaactattgatgtgtacattaacgtttaaatagagtgaaggtgtattttttattttgtatatcgactgaatagtagttgatttgtaaaatataaagttgggttaatcgtgtctttaatatcattgacttctttaagccacaactgtaaatcattgtagtagtcggaactcatagacaaatcatttgtaaaacatttagctgttgcttcaattgtatctttgtttaattggttagagatatcggtttgagtatacgttgagtaaatttcaattgcactttctaaatgatgattgatgtaatgaattgttttttgaatgatttttaggaactttttgagtttaacctcactcgtatttaatacttcaggtgttgtaatgaaaatgagttgacaaaaatcgggtacattataatttttaagtggaaaataatctacattaagtccttgatttctagcttcaagaatttcaaaattttcgaaaatgagtgtagcagcatcagctttatcagttaaaagtgcatcagtatgataaaaactatgattaactggtgtgatgtcaccttcttcaaatgtaccaccatcagcttcaatcatcgttttagccatagcaataccacctggaccgggagcaccgggatattgaagccgtttaccgattaaatctttggggcgagcgatatttttatctttgttatacataatacctccattagtgtgaagatatctcgcaaacccgatgactttttgttctttagctctatcttgaaccagatgaataggttcagtaatcgcgatatccattgaaccattttcaatctcgtctagtgcgtcaaagtgttcctttggttcaatcatctcaatttctaatgattcttctttaaaccaacctttttcgatacctaagattaacggcatatgatcaggatttaaaaaccattctaaacctactgttaatttgtccataaaaaaattcctccatccatttaattattgcgtaaaaaagtgaatgaagaaacagttatcaatattgctcactttcctacgctggtgctaaccaacaggttcaagggttgaaagtagactttctctcagcaaattgaattgcacccctaatgatactagttaatctatgtacagaataacatagttgaattgaataaaaagcaaaatgaatatagtaaatattaatcttgggagtatgatgcaaaaaaataagctaacgtttcaaacgttagcttacaatatatcacaatatatttgatgaactgaagtttaattaaaattctaacattacatcataccaatgagtttcatccatagtgaacctacaccaatccaaataataaaatagactataccaagtacaatattcatagtccaccagcgcttttgtgtaacatagccatctgcgtataatataggcgctggtccactactatagtgtgttgttgatgccagtaagttaccaaagaaccctaacattaatgcactgaataatggcggtgcacccgaagcgactgcaacaccgagtaacgcggcgtacatggcgctgacatgtgctgttgcacttgcgaataaataatgtgagtagaaataaaacaagatgagtaaaactaaaacgataggccaactaaagccattcaaaccttgagcaatgagtttgcttaaccatgggataaagcctaacttgtttaattgttctgccattaatacaagaactgagaaccaaacgagtgtattccatgcgcctgtttcatttaaaatatctgaccacgctaatacacctgttaatagtaacaatgctaaagcaataaatgcagtgagcgtggcatcaacattaatgaagcttcctaatacccacaaagccaatgctatgataaagacaccaaccatcaatttttcggctatagacatatgtcccatttcttctagttgttcagtagcccattttttagcgttaggcgtttctttaacagtaggtgggtataatttataaataatgaaagggacaacgatgagagaaatcaatccgggtataatagcagcaacaaaccaattcatccatgtaatttgaacgtgtgccgttttttcagctaaactttgcgctatagggttaccggccatagctgttaaaaacatagctgaagtaattaaattaccttggaactcagtaaagattaaaaacgcacccatttttctctcagaaccatctctcggcgatgaaccaaatgactctgacaaggacttaatgattggaaacataataccaccagcacgtgctgtattacttggcgtagcaggagctaagataaggtcaacaccaacaagtgaataagccaaaccaagcgttttctttccaaataatttaacgaattgcagagcaatacgtcgacctagccctgtttttacaaatcctcttgaaatgaaaaaggccattgcaataagccaaatactactattaccgaagccttgaacggcagtttttgtatcaacaattccaaccaaaatcatgattgtaaaaccaatgattgatactgcacctatagtcataggttgggtaatacaagcaatgatggttgacacaaaaatagcaaacataaaccaagcttgatcatttaaggcatctggtttaataggcgtcaatgcccagataattaaaccaacgacaataggtagaataaacttacgatatttaacagtacttcccacgacaccatcttcctttacctaaatcttttttacattttaatcatagtcttatcacacgctgatgtacaggtctttttataatcgtacaacgttc

SEQ ID NO: 3613 - DNA, 3314 bp, Artificial Sequence
  Description of Artificial Sequence: synthetic nucleic acid sequence
agatattttaagtgatgaagcatctgttataccagggtctctaggtctttctccatcagctagttttggtcaaacaggtacacgtctttatgaaccaattcatggttcagcaccagatatagctaatgaagataaagcgaatccatttggtatggttctatctttagcactttgcttaagagaaagtttaaatcaaaatgatgctgctaacgaacttgagtcaattgtttactcgtttattcaatctaataagacaactgcagatttaggtggacaatatcgaacttcagaaatttttaaattgcttaaagaaaaatatctataagaggaggagaaaattatgggtcaaacactgtttgataaagtatggaaaaaacatgtgcttcatggaaaagaaggtgaaccacaattattatacattgatttacatctcattcatgaagtcacttctcctcaagcgtttgaaggacttagaatacaaaatcgtaaactcagaagacctgatctaacctttgcaactttagatcataacgttcccacaattgatatttttaatataaaagatgaaattgctaataaacaaattacaactttacaacaaaatgctaaggactttggtgtacatatttttgatatgggttctgacgaacaaggtattgtgcatatggttggaccagaaactggattaactcaaccaggaaaaactattgtatgtggagattcacatactgctacacatggcgcatttggtgctatcgcatttgggataggaacaagcgaggttgaacatgtatttgccacacaaacattatggcaaacaaaacctaaaaatttgaaaattaatataaatggttctttaccagctggagtttatgctaaagacattattttatatttaatcaatcaatatggtgtagatttcggtactggttatgctcttgaatttacaggagaaactataaaaaatttatccatggaagcacgtatgacgatttgtaatatggctattgaagcaggagcaaagtatggtttaatgcaacctgatgaaacaacctttaattacgtaaaaggtcgtccttatgctactgattttgatagttctatggcgtggtggaaagaactttattctgatgatgatgcctattttgataaagttattgaacttgatgtaacaaatttagaacctcaagtaacttggggaactaacccagaaatgggagttagttttagtaatccattcccagaaattaaaaatgcaaatgaccaacgtgcttatgactatatgggacttcacccaggtcaaaaagccgaagatataaaattaggttatgtttttttaggttcatgcacgaatgcaagattatctgatcttattgaagcaagtcatattattaaaggacaacaagttcatccaaatattactgctattgtggttccgggttcaagaactgttaagaaggaagctgaagctctgggactagataaattatttaaagatgctggatttgagtggcgtgaaccaggatgttctatgtgcttaggtatgaatccagatcaagttcctgaaggagtacattgtgcatccacgagtaatcgcaattttgaaggaagacaaggcaaaggcgctcgtacacatttggtatcccctgctatggctgctgctgctgcgattaatggtaaattcattgatgttagaaaggtggtagtataattggaaatcaaaccaatcactatatataccggaaaaactgtcccccttttttatgacaatatagatactgaccaaatcattcccaaagtgcatcttaagcgggtctctaaatcaggctttggaccttttgcttttgatgaatggcgttacttacctgatggtagtgataatcctgattttaatcctaataaaccaaaatatcatggtgcgtcaattctaattactggagataactttggttgtggttctagccgtgagcatgcagcgtgggccttaaaagattatggttttaacattattattgcaggaagttttagtgacatcttttacatgaattgtactaaaaacgcaatgttacctatatgtttaaatcagaaagaaagagaacatttagctcaatttgatgaaataactgttgatttacctaatcaaacagtgtctacggtgtctcagtcttttcattttgatatagatgaaacctggaaaaataaattaatccatggcttagacgatattgctattactttacaatttgaaaatttaatagaaaaatacgaaaaaactttttaaaggtgtgaatgacagtgacagtaagaactaaagtttcgacaaaagatatagatgaagcatatttacgtctaaaaaatatagtaaaagaaactcccttacaattcgaccattacttatctcaaaaatataattgtaatgtttatttaaaaagagaagatttacagtgggtacgatcctttaaattaagaggagcttataatgctatttcagtattatccaatgaagaaaaaaataaaggtattacttgcgcaagtgctggaaatcatgctcaaggtgttgcttatactgccaaaaaactcaatttaaaagctgttattttcatgccagtaactacaccacgacaaaaaatcaatcaagtcaaattcttcggggatagtaacgtagaaatagtattaattggcgatacatttgatcactgcttagcacaagctttaaactatacgaagcaacataaaatgaattttattgacccatttaataatgtatatactattgcaggacaaggcactttagctaaggaaatattaaatcaagctgaaaaagaggataaaacatttgattatgtatttgctgctataggtggtggcggtcttatttcaggagtgagcacatattttaaagcacattccccccatactaaaattattggtgttgaaccaaccggtgccagtagtatgtatcaatcagtcgttatcaaccatagtatagttactttagaaaatattgataagtttgttgatggagcttcagtagcaagagttggtgatattacctttgatattgcgaaagataaagtggatgattatgttcaagttgacgaaggagctgtttgctccacaattctggatatgtactctaaacaagcgattgttgctgaaccagctggtgctttaagtgtaaggtattatcggcaactgtaaaaatgtaatatagtagcgacaatagtaatataggtgcaataagtaacagtgccaatgttcttacatctcgaatcgtctgtttgaaaatacgtcctgctatgtgcaacgaattc

SEQ ID NO: 3614 - DNA, 3501 bp, Artificial Sequence
  Description of Artificial Sequence: synthetic nucleic acid sequence
tatactgtactaatgttcatagaaatgaaattagtgatttgaacgatttaaacccgcaactttttaatgaaattaaatctgtttttaaaatgtttgcgaatgatttattttaaccgtatcttaactggtacggttatttttgtgttataattaaattacatacaatttaatcttttttactcctttataatttttgctaccacgttcattatgagcgtggtttttttgcgaacgccaacaatttctgtcgcaactgtgttataattcaattgcaagtcatttcacagatgggtagtcactatggctaccctctttttttattgtataataatctttgttcctgatttcaaactaatactatattctaaatcacgttcatttgaacgtggttattttgtgtacacgtgtcaaatacgtgtcaaaatagttatactcttttagttttatttagaaaataaatctttgaaaacactgtatttatggctatttagttttatttagaaatttatttttatccctcactctccgttatttgtttgtacctcgttaaatctcgtgaaacaaaacgttgatttgacggggttttgttatatcttattaactttcgttaaacctcgtaagtcaaactaaacgttcccgtaacattcctctatattgttaaattgataaaaacgtccccgcaaaattaaattacgttcccgttcatattttccaatacattcactgttttttctctttctgtctgctctacttcatctaatagatgcgaaatatgcatccatagtagttttaatatttttgtaacctaatctctttgaagtgtaatagatagatacgtcattgagtagtaaataagaacaatgcgtgtgtcttatactatgcaaagtatatatacctattttattttctaaacaaaatttttgtaacactttagatacagcattgtgtgtaatcaatcctacacctgtactgaataattgatttgataaactcactggcattttagataatgtttttcttaacatattcatatctgcagcaggtatatctacagttctatctgaagtttctgttttcgttcctggtaagtgtattgtattatttttataatctaaatcacttctacttagtttttgaacttctccaaagcgacctccagtgacgattaaaatataaacaaatacatatgattgaatagggggatcagatacatacttctttaaatttacaaaattttctatgctcataaacttttcatcttctttttgtgcaggtgtctaggtaagatggttggtaaattagaggtgtgacacctagaaacgatttgttaaatgctaatattaccggacaacttaatttaaattatagattaatttagttaggtttcatcactagtaaaaaagacatggactatataactaagaacatcaacagttttactaagagacttgcagaggctatcaatggtagacaaataaacgcactaaaaagcaacccatctagcaaaaagataacttggaactggggaggtactttctaccctaacgcacctaaaagtggtattagagttagaaggtcgctaggtatcaatggcgctattgttgaaagtggctcgtgattatacagaaagacagattgggttaaattcgaccaagttattaaaaaagatggatattggtggcaccactttaaatatcaagcaccaggttcaagtaataaacatttctattgagccgttagtaaaattataaacaaacaacaaaaaataaaaaatgagtaatattggggtaaaatagactggaaatgatataattaaattaccaggtcattgtacaagggtagtcgctatggctaccttatttttttatacaaaaaaagcgactaaaaagtcgcttttaaaagtgttatttctttttattaaaatacattaaagtgattataattgaatacgtgaaaagaaatatcattataaacattgccatgtaatcagtgttgtttgcgagtcttctgggtgtgcatccgcatgttgcactgaagtttcagctgcttgagcttgttgccctccgatgaaaattgttacacctgtaataattgatactactcccactgcgtattttctaatgctaaatctttttattctattattatttgtcaaagaaatcacctctataagatttttcccttataaagaatgaaaaaataactgctaaattcaaaataacataaaagttattaatttttttaactaatttggttaaatttttgttaactttttagtttttaaaacattttattgattctattacagcatttaaaataatctaatacattattttcgattatatttatctattttatcgcattaatcacaattaaaattgataaaataatcttatttattaataacaattcaagtatcattaaatgaaaaaagtagcatgcgaaacatttttaataactaatcttactttttgagttgagtctactcaatgtttaaagttatatatcatctcaaattttcaaattacctttctatatttcgctcgatagacaatactcttgtatatcctgcaataatgagtttttaccttacaaaatcaaaaccacccgtacaaacggatggtttactttgcatctataattttttctattgatcaaccactattcgtgcgctgatagtaagctaactacattaacctttttatttttcctgcaaataattataaatactcttctataaaaatttaatctacatcaatattttctaataattaattacgcatataatgttgaaacactttatatttccatatccatattttaaattcatattataaattaattaaagatcgtgataattttagttaatacatatactgctttttatattttttattcaattcatgaaaaaattttttacattcttcaactgattgatagatagtcagaaataagtattcacatatatattaaccccctctacttgtaacagtgagggggtataggtgataaaggctaataactactatgctttcaaattatcgcgtgtacttaaccattgagtatataatgcaacaatataaacactaatagctgtgttaacaagaatttcgaccatatagtaccttacgataaatcattctatgctatagattatttaataatatcaattaattcttttttagaagctgaacgtgcaggtatccaaccgaaaatgatgcctatcaatgttgatacacctacagctaggatgacggaacctagactgacggaactcttaaccatttcaggtgtcacgagatcaatcaatgtagcaataataatacctagaattaatccgatgataccacctatgagacataacacaacactttctactaagaattgtatttcaatatctcgacctttagcgccaaatgcacgacgaattgcaatctcttctgttcgttcagtgactgaaatatacatgacattcatcacaccaatacctgcaataaagag

SEQ ID NO: 3615 - DNA, 3137 bp, Artificial Sequence
  Description of Artificial Sequence: synthetic nucleic acid sequence
attcatacttcgtatggttctatagtttatactggagagtttaagtttgatcaaagtttgcatggacattatgctccagacttgaaacgaatggcagaaattggtgatgagggtgtgttcgcattaatcagtgattcaacagaagctgaaaagcctggatataacacgcctgaaaatattattgaacatcacatgtatgatgcttttgccaaggttaaaggtagacttattgtatcatgctatgcttcaaacttcgttcgtattcaacaagtgcttaacattgcaagtcaacttaatcgtaaagtgtcatttttaggtcgttcacttgaaagttcgtttaacatagcacgtaaaatgggatactttgatataccaaaagatttattaatacctattaacgaagtggaaaattatcctaaaaatgaagtgattattattgctacaggtatgcaaggtgaaccagtagaagcattaagtcaaatggctcgcaaaaagcataaaattatgaacatagaagaaggagattcaatattcctagcaattactgcttcagctaatatggaggttattattgcagatacattaaatgagttagtgcgtgctggagcactaaagtaattgataaaacttcaatgtcttcaaactgtttacgtatatacgttggtaattggcgtaaagcactttctgcaattccctcattcctatttttcttattaacttcgattgcagaaatattcattttattatcattttgttctagtgcaataaagcctacctttacatcatctttaagcaaattaatcacgtgaatatcatcattatatgtgacttccccctcttttagccttaaagaagatacatgttttgaatctaaatctaaataataaagtctttctttcccaataggtccttcttcttttgtagctgtatgcataaaacctgcacgttcataaacgttccaagcactttggttttcagcgtctactactaagtataaatgtgtaaaatcaggaaataatgcttgaacatactctggtaaaaacatcatcatttttgtcccatatccatggccttgaaacttttcattaactgacaatgaacgtacataaacaacattgtttggtgtatcataaccttcatgttgataataacgatgcaaaacgaagaaccccactacttttccttctttatttaaagctacattagcaattcgattttcatcttttaatgcatcatctaaaacagtttgaggcaatgaagaatatatttgttgtcgttcacttaattcaaattggttaagtgcatctctatatttttcttcaaatacttgaactgtaatatcatcaaaatccttttttataaacattgctttacccctatctattaattaccacttatattatatatgaattgcataattatgactatccgactagttatgtataacattttcccttgctcaacatcattttaccctaattcaactcattacaacctcattttatcaatatctatgtcatcactataatgactaccctatgtttattattaactgtattattaacataagtgtaccttaataagagctttctataaatattcacttgtttttcagttattttactatactataatgagtgacaataattgttatggagtgatagacatatgaagattggaattgatgccggagggactttaattaaaattgtacaagagcatgacaatcgtagatattacagaactgaattaacaactaatatccaaaaagtcatagattggcttaacaatgaagaaatcgaaacattaaagcttacaggtggaaatgctggagtaatagcagatcaaattcatcattcccctgaaatatttgtagagttcgatgcatcatcaaaaggtttagaaattttattggatgaacaaggtcatcaaattgaacattacatttttgctaatgtaggtacaggtacttctttccactattttgatggaaaagaccagcaacgtgttggaggtgtaggtaccggaggcgggatgatacaaggtttaggctatttattgtccaatataacagattataaagaattaacgaatttagctcaaaatggagatcgtgatgccattgatttaaaagtaaaacatatttataaagatactgaaccaccaattcctggagatttaacagcagcaaattttggaaatgtattacatcacttagataatcagtttacatcagctaacaaacttgcctctgcaattggcgtcgttggtgaagttataacaactatggctattacattagcacgtgaatataagactaagcacgttgtatatatcggttcatcatttaataacaatcaattactacgtgaagttgttgaaaattacactgttctaagaggatttaaaccgtactatattgagaatggtgctttttcaggcgctttaggagcactttacctctaatagaaaaatggctggaagcaaattggtatggattgttacttcccttaccatctaacttactttatacgttgaattttttcagtttttagcttcaaacatctttttaatatcaaatttataatgttcgtttataaaaaagcaccccaaaagttaaattaaaatctaacttatggggtgtaaatactataaacatgtcgcagactttttctaatataatcaattaaaatgttgcttcatttgacagtttttgcgctgatacaacagtaccaacaacacctgatttcaaatcaatcgctactgctttattatcatcgcgtaacttgtctaaccattcactaaagacttcaccttcaatttcgattaaatcacattcttcaaaatcttgatcacgtactttacgcgctctactcttaatactccaaacaggcatgatgtgtggtttgttatggtcatcatctgaaatcataataaaattcttttcacctttgtttgtcaatccgtatacttcgtcatattttgcgacatctttaataaactctctcattcttatatcatctaattcagacatcaactcatcagtcattttaactatatctacaatgtttccttcttcaccattattcacattaactaaaactttgtcacctggatcaaagatttcatccatttca

SEQ ID NO: 3616 - DNA, 3353 bp, Artificial Sequence
  Description of Artificial Sequence: synthetic nucleic acid sequence
taggtgcacgaactaaaattcgttacaatggttacacatgttttagaggcatggttgaagatgtacaatttaatgaccaacatgttgcgaatgaatattggggtgttaaaggacgagtaggtatagtcccattaattaatcaacgtgcttattggtttattactgttcatgctaaagaaggagatccaaaatatcaatcttttggaaaaccccatcttcaagcatattttaatcactttccaaatgaagtgagaaatgtgttagaaagacaaagtgaaacaggtatattacttcatgacatatatgatttaaaaccactgaagacattcgtttatggacgtactattttaatgggcgatgctgcgcatgccactacgcctaatatgggacaaggtgctagtcaagctatggaagatgcaattgtattagtgaattgtttagaaaaatatgattttaataaagcgattgagcgttatgataaacttagagttaaacataccacaaaagtgattaggcgttcgaaaaagataggtaaaatggctcaaaagcatcataaattaactgttaaacttagaaataccgcgatgaaattaataccaaatgctttggcatcagctcaaacaaaatttttatacaaatccaaagaaaagtaatatatgatgacatacattgttaaatgataaagttaaatattaaaaatgcagtaattttaataaataaagagctatgaagatagagactcaactcaatatcttcatagctctttttgtgtttatgttgttgaatgcaccagttaattgacaataaactgaggttcatcaccatttaatttttttattgtatcattcgcaacaattttagccatcatatctctagcttcaaatgttgcattaccaatgtgaggtgtaagcacaacgtttttaaatgattttaatgcatcagtgatttctggctcaaattcatatacatccaatgcagcaccttcaatagctttattatcaagggcttcaactaaagattgttcatttactattggaccacgtcctgcattaattaaataggcagtagatttcattttattaaattgttcagtatcaatcatatgatgcagtgatggattatatgccgcattgattgtaataaaatctgcatttttaagtaaagtatctaaatctacatatttcgcaccgatatctcgttctttttcttccttacgatgaggaccagtgtacagaacatccatatcaaatgcgcgtgcgcgtttagctactgcacctccaatttcacctaagcctataataccaatagtttttcctgatacctctctgcctcggaagaataagggtgcccaaccatcaaaacctgttgttctggataaatgatctccttctacaattctacgcgctactgataaaattaaaccgattgttaaatcagcagtagcatttgtcgaagcgtgtggtgtatttgtaacatctatattttgttgtcttgcatattcgacatcaatattattaaaacctgcaccataattcgctataattttaaggttattagcactatcaataatatctttatcaacagaagttgatagtaaactaattaatgcatctgcatgttctacccctttttttaaggtttctttatcaataagcccctcgccatcatacatgtctacctcaaaatgttctttcaataagttaagtcccacttcaggtattgcgcctgcaatataaacttttgtcataaccatcactccttcttttatgaatagtatagtaaaacaagaaagcgcaaacaatcattaaaccttaatgattgatattaataacttattaaacgtaatccaacaactgaaatgatgattaataaaatacataaaattctacttaaacgtgtagattctctataaaaaatcattccaattaatgtaccaccagctgtaccaattcctgtccatatagcgtatgcagtacccataggaatagataccattgcaaattttaatgtactaaaacttaatataaatgctaatcctaaaaaaatgacataaattttattctttgtacgtgatagttcatttaatagaacaacgcccaaaatttcaaaacttccggctatcattagaaataaccaagccatactttttatctcccttctttcgttgcatcagttgtcagttttaatcctattattcctaaaataagggtcattattaaaaagattttagtgaaagtaaatggttggttgaagaaaatcatatcaactaacactgtaccaacagcaccgattccgacaaaaaatgcatataccgtaccaactggtaagtgcttcgaagcatcaatgactagaaaaaagcttaaagcaataaaaaagagggtaaatatccatgtaaacaatgagtgcgcttgatcaagtccagtgacccagatgatttcaataaaaccggctaatataactttaagccattgcattcttttattcctcctattaaagtaatagaaccattttctcaaattcgtaacttcgaggcaatggcttctcacaaacattactattaaataaaaaatccaatctattcttacacaagaatagattggagtaattttaataatttgaatactgattaattcaggtggatgtaattatatgaacttgcttcactggcagagattgttcgtgtgcttatagcgaatggaccaccatcatagttcatttctgatacagtaatagaaccatcattattgacactttcaacgaaagcaacatgtccgaaagcaccttcagatgattgcataattgcaccttcttcaggtgtattatttacagtgaatcctgctgcttgagctgcagttgcccagctatttgcattcccccatgttgatccgatttttccaccagttttatcataaacataccaagtacattggccagaagtatataaatttcctgaattagaaaatgatacttcagttgtactatagttatatgtactttgttgttgattgttattttcagccgcatctgcatgtgttgtgtgacctagaaatgctataccaagtccagctaccaatgtcgagattgttttgatttttttcataatatttaacgcctccaaaaattgtaatatttattagatgtactgcaaattgatttgaaaattattaacatgtttactcatttatgtgtgtgcatgtagttgttcttaacaacactgaatactttaacagatttaattgaaaatatggggattgttacttattcgtaaacaaaataaaaaaacttgattatctatgtaataaaagataaccaagattacgaactcaatttatattgttaatgtgctctttagg

SEQ ID NO: 3617 - DNA, 3497 bp, Artificial Sequence
  Description of Artificial Sequence: synthetic nucleic acid sequence
ctttagcacttaatcgtccatcttctgtaattggtacaatttcaaagtgcacgtgaggcgtttgtccatatgaagctttgcgtataacaaattatctttcccgtattcttgttctaaaaattctttagcctgttcaaaaaaattttgtatttactggtgtctgattactaaaaaattcattatctgatgtaatcattccgtctatatgttttactgcgtcttttctaatttttcttttgcctgtatagttccgctcaattttttcatcaatcaaatcattaaaattttgttttccgtcatttatcaaatcataatttagatgtttttttgaatggtctatatcttcattttcataattaatattttctctttgaacatgatttttgaatacctattgtgtttgttccagtttttaatttttctactctgataatcgaataagacatattaaaatcactcctctacataaaggttttgcgtgtattttataattaaagtctaacagacaagacttattttcaataagtcattaatacatatgctctgccgagagcaaaaaatatcgcttataatggatttaaaccattataagcgtcattacagaaaagactaggtcatgcaaatattgaaattacttggcgtgtttatagtcatttattaaaagtattaaaaagtgaagaagttgcaatgccggataatataatatatttttaagtgctcaacgaaccagacaacttgtctttaatttaatcaatattgactacgcattaatcaaaataattaaaacagacttttacagattttcaacaaaataaaaaagaacgctgatatatcaaggttctagcgtaatttagttaatcagaattaaactgatttttattaatgaacggaaacgtaatttaatattgcgggtggcgtttttatcaatttaacaatatagaggaacgtttagtttaacttacgaggtttaacgatagataacaagatataacaaaaccccgtcaaatcaacgttttgttttacgggatttaacgaggtataaacaaataacggaaacggagggattcgaaccctcgcgccgctctcgcgacctacacccttagcaggggcgcctcttcagccaacttgagtacgtttccatatggctccgcaggtaggattcgaacctacgaccgatcggttaacagccgatagctctaccactgagctactgcggataaataataattaatctgtctctatcaagcacaagtattattatatcaatcttgttgaatttttcaagagttatattaaaaaaatatacggaacatttacacttatttaatattaacgtcccgcatattttaaattgaaacactgtcatcaatttttaaaatcaatagtttgggaaaaaagctaattttcttcaaaaagggagtagcgtgagagcgcctcgaaaatatttagagaagactgattatagtcaatgggttgttcagggttgttagatttcattcgtgattgcttatctaccatgtaataatagatgattgcattcgtatattgatgccacaagctatgaaatgatacattgagcgttaacgaatcaccattcgcaaaaattattttactcttacgatttttaagttctttaacattttcaatataatgcatattaatccatatattttcttcttgacggtctgagtgagttggaaaaaagtaagtaggaaaaagaggcgtaagtaaaataggtggtttactagagattccagtaatacgattcgtttctgcttttttactaatataattattaccataaaatttacatgatctttcgataattctctgtactttaaatggactttctttgcgagtttgatcaaatctgataatttcagtaccatttgtttgctgatattcatcatatttaggtcgtattaccatatcaccttttcgtataacataaatcgtttcgggtaaatgtgtcattaaaaaacctcactttattcgattacttagatggttattaaaactaaaaaactataacctaataatattttatccaagcttaaaataaattcaagttccacttttattttctttttacacatatttcttttaaaatgtcagaatattcattgatttcaaaatttaaaatcagtataatacatgtatattaaataattgaaaggtcgtggtctttatgaatcacaatactgaggtcaagtacactacattagaagattttgtaatgacagtgaacgatttaggcgttgaactcgtcattgaagaagcactcagaaatgcaagaaaagctaaacttaaactcttaattgacgaagcgctcatcaataaaaacgagaacgattttattcaatatactaacgaatttaaacaattggaggcatttttaagtgaataaattagactcgagtcactcatcataaaaggtctattccctactttaaaataagttgagaatagacctttttatcatacttaggacatcaatcttataatttcatacttatctatatccccaaagtagtgatagaaatcataattttgaagtgcctcttctatatgttcaaaatcatgtaagcaacctactaacgcatgttcaagttcggttacatctccttcgccgaagaaatctccaaatagttttgcccgttcaattcttcctttttttacatctaattttatttgaataaaacctttttcaaatttctcttcacgctcaatattatattttggattgctgccatagttccattcccacgtacgatacttttcatcacttaattgcttaatatttttccaatcttcttctgttaatatatattcttcaacttcattttcaccaaaaatagttttaagaataatttttttgaattcttctatatctattggctgttctagaaattcctcaatattggcaactctttttctaacagatttaacgcctttagatttaattttagctggattcacttttaatgccttttgaacttcatttaaatcacaattcagcattaatgtaccatgactaaacattctattttttactttaaccatagcatttccagatattttagcttgccctacttgtatatcattccttccagtcatttcagcattaactcccattgattgtaaggcctgtacaatgggcatcgtaaactttttaaaattatgaaagctatggccatcatcatctgtgataaagctaaaatttaagtttccagtatcatgataaacagccccaccaccagaaatacgtctcactacatctatttgatgtttatcaatatacgcttgattaacttcttcaattgtattctgattctttccaacaataattgaaggtctgttaatataaaataaaaaataactttcttcagaaggtaaatttttaagaacatactcttccattgctaaattgagggaaggatcattaatattattgttgctaataaatttcataacattctctccttaaataagtctct

SEQ ID NO: 3618 - DNA, 2967 bp, Artificial Sequence
  Description of Artificial Sequence: synthetic nucleic acid sequence
ccgtattatcaccaggagataagattatcactagtgaatctactttcggacaatattatcataatgcaattgtggaatcagctgatgttatccaagtgcctctcaaagatggtggatttgatttagatggtatgttacaacaaattgataataaaacgtctttaatttggttatgcaatcctaacaatccaactgggacttacttttcgcacgatgaattatttaatttcttaaaacgtgtcccaagtgatattcctgtattaattgacgaagcatatgtagaattcgttactgctgatgattttccagatacgctaaaattacaggaggattttgacaatgcctttttattacgtactttttctaaggcatatggattagctggattaagagtaggatatgttatagcctctgaagacgccattgaaaagtggaatatcattcgtccaccatttaatgttactagaatttcagaatatgcagcaatcgctgccttagaagatcaagagtatttgaaagaagtgacacaaaaaaatagttttgaacgagataaattttatcaaattcctcaaagtcagcattttttaccaagtcaagcgaattttgtctttgttaaaacttcaagaagtcaagcactttatgatgcattgttaaacgtaggatgtattacacgtttattccctaacggtgttagaattactattggtttaccagaacaaaataataagatgattgaagttttaaaacattttgagtattaaactaacactctttgataacttttgatttaaaaaagatgtgatatcgtagttaaatagattaaacagaaggaaaaaattttgctatactaaacacgtatatcacgaacagggagtgtaagagcatgacgcgacagagaatcgccattgatatggatgaagtgcttgctgatacattgggtgctgttgttaaagcggtcaatgaacgagcggatttaaatatcaaaatggaatcattaaacggtaaaaaattaaaacatatgatacccgagcatgaggggttagtcatggatattttaaaagaacctggattctttagaaatttagatgtaatgccgcatgctcaagaagttgtaaaacaactcaatgagcattacgacatatacatagccacagcagcgatggatgttccaacctcttttcatgacaaatatgaatggttattagaatactttccttttttagatccgcaacattttgtattttgtggtagaaagaatattattcttgcagattatcttattgatgataatccaaagcaattggaaatttttgaagggaaatcaattatgtttactgcttctcataatgttaatgaacatagatttgaacgcgtaagtggttggagagatgtaaagaattattttaattcaattgaaaaatagagaagataaaagtcataggtcactttatttgatggcctatgacttttttattaaacatttttaaagttatctttcataatcatatgctgtttcgataatgcctttaagttcactaattagcggttcttttggattagcagttgtacattgatcttcaaatgctaattcagccattctgtctatagtagagtgaagaagctcttcagttacgccttgtgattttaaattcatatcaataccaactgaacatcctaaatcatacaccgcattagctagagcatccactaattcttcagttgtattacctttgagtcctaaaaattttgcaatgtcagcatagtcagtatctgctctaaagaaatcatatttaggaaacagtgcatgtttttgtggatctttggcattatagcgaatgacatgtggtaataaaatagcatttgttctgccgtggggaataccatattcaccaccaattttatgtgcgatagaatgagaaattcctaaaaaagcattggcaaatgccataccggccattgttgaagcattatgcattttttctcgtgagtgtttgtcattttcttgaactgatgattttagataatcaaaagttaactttattgcttgtaagcttaagcctcttgtataatctgaagccatgacagagacgtaagattcaatggcatgtgtcaaaacatccattcctgtatctgcggcaacatctttaggtacacttaatacgaattgtggatcgacgatagcaatatcgggagttaacgcataatctgctagtggatacttaacgtgtgtctcgctatcagtaattactgcaaaaggtgtcacttcagaaccagttcctgatgtcgttggtatacatataaattttgcgtttttaggtttggtaattttataagtacgtttacgaatatctaagaacttttgttttgccccaaaaaatgaagtttctggatgctcaaagaacatccatattgctttggctgcatccattgccgaaccgccaccgagtgcaataatagtattaggttggaaatttataaacatttctaaccccttatagactgtatgagttgatggattaggttcaacttcgttaaacactttgatttgtggttggttttctcggcgtctcagcacttgttcaactagtgaattgttgtttgacgatatcgtattcttgtagtttttttacacctgtactcatactaggtttactcatttgcagttgttgtcgcatttcatcaagtgtcatacttccttcaaaaaccataatgccatacaagttacctacactacggttgataccatacaaatccatggtttcaccgattgagttgataactaaatctttagcttcttcgatatattgactgtcattgttattataatccatcattgcacctccattttaatccattatttagcttaggtgggacgcaccagatactatgatttttatgatgatttgcctgtaaaggatacatctattactttgagttgtaactcgttcatgaatataaagcataatt

SEQ ID NO: 3619 - DNA, 4015 bp, Artificial Sequence
  Description of Artificial Sequence: synthetic nucleic acid sequence
gattggtaagattaactttaatctattacgtaacgttaatgtcaaggacgataaaacaaatgaagtcggatagtattaacggctaattttagtctatttctaggaggtactgttgaagtatctttagtgatattttcaatacgattattctaataaatgtagttatgagtgattcattatggttatatctttaatccttaaaagttgggtattaaaggtaaggcatatatagtgacgtgactacattagtaataaataataacgtgtatgttaagatgactaaatgaaaaaaagctatacattaaatgatagattttatccgtctatacataaagacgttagctcttattttttcgctcaattaaaaaatttacgattgttggtaagtgtaattgctagagataactatatgcctaaatagtgtttagatacataatgaacgagatatcccattaagcataatacaccgagtgatataaaaactgcagaaaaatttctgcaatgacttttataagataatccttgattttgtgctaaaaagaaactaaaaatatatagtccgattcctattataaaaaagcctataattacgtataacatataaacctctttctatttagttgaactaaattgtaaattttcaatttttatactgatttttagaataattatttgcatctagacaatggttaagtacacgcgataatttgaaagcatagtagttattagcctttatcacctataccccctcactgttacaagtagagggggttaatatatatgtgaatacttatttctgactatctatcaatcagttgaagaatgtaaaaaattttttcatgaattgaataaaaaatataaaaagcagtatatgtattaactaaaattatcacgatctttaattaatttataatatgaatttaaaatatggatatggaaatataaagtgtttcaacattatatgcgtaattaattattagaaaatattgatgtagattaaatttttatagaagagtatttataattatttgcaggaaaaataaaaaggttaatgtagttagcttactatcagcgcacgaatagtggttgatcaatagaaaaaattatagatgcaaagtaaaccatccgtttgtacgggtggttttgattttgtaaggtaaaaactcattattgcaggatatacaagagtattgtctatcgagcgaaatatagaaaggtaatttgaaaatttgagatgatatataactttaaacattgagtagactcaactcaaaaagtaagattagttattaaaaatgtttcgcatgctacttttttcatttaatgatacttgaattgttattaataaataagattattttatcaattttaattgtgattaatgcgataaaatagataaatataatcgaaaataatgtattagattattttaaatgctgtaatagaatcaataaaatgttttaaaaactaaaaagttaacaaaaatttaaccaaattagttaaaaaaattaataacttttatgttattttgaatttagcagttattttttcattctttataagggaaaaatcttatagaggtgatttctttgacaaataataatagaataaaaagatttagcattagaaaatacgcagtgggagtagtatcaattattacaggtgtaacaattttcatcggagggcaacaagctcaagcagctgaaacttcagtgcaacatgcggatgcacacccagaagactcgcaaacaacacaacaattaaaaaatgataaggtagaagaaacgttaaaagcttcaaaacaaggtactgcttatagtcaacaagtacaaacaattaatcaatctaaaacaaatcaaaacaaccaacattctgtagctgaaagtgaacaactgaaaagtgatgagacagctaatcagccaaaaaaagaagaaggtagttcagtaaaacaagacgtccaaccatctaaaaatgtaaatcaacaagacgcagctactcaatcaaatgagagaaaaaatattgacataaaaggtgaaggtcaaacttcaaagacaagcaatcaacatattcagagttctaacagtcataatcaatcaacagaaacaaaagacagcgactcagaagaaatcgatcaaccattagtgaaattacaaaagccgtctaatgattctacatatcaaacacaatcaaaagctaaacaagatagttctaaacagctccctcaagaaaaaacaacaaaacgtcaaatccaaacaactgaaaatgaacagacaactaaagttgattctaaaaaagctaatgacactcaaaatgttgaacaacatactcaagagcctaaaaatgatacatcaacatcacaaaaaaatcatcatcaagtagctacaaaagaacaatctaatagaagtacaacaagggagacgcaaaagcaatcagcaaatgctaatcaaaatcatcagtctacacatcaagcacagttcaaaaaccaatatccagtagtatttgtccatggtttcctaggctttgcaggtgataatcaatttagtttagctccaaaatattggggtggtacaaaatacaatattgacagaaatttaactaatgagggatacaatgtacatgaggcaaatattggtgcttttagtagtaactatgatcgcgcagtagaattgtattactatgtcaaaggaggacgtgttgattacggtgcagcgcatgcagctaaatatggtcatcatcgctatggtcgaacatacaagggcatcatgcgtgattgggaacctggcaaaaaaattcattttataggtcacagtatgggtggtcaaaccattcgtcaaatggaagaattcttaagaaatggtaaccaagaagaaatagaatatcaacgtcaacatgggggtactatatccgatttatttacaggtggtaaagataatatggttgcttcaattactacacttggcacaccacataatggtacacctgctgcagataaaattggcacacgtaaacttgtaaaagaaacgattaatcgtattggtagattaagtggtggtaaagatgtagatatagatttaggtttttctcaatggggattaaaacaacaaccaaatgaaagctacattgattacgcggaacgtgtatccaaaagtaagatttggaatactgaagatcaagctgttaatgatctgacaacgcaaggtgctgaaaaaattaatcaacaaacaagtctaaatcctaatattgtctacactacttatacagggtcagcgactcacacaggacctcttggtaatgaattacctaattctagtgaaattcttttgttgaacttaaccagccgtattattggtaaagatgcaaacaaagaaattagaccgaatgatggtgtagttccagttatatcatcacaacatccttctaatcaagcctttaaaaaagttgatgatcatacaccagctactgataaaggtgtttggcaagtgagacccgttcaacatgattgggaccatttagatttagtaggtatggatgcatttgatttaacacatacaggtagagaattaggtcaattctatctaggtattatggataatatcatgagaatcgaagaagcagacggtattacaaataaataaatttatagtgtaaggaagccctcaatagggaggtcacactgacctctatgttgagggcttttgtattatggttatttatttttctcttcacgtctctttaggatatatgcaccaccgagtaaacccacaggtataccaataagtggtgtgacaatgttacttaaaataaatatgattacagttaaactgagtacgttaaaccaattaattgttaagttttttaaatcctcatatgattgtttgattaattctttgaatttcataataaaaaccgtcctttattaaaataattttgtgaattgagttactaaatagaatgcttaatcatacgactcgagtgtataaatgaaatcatagcaaaaatgaaataaacaattgta

SEQ ID NO: 3620 - DNA, 3149 bp, Artificial Sequence
  Description of Artificial Sequence: synthetic nucleic acid sequence
ccagagaataattcattatattcaggcgtacgcgcgaatttaacgatacgcaatttcataatgaagtggtcaatgatttcttgaacttcttgttcagtgatgtcaccattttgtaaatcacgttcagcataaatatctaagaatgttgaagtacgtcctaaactcattgctgcaccattttgttctttgatagcagctaaatatgctaagtataaccattgcacagcttctttgaagttagtagcaggacggctaatatcaaatccatatttttgacctaattcttttaaatcttgaagtgaacgatattgctctgataattcttcacgtaaacgaattacatcttcagacatttcagtagacattgtgttaaagtctttaagtttttgttccattaagaaatctacaccgtataaagcaacacgacgatagtctccgataatacgtccacgtccgtaagcatctggcaaaccagtaataataccagctttacgacagtttaacatttctcttgaatatgcatcgaatacaccttggttgtgtgttttacgatattcagtgaagattttttctgtttctggatctaattcgtaaccatacgcttcacatgctgcttttgccatacgaataccaccgaatggttgcatagaacgtttgaatggtttttcagtttgaacaccaacaactttttctaaatctttgtctaagtaaccagcgtcatgagaagtgattgtcgatgccactttagtatccatgtcccacatgccaccgcgctcacgttcttcttttgataattgcattacttgatcccataaagtttcagttgcttttgtaggaccttctaaaaattcatcgtcaccttcatataatgaatagttcaattgtatgaattctctcacgtctatatttttattccaacgacctgttttaaatccttgccaagcattagtatgattatttgtttctaacatactctccgcctccatttcgtattgttaacgttttcaacggcagtataccatgaatcatgtgattaatttcacataatttgtggcatattttctactaaagtttgtataaattacgaacctgtgacagaagttataacagtttgtgaatcaattatcctgttacataacagttttctgaaaaattccttctataatgaaacctcatagcaagaaaaattcactatcttataacgaaaagtaaaacaaaacctgagacaattgttgtctcaggttttgtttatctatcattaaattagaaactggcttagtctttttatctctgttactaataaggctaaattgaaaaacatatcatagatattacagatgtgcgtttgagtgtcctaacacataaattttatagacagttcaacttagagctcataagctatatggggattgtactcaaaataaattctactctacctcatttttcacactcttaatttacctctttattattattgatttagcttctttctttttaaaaatccataaaactagaattaaaaagatatgaatgtaaaaatttcttctattgtaatcaaaaagcgtgaatattctaatgcaataaaattttgatacaatttcatttctttcgttttaacaaagtaaataaatcgattatttttacatgtacgggagtgtaacctcagacaaactggaggctcccttaaaatttttcgttatttttatgtagttctgctatgaagctttagaaacactttgtccttgtctaattttacttagtatcattgcaatagtaaccaataaagcgcataaaatatacatccatttaaatcctaccgtatctgatattggccccattagcacacctcctagtgaaatccctaaatctgcacatgctataaacaatcctaataacatattacgtcctatctttggtaagacaaaacttaaatacgttgtcaatgtaggataaacgagcgcttgtgttattccaataaagattgcacttatatatacaaatatactcaatatttgtggtccaaaagctacaatgattgaagcaatcatcagtaacgttaagacaatcatcataaaccggtgatgccataaaccatcagatggtacatacttacgtaaataaaatctagctatcactactgtaatggcttgaattgtaaggaaaatacctgcattcgcgaaaccttccctaactgtatataatggtataaaagtactcatcgcaccaaacacgatagatgacaaaatcataatcataccactgcagaagagtgctttatttttaaaaaattgaacatatacagtcattgcattaaaaggtaagacttcttcttttggtgctacctctttttgtgtatttgcaaaagtagttctataaccaaataaggttgttgttactgcaataaaaatcataacaatagcaaatatggtcatattttccacgtgccaaatcccaactgcaattaatggtcctaataaattgggaattgttgaaaacaatgaatagagagatacaccttctgaacgatatttttcaggtaaagcatctataatacccaattgtaaagacattgagaagaatgccgtacatacaccttgcatgatacgtgcaaccaaataaccttcaagtcctgtaaacccatataataccagtgccatagcattaatcaataatataatacgcaatactttaatcggtcctacacgtgcaataatttgaccagcccaagggcgaaatagcattgccgttagcatgtaagctcccattacaattccaattacggtattcgtcgcctccaagtcatgtcctcttagaggtatgaaaacattgagtatggcattcgcactaaaaaacatcaatgttaaaatatataatcttaaaaatggccaagacatggcacctttcatattgtcactccttagattgatagttgtttatcaatcagttctcttgtataaccattttgttgcctatgcaattcacttatagatgtcctagcttcgatacagccatttttaaaaataagcaagtcatcacatatatacgtggcagcttgtatatcatgagtaataaaaatataactcagctgatgtgagtgacgtaaccttttcaataaatctaatatttgtgtttgcatagacatatctaat

SEQ ID NO: 3621 - DNA, 3461 bp, Artificial Sequence
  Description of Artificial Sequence: synthetic nucleic acid sequence
acgatgaaatgtttatgttggatgcaggattaatgttcccagaagatgaaatgcttggggtagatatcgttattcctgacattcaatatgtcattgaaaacaaagaaagattaaaaggaatatttcttacacacggtcatgaacatgctataggcgcagtaagttatgtgttagaacaaatcgatgcaccagtttatggttctaaattgacaatcgcacttgttaaagaagcaatgaaggcccgaaatattaaaaagaaagtacgttactatactgtaaaccatgattcaattatgagatttaaaaatgttaacgtgagtttctttaatacgacacatagcattcctgatagcttaggcgtatgtattcatacttcgtatggttctatagtttatactggagagtttaagtttgatcaaagtttgcatggacattatgctccagacttgaaacgaatggcagaaattggtgatgagggtgtgttcgcattaatcagtgattcaacagaagctgaaaagcctggatataacacgcctgaaaatattattgaacatcacatgtatgatgcttttgccaaggttaaaggtagacttattgtatcatgctatgcttcaaacttcgttcgtattcaacaagtgcttaacattgcaagtcaacttaatcgtaaagtgtcatttttaggtcgttcacttgaaagttcgtttaacatagcacgtaaaatgggatactttgatataccaaaagatttattaatacctattaacgaagtggaaaattatcctaaaaatgaagtgattattattgctacaggtatgcaaggtgaaccagtagaagcattaagtcaaatggctcgcaaaaagcataaaattatgaacatagaagaaggagattcaatattcctagcaattactgcttcagctaatatggaggttattattgcagatacattaaatgagttagtgcgtgctggagcacatataattccaaacaacaagaaaattcatgcgtcaagtcatggttgtatggaagaattgaaaatgatgttaaatattatgaaacctgaatattttgtacctgttcaaggtgaatttaaaatgcagattgcacatgccaaattagcagcagaaaccggtgtagcacctgagaaaattttcttagttgaaaaaggcgacgtgattagttataacggtaaagatatgattttaaatgaaaaagttcaatcaggtaatatacttattgatgggattggcgttggtgacgtaggtaatatcgtattaagagacagacatctattagccgaagacggtatttttattgcggttgtgacattagatcctaaaaatcgacgtattgctgcaggacctgaaattcaatcaagaggcttcgtctatgttagagaaagtgaagaacttttgaaagaggctgaagaaaaagtacgtaaaattgtagaggaaggtcttcaagaaaaacgaatagaatggtcagaaatcaagcaaaatatgagagatcaaatcagtaagttactatttgagagtacaaaacgccgtccaatgattattccagtcatatcggagatctaatcttaatagaataatatttaaagaggttgggacaatttagtaaagcaaaatcatgtttaatgactttgttcaacaattagtttttcttttaattatttatcagtttctaaaatcttagagtttggtaaatatgaaagtgaatctaaataatctaagttgttcttgcctctttcatcttattaaaaatacatataagtatatattcaaatgggatgaatactctaaatatagtaatgatgagagattaaaaaagaaggtgtaggtattgccacaagcaaaaaaaagaacatcgacgaagagaaagggtaataaaaaaacgaataaaaaaaagcaaaatgaaacgcctttaagatatatattctcaataattgtagtaattcttattatactaggcgcttttcaattaggaatcattggtagaatgattgatagcttttttaattatctttttggtatgagtcgatatttaacttatattttagtacttattgcaacaatttttataacatactctaagcaaatacctagaactcgacgtagtatcggtgcaatagttttacaattagctttgttatttatagcgcaattgtattttcatttttcacataatatcacttctcaaagagagcctgtactgtcctttgtttataaagcttatgaacaaacacattttccaaattttgggggaggcttaataggtttttatttacttaaactatttatacctctcatatctattgtaggtgtaataataattactatcctattactagcttcgagtttcattttattacttaatttaagacatagagatgttacaaaaagtttattcgacaacctcaagtcatcaagtaatcatgcatctgagtcaataaaacaaaaaagagaacaaaataagattaaaaaagaagaaaaagcccaattaaaagaggcaaaaattgaacgaaaaaaacaaaaaaaatcacgtcagaataataatgtcattaaagatgttagtgattttccagagatttctcagtcagacgatattccaatatatggtcataatgagcaagaagataaaagaccaaatactgctaaccaacgtcaaaaacgtgttttggataatgaacaatttcaacaatcattaccaagtaccaaaaatcaatcaataaataataatcagccatctacaaccgctgaaaacaatcaacaacaaagtcaggctgaaggctcaatatctgaagctggtgaagaagccaatattgagtatacggtgccacctttatccttattaaaacagcctactaaacaaaaaactacttcaaaagctgaagtccaacgtaaaggtcaggttttagaatctacactaaaaaactttggagttaatgctaaagtaacacaaattaaaatcggtcctgcagttacgcaatatgaaattcaaccagcgcaaggtgttaaagtaagtaaaatagtcaatctccataatgacattgcattagctttggctgcgaaagatgtacgaatagaagcacctattccaggtcgctctgcggtaggaattgaggttcccaatgataaaatctcacttgtcactctaaaagaagttttagaagataagttcccatctaagtataaattagaagtcggcattggtagagatatttctggtgatccaatatcaattcaattaaatgaaatgcctcacttactcgttgctggttcaacaggaagcggtaaatcagtttgtattaatggtattataacgagtatattactcaacacaaaaccgcacgaagttaaacttatgttaatcgatcctaaaatggtagagttaaatgtttacaatggtattcctcatttacttataccggttgtaacaaacccacataaagcgtctca

SEQ ID NO: 3622 - DNA, 3249 bp, Artificial Sequence
  Description of Artificial Sequence: synthetic nucleic acid sequence
atgtttcacaaaattgagtgaatactgcagtgactggaacgtttaattgctttaaataagtgataaagtcatcaactattacagcttcaccccagttaacatcatatacatgtacatgattataataagtttgtgcgatttgtttaaagcgatttccaaatgcaccagaaacaattatcacaatatgatcgtcaggattcgcgatgttaagcatacttgcttctaatacgctagtgccactagatgtaagaataagtacttcgtttttgctaccaaatactggctttaaacctttaaatgcttcactagcaatttcctcaaagtcagtagaacgatgacctaccattggtaattgtacggcactcaagatttgttccggtacaggagttggtccaggtgttaataataaaggttggtaatactgcattgtacattcctcccataataagatttatttattttagcaaaaattctgaatatttaaaacccttattatatagctatcacataattaaaacgtttacatgtttaaaatttgtgatagctatatgatttatattaaattaggttcaattgaaataatgacattattccgtattgcattagatatcatacaattattatctgcaatcactaataatttatctaaaatacttttaagcttttctgtttgagaagagggtactttaattgagggataatgtgtaatacgttccattttaaattttttattttcaaacgaggctgtacctattgactgttgattaatttttacattagtaaaaccactcttttctagtgttgcagcgagtgaaatgatgtaacaagatgatgctgcacttactagtaattcatctggatttgtgccttctccttggccaccgagtgaagaggggatggatatattttcattgataatatctcctcgaagtttacctacttcttcgcgtccacctagccattcagttttaactttaaaatcatgtctaaccatatgaattgacctccaatttaattatggtaatttaagtttagggcaaattaaataagtttaaaagaaaggtgactttgatgaaatttcgacgtccaaatcaacatttccaaatcgtagcgcatagaggattacctgaagattatcctgaaaatactattatcgcttatcgacatgcgctcatgttacatatagatatgttggaaattgatgtacattacacaaaagataaagaacttgtcgttatacatgatgatactatcgatcgtacgtcaaatggtaaaggtaaggtttctgattttactttaaaagaattaaaagcgttagattttggtttctataaaggagagaaatttaaaggggagagtataccgacttttgatgaagtgttagatttagcagataacttttcacaaaaattattaatagaaataaaaaagcctagtcagtatccaaatattgaaaatatgattgttgataaattgaaggaaagacaaatatctaaatctaaagtgattttacaatcattcgattttgattgtgtaaaaaaattgtcagcaatgaatttagattatgaattaggtttattaattagtaagaaaaaatattggcacaagttaccaaatttcaaaaaaattgccaaagttgctgattatgctaatcctaattatcaaattgtttcgaagaaatttatgcaacttgctcatgaggaagagttaaaagtattaccttatactgtaaataaattaaaagaatcacaaaaattaatagatattggtgttgacggtattatttccgtatccatgaaagaatagcagtgtttgatttgtattttcgaaaaatgccatttaatagtggatatgcggtattcaacggattgaaacgcgttgtgaatttcatcgaaaactttgggtttacaaatgaagatatcacatatttaaaatcgataggttatgaagaagattttctaaattacctaaaagatttgaaatttacagggaatattaaatctatgcaagaaggtgaaatttgttttggtaatgagccattattaagagttgaagcacctttaatccaagcgcaacttattgaaactattttgttaaatatcattaatttccaaacattaattgcaactaaagccagccgaattcgtcaaatagcaactcatgacactttgatggaatttggtacaagaagagctcaagagatcgatgctgcactgtggggcgctagagcagcctttattggagggtttgattctacaagtaatgttagagcaggaaaactttttaatatacctgtatctggcacacatgcacacgcactagtacaaacatatggtgatgagtatatagcattcaaaaagtatgctgagcgacataaaaattgtgtgttcttagttgatacttttcatactttaaaatcaggagtaccaaccgcaattaaggttgcaaaagagttaggagatactattaattttataggtatcagattagattctggtgatattgcgtacctatctaaagaagctcgtagaatgttagatgaggctggttttacagaagctaaaattatcgcatcaaatgatttggatgagcagactattacaagtttaaaagcacaaggcgctaaagttgacggatggggagtaggtacaaaactgattacaggatatgatcaaccagccttaggtgcagtttataaattggtttctattgaaacagatgatggcacaatgagtgatcgcattaaattatcaaataatgctgagaaagttactacaccaggcaaaaaaaatgtttatcgtattattaataataaaacaggcaaggctgagggcgactatattacgctagaaggtgaaaatcctaatgacgaatctccattgaaaatgttccatcctgttcacacttacaaaatgaagtttattaaatcatttaaagcggttaatctacatcaatctatatttgaaaatggcaaacttgtataccatcttccagatgaatatgaagctcaggactatcttaaaaataatttaagtattttatgggaagaaaataaacgatatcttaacccgcaagattatccagtagatttaagcactaaatgttgggaaaataagcataagcgtatttttgaagttgctgaacacgttaaagagatggaggatgaaaatgagtagattgcaagatgttgtggttaatgaaatgaaagtaaaaaaacaaattgacagtgtagaggaaatccaggaaatt

SEQ ID NO: 3623 - DNA, 3166 bp, Artificial Sequence
  Description of Artificial Sequence: synthetic nucleic acid sequence
aactcgttctggttcatttaaatctaattcattaggtaaaccagtttttaccgcgcaaaatcgacatgctcttgtacatactgcccctaaaatcataaatgtagctgtacgacgcgcaccccaacattcgtgaatatttggacatttagcttcttcacacactgtgtgtaaattcttctcacgcatcattttcttaagaccagtataattatcgtttgtgttaagcttaatctttaaccaatccggtttacgtaaaatttcttcatttctagtcgccataacaacgcataccctcctgtttaatatatcttcgtttattataacatatcggcattaacattaaattaaaattcaatatacgtttcttttataattttagtaatttctctttaaaaatatcacgtaaaaattcaggcataatataatctgtagataacccctttagcaatgggaaatatcttccaaatgtatacatatcaacagtacctaacgtatattgtttatcattttgaatctcttcatcgcctataaaataacggtcttctgactcaataaagcctagattatataaaatatatcctccaaatatatcccctctaaaaccaagaccttgtgcatgttcgtgcatatattcttgcttttggcttttttgaatcacttgctttaattgtttaccggttaatcgaactcttacaatattgattggatggggtaacatgcgatgtatatcatattccgtcactttatcagcttcaatgccattaactataagtccagcatttacgattgcacaatcagcccttgaaaactcatatacactttcagccagtaaatacgatgttcttgtaacaacatctgttcttttgactaagttcacatgatgattaactactggtttacttagaagtgctcttccttcttcttcaaaatgtgtctcgactaagggaagtgtttcaataggatgaattttggcgattttatcaacgatttttccattttcaatcgtaatattaacttcacctaaataatagccatattttccggcagctgccatcaaaacaccattgtttatttctccatgttcaaaatgatgatgcgtatgactaccaaagataacatctatttccggaatctcttggcataacttttcatcaaaaaagataccgacatggctcataaccattaaaagatcatattcaccttgatgtgcattgatttcatctttgattgccgctaatgggtcagtaacaatccaatccagtgctcgataaaaaggtgtgaacggtgccgttgctgcaacaaataaaatacgtgttccttttatttctttgatatacgaagaggtaatatgatgtggaagatgtccctcttcatctatgacattcgtgcaaatcactttaaaatccgcgtcgttatatagattttgtaaagcatcatgagaaattgtcattccttcattatttccaatggttgcaatatcacaatgtgcttcatttaaaagttctatatttttatgtcctaccgtagcttctgtcacaggtgctgataaatcaacatggtcacctatatctatatagagtgagggatgttcaagttgcggtctatgttttgccatataagcttgaatacgagcatattcatttaaatgactatgaatatcattcgtgtgatatattgttaattccataacatgatccccctctttaaaatttatatacttaattgtactttagcattaaagaacaaagtctcaaagcataactacttcgcatttaaataaaagatttaatgattaaatatacacccatgataagcattactgttctcaataacattacaactgtgtcggatttcatagatcgattgaccctcacacctatttgtgcacctataacacttgaaataatgagaatgatagaatagccccaagccacatgtccttgaaagatgtgccctattgaactcatcacacttgaaaagaaaatcatcatcatacttgtgcctactgcaacatgtggtggaaatctaaagacgatgagcataagaggggtcatcaatgcacctccacctatgccaaacagtcctgttaatagcccaataaataacgttgttataaaagcaaacaggggtggtacactataacggtatgttttcccttcagcatcaacatatgtacgcgcatatttaggtttgtcaaaaattttaaaaggtttgattttgtgacgaatcatcagtaatatcgacacaaatatcataaacacgccaaagtataagttaaacgaatcaagtgtaaggtatctacttaaaaaagaaccaaccaaagatccaggtagtagtccaaatagaaatatcgaaccattttttatatctacttgtttggtttttaaatatcctaatgaggaagataatccagtaacaatcagaataactgaagaagtacctattgcaatttgcgtcgtaataccatgtagaagatgatggttaacgcctaaataaacaagtgtggggacgatgatgattccaccaccaataccaacgatagatcctaaaatcgctgataatccccctattaatattaatagaataattgttaataacatgacattcgcctcttaaaatagttttaattgttgcggtgctaaaccttcataatcaatgtctaaaatattttgatactttttagcattattagctgcatgaccgccagagttattattaaaaattacatatactttcttagccttttgattaagtatttcgactttacgagccaagtcagctaactcatcatcgctataatcatataaatatcttacatctcgccattcttgatcagtcatatcttttttagtccaaccataatgattacgtccatgataacgtacaaaagcaatttcactagtaatcctatttactaaaggaacgctcccctctttaacttgaggttcatctaccactgcatgaatgatttgatgttgtgttaagaaggataaagtttgttctttatactgattgtcaaaccatgattgatgtctaaattcaatgctcatcggaatatcagttaattgttttctcacatataagatgtaatttatattttggacgttacaatcaaaccaaggtggaaattgtacgagcaccatcgccaatttattatgctctttta

SEQ ID NO: 3624 - DNA, 2921 bp, Artificial Sequence
  Description of Artificial Sequence: synthetic nucleic acid sequence
tcttctattaataaaataagtaacacggcgatggatgcagttaacatcgtattaattaaatccccaattcccgcaattacccatgtaccttgtttaaattgagctgcaccactaccaacatatgaggcacttgctactacagctattgctaaaggtgtcatattgaacttcatagctatcaatgctccaataagcgctggcactgtaaattggatggcttgaacgacccctaataaagttttgaaaataggatgatattgcataaagtatttaaaaatttctcccaaaattgcatttggaacgagtccggctactattccaattgctacccctgataacactctaaaaacaaaatcctttggtccatcgatattttttatcgtcgacataagttaaacctcccaatgtgctaagtgaaattatgtataaaaagagtctcgaagcccatatatgattcaattaaatctttcttagatgctgtaacttagagggataattagtgaaatgcatatatgacattcaagactatgctcaatagtatatcatatttttctgaaaattaagataacttattcgacatttaattcaaaacattaatttttttaattaaaatacacttcataacctttagtttaaatactaacgttatgaagtgttagctaactcgtcctatttgaaataataagtgctttactcttcctcatttttaattttagctttgcgagattcttttttatatttttgatacatcaatagcatgataacaaaccatacgggtgcagaaagtacggcataacgcgttgcactattaatcaatagtataataaaaataaatgcaaagaaccctaaaatactgtaagccatgtattttccgccccacattttatagttactttctttatgctgtttcggttcatgtcttaaataacctagatacgcgatcataataattgtccaaatcataatatttaaaacagttgaaaatgttgtaatttgtacgaacactttagtcgcatctttaaaaattgcatttaacacgactgaaatacttaataagccacatgtcactaaaatagcataatgtggtacgccgtgcttattggttctatgtaagaatgctggaccttgctttcttccagctaatccaaacatcgtacggctattagcaaatataccactattacaagaagaggctgcagctgtaagtacaacaaagttaataatacctgctgcaaaagggattccaactaatccaaacattttaacgtatggactgtcagcaggattcaattgttgccatggtacaacagacatgataactgccaacgatcctatataaaataataatattctaaacggtacattattaattgcttgaggaattgttttgtgaggatctttagtctcccctgcagttattccaatcaactcaataccaataaatgagaaaattgccatttggaatgacatgaagtatacatcaccttacggtttagcagagacctgtgtttttgataaacagtcgcttgggcctattcactgcggctcttctgggcgtgaaccctaaagagcaccccttctcccgaagttacggggtcattttgccgagttccttaacgagagttcgctcgctcaccttagaattctcatcttgactacctgtgtcggtttgcggtacgggcacctgttatctatctagaggcttttctcggcagtgtgaaatcaacgactcgaggaaacaatttcctctccccatcacagctcagccttatgagtgccggatttgcctaacactcagccttactgcttggacgtgcactccaacagcacgcttcgcctatcctactgcgtccccccatcgattaaaacgatactaggtggtacaggaatatcaacctgttatccatcgcctacgcctgtcggcctcagcttaggacccgactaacccagagcggacgagccttcctctggaaaccttagtcaatcggtggacgggattctcacccgtctttcgctactcacaccggcattctcacttctaagcgctccacatgtccttgcgatcatgcttcgacgcccttagaacgctctcctaccattgtccaaaggacaatccacagcttcggtaatatgtttagccccggtacattttcggcgcagtgtcactcgactagtgagctattacgcactctttaaatgatggctgcttctaagccaacatcctagttgtctgggcaacgccacatccttttccacttaacatatattttgggaccttagctggtggtctgggctgtttccctttcgaacacggaccttatcacccatgttctgactcccaagttaaattaattggcattcggagtttgtctgaattcggtaacccgagaggggcccctcgtccaaacagtgctctacctccaataatcatcacttgaggctagccctaaagctatttcggagagaaccagctatctccaagttcgattggaatttctccgctaccctcagttcatccgctcacttttcaacgtaagtcggttcggtcctccattcagtgttacctgaacttcaacctgaccaagggtagatcacctggtttcgggtctacgaccaaatactcaacgccctattcagactcgctttcgctgcggctccgcatttgctgcttaaccttgcatcagatcgtaactcgccggttcattctacaaaaggcacgccatcacccattaacgggctctgactacttgtaagcacacggtttcaagttctctttcactccccttccggggtacttttcacctttccctcacggtactggttcactatcggtcactagagagtatttagccttaggagatggtcctcccagattccgacggaatttcacgtgctccgtcgtactcaggatccactcaaga

SEQ ID NO: 3625 - DNA, 3407 bp, Artificial Sequence
  Description of Artificial Sequence: synthetic nucleic acid sequence
taatagtgttaagagaaatcctatgattgttccaattaaagataatatgaaagtttgagcaaaaaccatttttgctaaatagccgttggtaaagccttgtgctttaagtacaccaaataagtgtgttttttggagtgttataacatataagaatacgccaattactgttgctgaaattataaataagaaaacgatcataaagttcaaagttaaattttgagctttatagccaggaagatttttaataaactgcgatattgaaatgctttctaaatctttgttaagtttatgatttttccaatttgagtctttgattactatagcatttgttttatcttttgataatttgggattaagtttctcaatggtttgattattagagaatagcacgggtgaagcattatatttagcactttctacaatacctaccacttttagcttttcgtctgattgagataaagataagatgtcacctattttgaaccccttatcagctaatgtttgatcaatgactatttcatttgaactttcaacttgatgacctttaattataggcggaattaaaaatgatttgtgtgtaacgccaaaaagtaacgcattttcttcccgatgatggtttgagataataactccttgttgttttaatgtggttgatttttcataagtattttgtactttggatatattgaataaggattgctctacggtttgattagcatctttttttaatatgatagcgtctgcattccacttttctataccttcagtattcattttaataaggccgtttgcaagtcctgacagtaggaataataaataacttataagtactaatatgccaatgactaaactgaatttaattttatttctttttatttcattccaagctaaaaacatgaatgatgcacctcaattttttacgtaatcgttggtagagaaaataatcaaatagaattagttaaagaacaattatatttgatataagtatggttgtaattgaaaataaaaaataggacagaattcatgttgaatcgactgtcccactcttgtgaatgatattacttttagtgattctttgacatagctatcttattagacaatattaagtttattgacaattatcatcaaaagcatcttttaaatccatagctatatcattgatgtcgcgcccttcaatatgttcgcgaggtataaaatgaactaaatgttgacctttaaataatgcgtatgagggacttgaaggaacttgttggatgtaatctctcattgtttgtgttgcttctttatcttgaccagcaaatacagttactttatgatctggtttcacttcattttgctctgcaactgcaacagctgctggacgtgctaatcctgcagcgcaaccgcatgttgagttgattacaacaaatgttgtatcatcattatctatattttgcatatactgattgacgtcatcactcgtttcaagacttgtgaatccattgtctgttaattcagctctcatttgttgtgcaagttctttcatataagcttcgtatccattcatcataaaatgctcctctactaataattgtttctaattgtactatatagaaaattaattgcttttagcgaacgtgttttctatttgtggtaataattcattccagttagcgttatcttctttatcaattgatataaaatccaaaacatagaatattgatttaacaccttctatttcaaataatcgattaataaattcaggttgaccttcttgagcggcagtatatgttgtagatgagttatcttgacgtggttcactcaacgaaactttcattgtattatgattaggtgtttctgaaattcctataatctccatgtgacatcctcctattgtaactcattaccaatttgtttaatttgtttaccgaccgtacattcatttatacaaaaatgatgtgcttgtgttttaccgtgagtttttctattgtgcttttttaatggacattggtgacaataagtattcatcaattggtcgatgtgttgaattgcttgttgttctgtattagtgagtatagctttcacttcccttagctatagactatttatatttatacccatttcacatgtttgtattatagcatttataagttgggaatttgaaataatcaattttagttttgagaaaactgataacttagacatttgtttaagttattatttatttactcttcttttttagcattgcattaaagatgaattttaagtaaaatagtatagttaattttggcggtttctaaacacccgctttaacaaaatttaggaggaaagttatatgtataatgaaatatttggtattgcgtcatttattgttacattcgctttaatggtactgatgtatcgctgttttggtaaacaaggactaattgcttgggtagcaataggaacgattatcgctaatatacaggtcataaaagcggttcatatttttggtattacggctacacttggaaatgtcatgtttgcttctatatatttagctactgatatattaaatgacatctatggtcgtaaagttgctaaaagagcggtgtggcttggtttctcttctaccttagtaatgattatagtcatgcaaatgtcattgcattttattcctgccccagtagacaatgcgcaaaactcattaaaaatgatttttgatttagtgcctagaattgctataggttccattattgcttatatcataggccaacatattgatgtatttatattcagtatgattaaaaagatatttagctctgataagaccttttttattagagcatatggtagtaccattttaagttctatcattgataccggtttatttgtttcaattgcttttattggtactatgcctggtactgctgtttttgaaatatttattaccacttacttgttaaaactagtgtcaactatttttaatgtaccatttggatatatcgctaagtcactatatcgaaaaggaaagatagaacaactagataatgggtattgatatttattgtatcagaaatatagatatacaaaagcgaatcagagttccatgtgctgaactagcttcgaaattcaatttggtttgtccgtagaattttcgagcaaaattctcaatgataggacctacgaccaaagttaaataaatcttaatataagggctaaatttagacatcaatgccctatttgttagcagaacctgaagtatatatgttatcttaggttctgtttgtttttgatttaatttttagtgttttgtctttttagtttgatacaatagaatagatacattttagtgagtagacaattctgaagaggagtaaaagtaatggctaaaatacattttgatgctgcgactaaaggaaatcccggccgaagtgcttgtgcgattt

SEQ ID NO: 3626 - DNA, 3774 bp, Artificial Sequence
  Description of Artificial Sequence: synthetic nucleic acid sequence
tataacattacgactttacttgcttctgcagttaaaaacttaccattaattaagtattcatttgaccaagtcatcatgacaaaagaaggttgtatgaaccatttacgtacgttctatcctgaagcacgtgatgaagattggcaagtttatacagctggtaaacgtgtacaagttattaaagatactgaagagaatggtaaaggatttatccaatttggtactgaagtggttaattctgaagaccactcagttattgcattactaggcgaatcaccaggagcatcaacttcagtatcagtagcactagaagttttagagaaaaacttccctgaatacgcgaaagactgggaacctaaaatcaagaaaaatgattccttcatatggtgaatcacttattgatgatgttcaattaatgagaaaaatacgtaaacaaacatctaaagatcttgaattaggattctataataaagcaaaataaaaagatatagcgttatctattaatccatattaggtaaagttgctgtatttaatcttataaatgcctgagacaatgagtgtctcaggcatttttatatattaacagtcaatggtgttaatttgcagatggaagggattcaaatcaagatcgttaactatcatatcctttgataaggcagcgaaaaattcaatacaaagtatatttcatatcttttctttaattgatagataattaatgaaaattcattttttaaaattaataaataaaaatatgtatagataactatatattcaaaaccttaaatagtgtattataaatttataaatagcaatttaaaactaagtaatatttaattgttatttctctgtatataaaaattaaaaggagatagaatatgaaaaaattttggggaattttattaattgtgatgtcaattgctcttgtgggatgttcgaatagcaatgattcagatcaatcttctaatgaaaagtcatcatcaaaaagttcggagaaaaaaacggatgtggcgactgaatatacaaaagagaacgaatataaagaactagaaaaagaagctaaggatcttaaacaaaagccagttcttaatgaaatcgatgcacttattacagaaaaaggttttacaaacaaaacgggattgcaaggctgggaagactataaaaaattagtggataaggtaacacttgcagattataaatacacaaaagaatctaaagggtcatctatagaagaagttaataagttctttaaagataaaaaaggtgtagagattaaacgaatgaaaagtaaggaaaaaaatattaagcatatcaattatatgtatgtagatccagatggtaaaaaagcaggtaaagataagcaacctatgtcctacgctcaaatacttgcaacatttaaagaaggtaaattagtagctacaaatattcaacctggattttttgctttagacaaaaagaaaatggttaaagctaaagacttagaaaaagttaagacattggaagatttaacgcgtttgaaagatcctaaagcgacatcatatggtattttacagacgaaatataaagggaaaccatacactcaagtttcaatattaggcagtgattctgatgaagagaatgatatttcctcagccatcttagcttattatctattttcaccaacggaattagatagtgacgataatcataaatacgttgaagttgcatcagcgccattcttaagtgctcaaaacgatttttcatcttatcaactaggcgtatttaaaaaaattatcgaaagtagtatgtcgttcgatgaataatcaaaggacaatatgtgtgtaaagtataaaaaaaccgtgtggtcagattaatctaccacacggttttaatatttatctagacaatgtgatgttgtttagataaaacattgttcgttatgaactgataaatgattagtttttatttactgacgcatcatagattgaatctacagcatcgcctaatgctttatcgaattcttcttgtgattggctagcacgtaagtcacttgctaatgcacgtgagaagcttgcaattaattcatcgttatcttttaacaatttgttagcttcatctcggctgtaaccacctgataatactactacacgtacaacattagggtggtcagctaaatctttatataagttagcttcagtaggaatagttaattttaacataactaattgatcatcgtttaatgaatctaaaccttttttgatttcagcttttaaaactttctcaatttcagatttatctttagcattaatattaacttctggttcgataataggtactaaacctttagcgatgatttttttagcgaattcaaattgttgttcaacaacatctttgattccttgttcattaagttcaaggatgttagaacgcattttagtaccgaagatatgacgttcatttgcacgatctaaagtttcatctaaatcatcaataggtttcattaattgtacgccatttttctcttcagcaagacctttgtcgacttttaagaaaggaacaacgcctttgtccgctaaatagtctccagtgtatttaccttcaacttcgcgatccatagtttgttcgaataaaatcgcacctaaaattttatcaggtgaaaatgaaggtgaagttacaacacgtgtacgcatatcgtgaacaagttggaacatttcgtcttcattactgtattggtcttcattcacaccatattctttaagtgctttaggtgtactaccaccactttggtctaatgcagcaatgaatcctttaccatgagtcattttttctaattgttctttattcatactttccactccttaatataactttcatatacagtatgataaaaattactttttatctcaagtttttctacttgaaaatgatgaaaaatcacataattgttgtaattaactatgatttagatgtgtgaaatgtaaataaatcgtaacagtggttttccttaaatgcatcatatcgtcagaaacaccgatgaatagaattgaaaaagtttaactggtatttgcaatttaactatcaactgataaaggttaaatcaacctaggacaacaatagataattactttttcctatatcagattaagagattaaaatatcatttccgtacacaacaaggaattgaaaactatactgacgaggaagcagctaaaattgtaggtatggatagagattcttcacagagggatttatataatgctatcgaaaatggagattatccaaaatggaaaatgtacattcaagttatgacagaggaacaagctaaaaatcatccagacaatccttttgatttaacaaaggtatggtataaaaaagactatccactgattgaagtgggagaatttgaattgaatcgtaatcctgagaattattttcttgatgtagagcaggcagcgtttacgcctacaaatattgttcctgggttagattattcaccagataaaatgctacaaggacgtttattctcatatggagatgcccaacgttatcgtttaggagttaatcattggcagattcctgtcaatcaacctaagggagttggagttgagaacttatgtccatttagtcgtgatggacaaatgcgtttcttagataataaccaaggtggaggcccacattattatcctaataatcaaggtatatatgagtcacagcctgaacacaagaagccaccattcccaacagatggtgatggttatgaatataattatcgccaggatgatgacaattactttgaacagc

SEQ ID NO: 3627 - DNA, 3674 bp, Artificial Sequence
  Description of Artificial Sequence: synthetic nucleic acid sequence
gttaggggagaagtcacatgtatagtgtcagacaagcaactgaaaaagatgttgtagcgataagagatgttgcgacaaaagcttggtataacacatatttaaatatttatgctgcttcaacagttaatgaactgttggccgcttcatataatgaaacgcatttaaaaaagagactaaatgagcaattatttttagtggcagaagaagatagtgagattgttggttttgcaaatttcatttatggtgaagagctttatttatctgcacactatgttagacctgaatctcaacatagaggttatggaactcgtttgctagaagcggggttgaaaaggtttaaagaccagtatgaaacagtttatttagaagttgataacaataatagtaatggcatcgaatattatcaaaatcatggattcgagattattcgctcatatcaacctgaaatgtatggtgaaatcatggatttagctttaatgaagaaatcattttaacaaacatatgaataattaacattgtttcgtctagtaatatgaggaacaaaaaataaatgttttttggaatatataggataggagggaaagtatgacgctatcatcatatgcaacgagtaaattaacagaagaaaaggtatttaaagatccaattcatcgatttatccacgtacaggatcaattgatttgggacttaattaaaacaaaagaattccaacgcttgagacgtattaaacaactaggtactttgtatttatcatttcatacagccgaacatagtcgttttggacactctttgggtgtttatgaaattgtgcgccgaatgattgatgagacatttataggacaagacgcgtgggataatactgatcggccacttgcgttgtgtgctgcgttgttacatgatttaggtcatggtcctttctctcatagttttgaaaaaatatttaatacagaccatgaagcatttacacaagctattatcacaggagacactgaggttaatggtgtactaagtcgagtctctgataactttcctaaacaagtagctgatgtaattaataaaacgcacgataataagcttgttatttctatgatttcctcacaaattgatgctgatcgaatggactatttacaaagagatgcatattttacaggcgtaacgtatggctcatttgatatggagcgtattttaaggttgatgagaccatctaaagaagaagtgttaattaaagatagtggtatgcatgctgtcgaaaattttattatgagtcgttatcaaatgtattggcaaatatattttcatccagtaagccgtggtggggaagttttattaaacaattgtttaaaacgagctaagcagctttataatgaaggatatgaatttaaaatgtatccaaaagactttataccattctttgaaggaacaatgacgattgaacaatatgtagaacttgatgaagcagttgtattgtattacttgaagaaatggattcatgaaaatgatacaatattaagtgatttatcaagacggtttatcaatcgagatttatttaaatatattcctttcgacggttcaattattaccatttcggaattgcaagaattatttgaagcgggtggtattaatcctgattattactttgtaagtgaagcattttcagatttaccttatgattatgatcgcccaggctcaaatcgcaaaccgattcatttattaaaaagtaatggtggaattacagaaataagtaatcaatcattggtgattaatagtattacagggattaatagagaagaccataaattatattatcctaaagagatgattttaaaaattaaagattatcaaattaaaggttctattattaacttacttaatgaattaaattaacagttaagaataagatatatagtctttatttgatgacttattaggaggtatctcgtttgtctgagaaaaaaggtttcaatttcaatattataaaaaatgatccactagatggtcataaaggaaccaatattggttcgattagtttagataatattgccccggtttttatagatgttgaaaatcagaaggcatttgttgatattggtggtatgcacgcacgtgctgaagttgaaaagggtgtcaagtggattactgacaaatcacaagttgaaggtgaggaggctaaagcatactggctatgttgggtgacgaccgaacgtagtgaagaagggccatattatgcgggtgtgactgcatgctatttattagttaacaaaagtattagacgtggttataagagcatgccagaacatgttaatatgatggataagtctatgaaacatcaatttatcatcgaccaaatcggtgatgataacaaacaaattttaaaagaatttctacaaaatcataacgttgaaatgtggaataattctagtgaagaactatatcgagcatttgaatagaataaaaggataggtgactgttttatgtagaatgactgtccctatccttttttgatgtgcaaaatttaaatgaataaaactaatttattgaagtatatttcctatatgatatgtttgatagagttgttgtaatacctcgttatgaattacttgaaacggttgttttgtagttttagctattttcttcaaatcttcatactcgggtttcattttcataatttttccattttgtaggccaaatttaatggaaacagtgccgtgttgtgtagaaagaattttgaatgcgcggttcaaggtctttctattaacagaagtacttctgacgcctaaagaacttgtttcttgtaagataagttgttcgaaatatgtcttatcatgtaatttacatattaacgttaactgcgtgcttgggcgactttttttcataaatataggcgtatagtaagcatctaaagcaccttgctctaacgcattattcataaaataacctaatgcttcaggtgtcatatcatctatttgacactctattacttggacgctatcttgttgctcgaattcagattcaaattgaataacccttaatatattagggaaatcaaaatccttactgccggcgccatagcctatatgttgtattgttgctgaaggaaatggcccaaacgatgaaacaagtcccttagcaaatgcagcaccagtaggggttgtgagttcactttgaacatcaaaatgtgcgattggtatacctttaagaatttcagcagtagctggtgcagggattggataaatgccatgagcaatattgattttaccatgacctgttggaatagctgaacagtataatgtgttaatccctagttgttctagtgcaatacacccaccaataatatctataatagagtccattgcccccacttcatgaaagtgaacttcttcaaacgacatgccatgaattttagcttctgcttgaccaatgatttcaaaaattttcttactgcgatatttaaccctttccggaagtgtactgtcatctatcattttaaatatatcattaacgtgacgatgatgatttgcttctttaacatcaatgtttaatgtcattgcatgaataccttgttttactcttttttgaaaatgtagcttaaattgatctaaaggtaatttttttagttctgattcaatgtcttcagggtttgctcctaaatcaactaaagcagaaagtagcatatc

SEQ ID NO: 3628 - DNA, 3241 bp, Artificial Sequence
  Description of Artificial Sequence: synthetic nucleic acid sequence
aaatacaaccatttactaaaaagtatacaaattttatttgatcagttgaatgatatatgacttgtccttttttatattgataaagtgttaaatcctctttataaggtctaacaatactaacaggaatatttaagtatgatgctaattgtttaagattattatcaaattcatattctgaatttttaatataaatattttcttcatacataactataaaccccttaaaaattacttagtttaaatcataacttaaaatacagaaatattacctgtaatcaaacgaactattcctattattgcaagtacaatgatgaatatgaataacgtataatccaattttgtcaaatgtttgttattatccctttgtacgtagctgtatacgagtaatccaggtatatataacaacatcgttaatagtaaataatctaatccagctgcataaaccaaccaaattgtgtaaatagatgcaataattcctattatccattgttttaaattagctttagatttattttgaatagtatatttaacctggtaaaaagcactgagtgtatatggaattaagattgcacttgatgcaagtgaaaacgcaaactgataggcactatctgtaaacaacatactaattaaaaataactgaactaatatattagtaataattaaagcgttgaccggagctttattcttattttctttagcaaaccatttcgggaaaagtccatctttagctacaatgaatggtaattcaccagctagtaatgtccatcctaaccaagctcctaaaacagagataattaagcctatattaactaacactgaaccccaatgacctacaatatgttctaatacttgtgccattgatggattagcaagttttgaaatttggttctgctgaatgacaccttgggctagtacagtcattaagaaataaatgactagcacagaaatcaaaccaataacggtagcagttcctacatcctttttagactttgcacgtccagaaaagacaacggctccttcaatccctgtgaatacccatacagttactaacatagtactttttacttgtgccattgtatctccccaactaaaaacgccaacacttccactagtcataccataaaaaccggatttaaaagtactgaagttgaatacaactatcatgcatataataactagaaatataggtattaatttagctactgtaacaatactatttataaacgctgcagtttctacacctctaagtattaaaaaatgtacaccccataataaaattgatgctatgataatacttggaagtgtgttacctcctttaaatatagggaaaaagttacccacagctgacattaatagggttgcataagccacattacctagaaatgctgcaaaccaatatccccaagcacttgaaaaaccaataaaatctccaaaccctgtttgagcataactataaattcctccatcaagatctggtcgctcatttgttaaattttgaaatacgaaagcaagagaaatcataccaatagcagttattatccaaccgataattattgcaagtccaccagcttggccacccatatctgagatgatattgaatgcaccaccgcctatcatagagcctatgactaaaccaattaaggaagttttacctaatttattttcatccatattaatctcccctaataaaggtggtaaaaatcttgttatttgatttaatgaatgaattacttgtgacttttaccacctttcaaatttaaatatcttctctaaataacggctgactcatacatcttgggcctccgcgtccacgtacaagttcactaccagtaatttcaatcactttaattcctttgtcgcgtaaaagttggtttgatacatagttgcgatcgtatgtcaccacaacccctggtcgaatacataatgtgtttgagccatcattccattgttcacgtgcaccatcaataacgtcgccattacctgttggaataaagtccactttttctacttctaaaacttcagcaagtgtttcacgtaacttgctagaacgagtaatttttatatcgtccttaccatcattttgttctatggtaaatatattcatattattttcttctttaaatattgctgcatgtactgtaaacttatcgtagtcaatcatagttagtactgtatctaggtgcataaatgtacgtgtattaggtatttcaatagctacgatttttttaaaacttgtgtttgcatctttgaaaatattacgtgctaacttttctattgcttgagctgatgtacgttctgatataccaatagctaaaacatctttcgataatactaattcatctccaccttcaatattaaatggtgagttacgatctaaccatactggtacatctttatctttaaatcttggatgatgtttcagtatatatgtcataaaaatagattctctacgtcgtgctctccaatacattctgttaattgtcattcctctaccaattgaagcttggggatctcttgtaaaataaaggttgggcattggatctaagtaaaatggatatctatcatccatatattctactaaatgggttgtttcaagttgaatttcttctttacgtacgccagccatgattttatttacaagttcttggtcagataactttgaaaagaattctttaatttcagtttcatgacctaatattgtctttttagattctgttaatatgtcgtttatgaagttctcgcgtacttctggctcagtaatagattctgctgcaagtttttctaaataaactacttcgattccttcatctctcaaagtttgagcaaatttgtcatgctcttcttgtgcaacttttaagtagggaatatcatcgaataataaaccacttaaatgatcaggtactaaattttctaattcttttcctggtctttttaacaacacagttttcaatttgcctatttcactatttacttgaatgggtccttgtaccatttcaaattcctcctttgctttattacattcacattataaaacgctttcaaaaaacatcgtgtgatttaattcacaattgtttagggagggttttcacatatatagatttattcaatgcaaaattttgtatgaatatgtattttgtactatataatagtgaataatttgaaaaatctcattgttaaaaccttatcttattcaagcaaaaagattttttactcatttttttgtattagtaatcattcctat

SEQ ID NO: 3629 - DNA, 3394 bp, Artificial Sequence
  Description of Artificial Sequence: synthetic nucleic acid sequence
gtaataccacttacgacaaatgcttttgcaaaccttttcataatgtatcacactcctaatataaaataataatgtgttgctacactcaacatataatattccattaattattacaactatctattaataggtaaaaaatctcttaatggtttttatcggtgctctatcaatctttattttgaaattgaatgagagcgaagctgggacaaaaaggttcaagataagtaaaaaaagacaatttctattgaaataatatagaaattgtcttttttataatttttttgattattttcagctcgttgagctgttacttttcttatattaagccacgatgatgtctgaattcatcgaattcagtatcgggaattgtttctacaatatcatttacatgtcgtgaaatatcatttgtggggataagaactgaagtttccattggtagagtatgttgagtcaagttatattctttatacataaggcacctcgttaatttagtttattggtatttattaaattatacgaaagggcttatttttttaagtattttggcgagactcttgagggaacaggacaagctgaagactacaggctgaagctgtcccctaagaaagcgagccaacaatacgaagtattgtaaataaagaagccagtaaatgaatttatgaaaactcatttactggctattttgctagggaattatgtcccagcctcattcattgtcactacctataacattaataaataagggttttcgatatatttagctagtactttaagaaaatcggccgcacctgcaccatctaaaatttgatgatcaaatgtcaagcttaaaggaatttttgaaacttgtttaatgttatccgcttctagcacgacttctttagttaaagcaccaacgcctagaatacctgtttcacctaaatttaaaattggtgtaaagtattctataccactagcacccatattagtaattgtaaatgttgctccctctaattgtactgctcctgtgtttccttcccgaacagcctcagccgatgatttaatttcatgggctaaagtgccgatactttttgtatctgcatgattaatcactggcaccataaggccttcatctagagacgttgcgattcctaaatgaacatcttcatactcagttaactcgccttgttcatagcgagcattcattgccccatattctttaagtgcaagcactactgctttagctaataatgtagtaacagttaatttaacatcttgatctgcttgtttaagttccgtagctaatctgtctttgaaatctagcaagcgatccgcatcaaccttacgatgtaatgttaattgagcagtactattaagactttgtctcatgttttgagcaatacgttgacgcataggattcaatccttcaccaatcgcacttgtatccacagtctgtgttggaacatgacttgtatcttcattagatgtcgtatcactagcatagtcgtacccatttgcttcaacacgttgaatatctagttttgtaatacgatgattaccgcctgtgccttttatcttgttaatgtctaatcctttatcctcagccatattacgtgcgaggggtgagataaagattctttctcgtgctgcgcttttaggcgaattatctttattatcggaagactgttgtgatgtatctttaacttcttgcgtttccttctcatgctcgttgtcttcttttactttttctgatgctaaatcatcttcatctttatcaatagcttccccttcttctccaattatacctaataccgctttaacctctgcatcttctccggcttgcactttaatttctaacaatgtcccactcgccggcgcttcaacatcgttggttaatttttcagagcttattgtaacaatactctctccttgttttacggtgtcaccctctgatttaaaccactcttcaacagttccctctttcattgtcattccaagctttggcataataatattttcactcattgtgatacacctcctatgcgttagccttttttaaatcatcaattaattcagatgcaatgtctaataccttatcagcattcggcatatatgccgcctctaagttcgctgcaaatggtacaggagtgtctggtgcggtcactttcttaattggaccatctaagtaatcaaatcctacatctccaatcactgaagcaacgtctccagcaatgttacactgtggattagattcgtcaataacaattaagcgacccgttttcttcacagaatctaaaactgtttcttgatcccatggtgacactgagcgtaaatcgatgacctcaactgatacttggtcttctgcaagtttttcagcagtttcttccgctacagctaccatttttccaatagccacaattgttaaatcgtcaccttcacgcgtcacattggctttaccaatttctatagtataaggttcttcaggaacattacctttttgtcctaataatgttttatcttctgaaaagacaacaagattgtcctcttgaatagctgacatcagtagacccttcgcatcatatggattagatggaacaacaactttaactcctggaattgctgcaaacatattatataaagactgagagtgctgtgcagcagcgcttgcccctgctccatgaagagtacgtacaactagtgggattttggcttttccaccaaacatatatctcatttttgccccttgatttaaaattggatctaaaccaaatccaataaagtcgttgaacatgagttcagcaattggacgtagccctgtcgcagcagctcctactgccgtgctcaatgtaatgtgttcagcaattggtgtatcgattacacgtttacgactatatttttttgcaagtccttttgttacaccaaatacaccaccgaatgtatcgtcatctttgatgtggtctacttttgcaccacctgagacatcagtaccaattaaaatgacatcctcatctttttccatagattggtcaatagcttcattaatagcccccataaatgttaacttgcgttcttcactcatcgtaaaaacctccttatgtggttaggtcatttgttcttatatcttttaataaatattccaatcttctgatttaagcaaaaacatccttgtataatgaatcctcatctggtaattcgctttcttcagcaaatttcacagcatcttctacagcttgttcagctgctttttctatttcatctgcttctttttcagtgagccaattttcttcaattgctctttttctaaattctactgtcgcatttttatctgcgttacgatcatctggtgattttactttttgctcatcaccttcaaaatgtccatatttacgatacgtatcacattcatttaacgttcttt

SEQ ID NO: 3630 - DNA, 3130 bp, Artificial Sequence
  Description of Artificial Sequence: synthetic nucleic acid sequence
ctcttgtttgactacctacccgtaatcacccgtgtttgatttataattttgtggtattattatttttccttagcattccaccaaacaatccgatttaaccactatttttttcgaattatcaaaatgctaattccactatatattccgaagacccatttttaataagtcaactagataatgtgcaataaattttggcgtatacattaactttacccttattactacatggggcgttctgaaatgaacatgcccgaaatgaatatggagcaaatgcaacaaatgatgatggaacaaaaaattaaacaaaaactaggctacttatcccctgtaaaatacagagaattagcagcctagaacatagtgtttttattaagttcccattttaagggttcagtgccttgtagttattgtgtttttatatactttactacttattttcgttgttatcatcaaaggactgcatgaagttcatgcattcattcatcatattatccattctctggtcataatcagaaccttgggtaaaaccagtttgtccaatgactattaaacctgctagtacaaacgacagcactaaaggtaacttctttttcatcgcttatttcccctttcattcaaagtatccctaatctttttttaacactttctttaatttttcatattcatcttcattaatttcaccttgggccagcctttcctttaaaatttgtaaagaatcatctgatcttacaccttttggtttttctgaagcttttgcaattaatatatatacaccataaaataacaagccaagaatgataatccaaaaaatcatgccaatgaaccccattccgcccatcatatgacccatacccatacaatttgtcaatcctttccttctttctcgttttacaattataccatagggggggtattagtatcccaaaaaagtgtttttaatattagtagcagacggcaattcattgtaccgcaaaatggcccgattattgattgaactattttttaataaaataattcctacgttcccagttccagaaagcaataatactaaaagcttcctcatctgctttttcctcatcatctgtcatataatctgtatcttttattggatattttccgtttcatcaacgggagattgaatatctgacttatgcttattttttggtttcacaatttttgagcgtaatattttcatgggaacgctccaaatcaatatctttatttggcgcatatttgcgttttaagagcttatgtatgtttttaggttaaaactatatgatctatacctaattctttaaaataccccctttaaattcaaaataagagcatttgaatttaaacaaaataaaaaaacagacctcctgccatctcagcaaggggcacttgaaaaccgtttggaaatcatcaagggacgtgtcgtattttttgaaaaaaccactcaaaaaatctccactcaaggcacgcataaaatatcagcgaatataccaaaggagtgaacatattgattccatattatctttgcctcaaagaaaacataattgaacaccgacacgtcggtgttttagtgttcatgtgaatattaaaaaattatggagtgatgacacatgaacacattcgttttcggcgtgattacaaagagattagaagaaaaaggacttaatgtacacgaagtattcaatatgagcgataaacaggctaagaaagaattatttgatgatttataccattatgtccgctatacaaagccatgcggtgcagaattaacaatggtggcattagatgctgatgaattaatgcattactttatatactgttacatggaacgttatgcttacaaattgaacgcttaaccgttacgacattttgcaaatgtcgttgaactaaaaaaagaggtgactatgtgtagtcacctctttttttacgttgtattcgattctcttcttcaataagtcgagtttttcgttctcgttctgccggctctttctcacgacgttttctatctcgttcaaggatatctgttgttcttccaaaatctcgccaatcttctgataatcctgtgttatccgctcgatttggtttgcgtttgccccaacatgcttaaactttggcaatcgattgtcgggtttctttatcaaattttggtacgatcaatcgactaccttatgcctttttcttaacgaaagcaggcacacttatatttaaagtttccgcagattgttgtaactttaaatattcgtcttcgctcactcgaaaactaatttgtttacgctccttaagattaggtttacggttttgcttaacagtatcgtcgctagccacttgtaaaaagaatttcaataaatatcgtgatgattgatgattaaaatagtgatactaaattttttaatttttttctagggataaatttagtaattgtaataaaataccaataatagtaattcctaaagcactatatattagtacatttgtactattagcattaaataaaataattcctccgattgctgatcccatagcactgcctaaataattaatagaactatttaaagcgacagcagagcctccatattcaggatgttttttcaataatatatgttgttgaggagcttgtgtagcccatcccatagctccccataaaataaagggaattaaacctaatataggcaagttaatagaaataggaattaaaccaaaacttaatgctagtaaaattaaaataattagcataacaaatcttgtatttttaaatctatctataataaatcctataccaaaacttcctattaatccgcctattccccacgctgtaaggtaatgagttaaattttttgtatctgtatttgttttaataatatcggctaaataagtatacaaacctaaactagcaatggcagcgcataatgtaaccgaaataactcttagtacatgcttgtttaaaaataattgaaaacgatcttttaaatttggaggagcttctattttaaatttaggcatcaatatagatatgcttattaatgcaataaaactaatgacaataataaccaacattgcaaatcgccaattagaaatgttggcaatttctagtccgagaggaactcctataacagttcctacactcattccgcctact

SEQ ID NO: 3631 - DNA, 4207 bp, Artificial Sequence
  Description of Artificial Sequence: synthetic nucleic acid sequence
agatagaattgacctaattctctacctgtatgtgttaaatcaaatgcatccatacctactaaatctaaatggtcccaatcatgttgaacgggtctcacttgccaaacacctttatcagtagctggtgtatgatcatcaacttttttaaaggcttgattagaaggatgttgtgatgatataactggaactacaccatcattcggtctaatttctttgtttgcatctttaccaataatacggctggttaagttcaacaaaagaatttcactagaattaggtaattcattaccaagaggtcctgtgtgagtcgctgaccctgtataagtagtgtagacaatattaggatttagacttgtttgttgattaattttttcagcaccttgcgttgtcagatcattaacagcttgatcttcagtattccaaatcttacttttggatacacgttccgcgtaatcaatgtagctttcatttggttgttgttttaatccccattgagaaaaacctaaatctatatctacatctttaccaccacttaatctaccaatacgattaatcgtttcttttacaagtttacgtgtgccaattttatctgcagcaggtgtaccattatgtggtgtgccaagtgtagtaattgaagcaaccatattatctttaccacctgtaaataaatcggatatagtacccccatgttgacgttgatattctatttcttcttggttaccatttcttaagaattcttccatttgacgaatggtttgaccacccatactgtgacctataaaatgaatttttttgccaggttcccaatcacgcatgatgcccttgtatgttcgaccatagcgatgatgaccatatttagctgcatgcgctgcaccgtaatcaacacgtcctcctttgacatagtaatacaattctactgcgcgatcatagttactactaaaagcaccaatatttgcctcatgtacattgtatccctcattagttaaatttctgtcaatattgtattttgtaccaccccaatattttggagctaaactaaattgattatcacctgcaaagcctaggaaaccatggacaaatactactggatattggtttttgaactgtgcttgatgtgtagactgatgattttgattagcatttgctgattgcttttgcgtctcccttgttgtacttctattagattgttcttttgtagctacttgatgatgatttttttgtgatgttgatgtatcatttttaggctcttgagtatgttgttcaacattttgagtgtcattagcttttttagaatcaactttagttgtctgttcattttcagttgtttggatttgacgttttgttgttttttcttgagggagctgtttagaactatcttgtttagcttttgattgtgtttgatatgtagaatcattagacggcttttgtaatttcactaatggttgatcgatttcttctgagtcgctgtcttttgtttctgttgattgattatgactgttagaactctgaatatgttgattgcttgtctttgaagtttgaccttcaccttttatgtcaatattttttctctcatttgattgagtagctgcgtcttgttgatttacatttttagatggttggacgtcttgttttactgaactaccttcttctttttttggctgattagctgtctcatcacttttcagttgttcactttcagctacagaatgttggttgttttgatttgttttagattgattaattgtttgtacttgttgactataagcagtaccttgttttgaagcttttaacgtttcttctaccttatcattttttaattgttgtgttgtttgcgagtcttctgggtgtgcatccgcatgttgcactgaagtttcagctgcttgagcttgttgccctccgatgaaaattgttacacctgtaataattgatactactcccactgcgtattttctaatgctaaatctttttattctattattatttgtcaaagaaatcacctctataagatttttcccttataaagaatgaaaaaataactgctaaattcaaaataacataaaagttattaatttttttaactaatttggttaaatttttgttaactttttagtttttaaaacattttattgattctattacagcatttaaaataatctaatacattattttcgattatatttatctattttatcgcattaatcacaattaaaattgataaaataatcttatttattaataacaattcaagtatcattaaatgaaaaaagtagcatgcgaaacatttttaataactaatcttactttttgagttgagtctactcaatgtttaaagttatatatcatctcaaattttcaaattacctttctatatttcgctcgatagacaatactcttgtatatcctgcaataatgagtttttaccttacaaaatcaaaaccacccgtacaaacggatggtttactttgcatctataattttttctattgatcaaccactattcgtgcgctgatagtaagctaactacattaacctttttatttttcctgcaaataattataaatactcttctataaaaatttaatctacatcaatattttctaataattaattacgcatataatgttgaaacactttatatttccatatccatattttaaattcatattataaattaattaaagatcgtgataattttagttaatacatatactgctttttatattttttattcaattcatgaaaaaattttttacattcttcaactgattgatagatagtcagaaataagtattcacatatatattaaccccctctacttgtaacagtgagggggtataggtgataaaggctaataactactatgctttcaaattatcgcgtgtacttaaccattgagtatataatgcaacaatataaacactaatagctgtgttaacaagaatttcgaccatatagtaccttacgataaatcattctatgctatagattatttaataatatcaattaattcttttttagaagctgaacgtgcaggtatccaaccgaaaatgatgcctatcaatgttgatacacctacagctaggatgacggaacctagactgacggaactcttaaccatttcaggtgtcacgagatcaatcaatgtagcaataataatacctagaattaatccgatgataccacctatgagacataacacaacactttctactaagaattgtatttcaatatctcgacctttagcgccaaatgcacgacgaattgcaatctcttctgttcgttcagtgactgaaatatacatgacattcatcacaccaatacctgcaataaagagtgatattcccgcaacagctgcgacaaagtaagtaatcgtgtctaagactgaacctatcgttttcatcaccgcttcattatcttcataactatattgaccttcagatacgccagttccttttttattcaacactttttcgacctttttacctacgtctttcttatctgaacctttttcaactgtaactaataattgaggcataccttgtgtcaaattgcccatatatttattaaatgtttttgaaggtatttgaattaatgactcaataggcatcccactttcatcgacttctgagctttcagagacgcctacgactttaaacccttctccattttaaaccaattgtagcaaataatatttctaccgcactacgtctcatgattaattgttcaaattgtttaaaagcatatgttactttattaatgaacaatccaaatattataaaaaatataatgatccctatgaaaccatctacataataattagtgataaccgcatggtgatgaatgccaagatctgtaacaacttcgggtataattataacaccaagtgctgcaccaacaatgatatagattgctacaacaattgcttttgttatattcaatttatagcctccttccattgatgttatatcctagtatggcttaacaatatggcttatcgctgttttgaatgtaatgcatatttcaaagcttcatgtactgatgaaacaccaacgacttggatgccttctgggaatgtccaacctccaatatttgtctgtggaataatagctcttttaaaccctagtttggtcgcttcttgaacacgttgctctatgcgagatactctgcgtacttcacctgttaatccaacttcacccacaaaacaatc

SEQ ID NO: 3632 - DNA, 3795 bp, Artificial Sequence
  Description of Artificial Sequence: synthetic nucleic acid sequence
attttaatagcagcatttttcatgccattccataaagctgataagacattttttaatgcttgaataggatgttgaacagcaaatttaatagcgttccatattattacagcacttcttttaatcgcgttccaaatggcaattgtagagtttttaattgcgttccaaatattaataatataaggtttgataaaaccaaatatagctattgcagcattttttattgaattccaaatgccgataactgcatttctaaacgagctatttgttttccataaatgaataagccctgctactaataatccgatggctgtaataactataccgactggtccagtcataaatcttattgctaatcccaagcctttagttgctaaagttgcacctttagtaactgtagtccaagctgttgttgcagctgcagcaattttagttttcatagcctgtattgtctgagaagtggttaatgcagccaccgcatatctataaccatttgcgataccacgagcagtggcagtaacgccattccaaataccagtcgctgctgcactggttttagataaaaatgatagtgttctcatactcgtcattaaagagcctaatactgttatagcagtgccaattgttgatgccataacgccaaagaccattagtagtggaccaatagctgcggcgagtaatcctacaactgcaatcgttttttgaacgccagtaggtaaattagaaaacttattcgctaatgatgtgatccatttagcagctttatataacattggggctaatgcatcacctaatgaaatcgctaaactttcaattgccgatttcattttacgcattgcgccaccaataccgccttccatttctttagccattctttttgaagcacctttagagccgtctatggatttagttagctttttataatcttcgtctgatgcattgataactgctaatgcaccactcatggcctctttaccaaatattgtactagctgcggctgcttgttggtctttagatagaccgcccattttacctctaagttgatctaaaacatctctcataggtaacatttcaccgttgctatcagtaatagatattcctagtttatccatttcgtctttcattgcttttgttggtttagataggttggtaaacattgttcttaatgctgtgccggctttttcaccttttatcccagcattagacatcaaaccaatagctattgatgtatcttctaccgtgtaacctaacgcaccagcaactggagcagcatatttaaacgcatcacctaaaccacgtacatcagtattagcttttgaactcgtttgagccaaaacatcagcaaagtgggtactatctttagctttcataccaaatgcagttaggttatcagttacaatatcagatacgcttgctaaatcttcaccagatgcagcagctaaatccattacaccaccaacaccttttagcatatctttggtgtcccaaccagcaagcgccatgtagttcattgcttcagcagattcagaggccgtgaatttagtatctcggcccatttgaagtgcttttgttctaagctggttaaattcatctccagtagcaccagatgtggcttttactttacgcatggtatcgtcgaagtctatacttttcttcaccgcagcgccaaaacctgctgcaattggtgcagtaacgtgtaaactcatgttacgcccgactgacttcattgaatctcctatggatcttatcttaggtcctatttcagaaaatgcttgcccaagtctaccgacagatgatttacttactgcaatcatttctctgtatttgccacgtgtttggtcgagttcgttttgtaaatagttgagattgtcagcttgtcgactatattcctgccttaattgagcggcttttttgctattcacaccagatgctcttgctgcttcttggtattttgctttcaacgctgcaacgttagctttagattctttgactgcttgcgataattctctagttcttaacttatatgaatttaaacttttttcggaatacttaaagttgttgttagatagttttaagtcagcgtttaatcctttaaagctacgttttatttccgaaatactacgttgaacgcccatatccttcatagataggtcaatctgcaacccttttattctttctgccatcactccacctccttgcttataaaatgtattacatgaacgcgtcaatcatactgtttgttttcttgacgtttttcttattactttcgtcaactaactccatgaaaaatgcaaaaggcatgtttaatatgtcattgatatccttgccgccttcttccatcattttcaacattaacttcttcatattttccttatgttctttataattgataggttttaaatcattttggctagttgcttttttctttcttcatccatttgaccttgtgcaataaattgaatttgttgttgtaattcttctactgcatctggtgcatgcaatctgtctagtaaatcatcttttgtaaattgattgttgtaaatatcaactaccatgtctaacatttgatcgatattttcttgcgcagaagtgttctcatctgatgcaccgtccattaaatcagctgcatcatagattttacgaaaaggaatttgtgtaggtgtaatataagtgtcgaattttgcgttaccttctgaatcagttactgcgttaccctttttatcgatttgaattaatttaataaaattacgtttagccatattttaattgctcctttaattttgatttttatttgcaaataaaaagaggacacgaagtcctcgataatagttattcttctaattctttgattaacgcttttccacgtctgttattgcttgtagaaagctctgaaatacgctcatcagagatttttttgttcgctggtttaggataagtatctccagtatcgtaaactttcttcttatcctctaaatcaatgaatttgtgtaaaacttcatacttatttttagccataatcaaacctcctgtatgttatgcgcctagttctgattctgttccactagattcttttggatcactgcttggtgcagattcaccgaagatagcttcccagatagcgtctttcataacagttgtgcctttagcatcgtgacctaataacattgctttttcttcttcgaagcctttaactttagcttgcatgaattcagcagtagtagagtcagaactgaattctacaccatcttctttggtattaccttctaattcagggaatgtgaataatcctttaggtaatcccacatactcgcgtgaaccatcttccatagttttcgcaaacataacagctacatatggtggtgtatcgttaccaactgacacgatgccgtcctctgatttttctaatccgaacaatgcaactctgtcctctaatggtagtttgtggaaaccagcttctacttcaattgttccgttagcaactgccatttctgcaacttggttatcaccatatgccttctcgatgtcttgatctttagatactgaaatttcttgtaaatatttaatgcgttctggatcagcaactttttgaactccaccttctccatgaactttataataaaattctgttaaccctgtaaatgaacgatagtttttctctgccatattaaaacactcctaaattttaaaatattgtttattaaaaaagacctttttaataaaggtctcatttttcgatatatgaataattgttgattattcctgttatcacttctcttgatacattaaattgttctgcta

SEQ ID NO: 3633 - DNA, 3364 bp, Artificial Sequence
  Description of Artificial Sequence: synthetic nucleic acid sequence
agtgtataaaaatagcctggttcaatatcaatattaatttcatttagtatttgtacatcttcaaagcccttactgacatctttaaaagaaagcaatggattcatacagtttcctcctataaatatgaagctgtggcaacgattaaaaccttcacttctttatctgtttcgttatataagcgatgtttatctttcgctttaaaataaagtacatcttctttacaagctttatatacttgatttcctaattgaagtgatacttcaccatttaaacaatagataaaagtatctgattcagatggtttaaagtttttatatgaggcatttggtcgtaaagttaggattaatggttccatgtcaaattcattagaattcgctacaagccagttcaagatataacctttatcatactcatcataaatggtctgttccttcttcttataaagtaccttctcatctgacggttctttaaaaaagtcacttgcagaagtaccaagtacttctattaaatttaaaaatgtttccatactaggtgaagcatgattactttcaatttgtgatatatatccttttgataaatcagttcgctctgctaattcctcttgtgtcaaattttttattcttcttaaattacgtaatttgtatccaatatccatctttctaaccacctaaaaaagctatatcatgtttacttatatcaaacattttgtttaatgcttaataaaaataacagaatatagctacgtaatcaatagttttatattaacttattattgtggatttaatagaaaaagttagtcgaaatctttactaaataaagtttgatttggattttttttaatttcttgaactactttgtaactattataaccacttttattttcaaattctttaaaaatctgtttttcatcagcttttccaggcacaatatgtttaaaatttttataagcatttaaaacttcgtcaccttttacagatgcctcataataattttcgattttattaaagaaatgaattactttcatcatttcatcattagtccaatctaaatctaatggatattgatattccatagtgtcctctccttcatatacttttatttttcacatttagatatattaaaaataacacagtatacctttattggcataaaaagatgggataaaatccatttttgaattctatcccaccatgaataaatacccctagcagattgctattatttagagtagctaaacgctaagggtattttgaaatgatttaagatacgtatgtctttgccagtccgtgactatacaaacgaaaaagtaatatacgtacaaatcataaataaatcatattaatttatatacatttatcattattaactagtaattacatagtatgaattggataaccaattgctttttcagcagcttccattgtcatttcacctaaagttgggtgtgcatgtacagttaatgcgatatcttcagcattcatacctgactcaatagctaaacctaattcagagataatatcagatgcgccagtacctacaacttgtgctccaataagcgtatcatcttctttaagtgtaattaacttaacaaaaccatttgtatcatctaatgataaagctcgtccattagctgcataagggaatttagaagctttaattgataaaccttcttcttttgcttgagcttcagtataaccaacttgtgctaattctggttctgtaaagcaaactgctggcataccaatatagtctacctctgcggcttgaccatctatcgcttcagcagcaactttaccttcataactagctttgtgagctaatggtaatccaggtacaatatctccaatcgcaaagatattttcaatagaagtacgactttgtttgtccacttctagtaatccacgatcagcaaatttcagaccaagttcttctaatcctaattcatcagtattagggcgacggccaactgtaactaatacataatcagcttcgatagtttgttcctcaccttttgcctcataagttactttgacaccattttcagtttcttctgcagattttgccattgcttcagtaacgatttcgatacctttttctttcataccttttttaacaggttgtgtcatttgcttttcaaatccgcctaaaatatcttttgcaccttcaaggatagtaacttcagagccaaagtttgcaaaagcagtacctaattcagaaccgatatatccgccaccaactacaactagtttgttaggtacttcttgtagatttaaagctcctgttgaatcgataacacgtttaccaaattcaaaatttggaatttcaattggtcttgaacctgtagctataatcgcatgtttgaaattgtaagtttgagcactcttttcgtccatgacacgtaaactattgttatcaacgaaataagcttcacctctaacaatctctactttgttaccttttaaaagtccttcaacaccgccagttaatttattaactacagaagtcttgaattcttgaactttttgatagtttaacgaaacgctttcagcaattacccctaagttttctgaattttgcgcttcaacaaagcgatgagaagcatgtagtaatgcttttgaaggtatacaaccaacgtttaagcatacaccacctaaattacctttctcaacgattgttaccttttgtcctaattgagccgcgcgaatggctgcgacatatccacctggacctgctcctacatttcattaatatgtcgtggaggattaatttgaggaattctaataaaagtctccattggtagagtaagttgaagcttgttacaatgttttactatttaactttatttaatttaataaatattttctattttttaaaaaattctcctcaaaggtatatttttttggtactatgtattttatagttgttttctaaaaaatcagaaaattataagtgttatggggagtgtttgatatggatttgcttataggtacattatttttaattttagttttagttgtttttactctatttacatataaggcacctagtgggatgaaagcgatgggtgctttagcgaatgcggcaattgcttcgtttttagttgaagctttcaataaatatgtgggtggacaagtatttggtattaaattcttagaagaattaggagatgctgctggaggtttaggtggtgtggctgcggctggattaactgcattagcgattggagtatctccagtttatgcactagttattggtgcagcttgtggaggtatggacttgttgccaggatttttcgctgggtatattgtaggctacatgatgaagtataccgagaaatatgtgccagatggtattgatttaattg

SEQ ID NO: 3634 - DNA, 4090 bp, Artificial Sequence
  Description of Artificial Sequence: synthetic nucleic acid sequence
tattttacgccaagttcaataggagcttttggtatttcgacacctaaagtaaatacacctcaattaacaatacaacaaccaacgactatgtatggtataaacaaagtaactggggaattattatgtcagtattattatgtcaaatttggagtagatacacgtagcgttagatttcctggtttaatttcacatgttaaagaacctggcggtggcataacagattatgcagttgatatgtattttaaggcagttagaaaaggacattatacaagttatattaatcgttacacttatatggatatgatgtacatggaagatgctattgatgcgattatcaaattaatggaagaagacagtgttaaattaaaaacaagaaatggctataacttaagtgcgatgagtattgaacctgaaatgctaaaacaagctatacaagtatactatccagatttcaccttagattatgacattgatttagagcgtcaagatattgcattaagttggccagatagtatagatacgagctgtgctcaggaagagtggggatttgatcctaaatatgatttaccaactatgactaaagtgatgttagaggcaattgagaaaaaacaaaaagaatgctgagcccataccgattttttaaagtatatagctatcttttaaaactttaataaaagatactgcatcaaaaaattggatgacaagtgaagttagaagcagtttttcgcgtaactacattacacaaattgtctgatttatatatcatctcatacagatgttttttggctcatatggtcaaattgaatgataatatatagggtaaagaaaagtctattttagttccaagtctacttttaaagaagctaattttcgatgagaacacaaatttaattacggaaaaaataggtgatgataataacataacttgtaacttaataaaggtagtgttttacttatactgtatacataataaaattaatatctattttgaatatttagaaaattcattgaatagtagaatcacgattgatataatttagtgtatctatttaattggaattatattaggaggcaacagtcatgtcagaaaaagtaaaattcgaaaaaagagagtctttaaaagaaaaacctgatacagcaaacttaggatttggacaatatttcacagactatatgttaagtgttgattatgacgctgatcaaggatggcatgatatgaagattgtgccgtacgcaccatttgaaatttcaccagcagcgcaagggttacattatggtcaggcagtttttgaaggccttaaagcctataaacataatggagaagttgtattattccgcccagatcaaaacttcaaacgtattaataattctttagcacgtttagaaatgccagaagttgatgaagaagcattattagaagggttgaagcagcttatcgacgttgaacgagattgggtacctgaaggcgaaggtcaatcgttatatattcgtccttttgtatttgctactgaaggtgttttgggtgtacgttcttcacatcaatataaattactaattattttatctccgtcaggcgcttattatggtggtgacacattaaagtcaactaaaatttatgtcgaagatgaatatgtacgtgcagtacgtggaggtgtaggtttcgctaaagttgcaggtaactatgctgccagcttactcgcacaaacaaacgctaataaattaggttatgaccaagtattgtggcttgatggtgttgaacaaaaatatgttgaagaagttggtagtatgaatattttcttcgtagaaaatggaaaagtagttacgccagcattaaacggtagtatcttgcctggtatcactagaaagtcaattattcaattagctgaagatttaggttatgaagttgaagagagaagagtttctatagaagagctgtttaacgcatatgataaaggtgaacttacagaagtatttggttcaggtacagcagctgttatctctcctgtaggtacacttcgctatgaagatagagaaattgttattaataacaatgaacctggtaaaatcactcaaaaattatatgacacatatactggtattcaaagtggcaaattagaagataaatacggatggagagtagaagttcctaagtattaaaaatagagttttcaattatttgttaactatcatctatagtatatttattatttggcagattgatttttaaatttcaatctgctttttaaaatccttttatataaaaatattttttaattaattattcatttcatatttttgttgtgtgtggtaaaatacaattgatataaaatgaatataaattaattagatttagacagagaaacttttttaacgtatgttttttctgtctttttttatttacacaactaagaataaggagagataaaatgatttatgcgggtatattagcaggtggtattggttctagaatgggaaatgttccattacccaaacaatttttatcattacaaggaaaacctattattattcatacagtagaaaaatttttaatgtataaggactttgatgaaatcatcattgccacgcctcaaaagtggatcaattatatgctcgatttgctaaacaattatcaattagacgataagaaaataaaagtaatacaaggcggagacgaccgaaatcactctataatgaatattatagaaagcattgagcaacataaaaaattaaatgatgaagatataatcgttacccatgatgcagttaggccatttctaacaaatcgaattattagagagaatgtggaatatgccagtcaatatggtgcagtagatacggttgttaatgctgttgatactatcatttcttcaaatgatgcacaatttatttctgggattccaataagaagtgagatgtatcaaggacagacgcctcaaacttttaaaataaaagagttaaaggatagctatttatcgttaactcaatctcaaaaggaaatattaactgacgcgtgtaaaatactcgtagaattgggtaagccagtaaaattagtcaaaggagagttatttaacataaaaataacaacaccatatgatttaaaagttgcgaattcaattattactggagctgttgataatgattaatcaagtatatcaattagtaagtccacgacaatttgaagcaacatttaaaactattgatttacataatcataatagcaaagttattgttcgacccttatatttgtcaatttgtgcagccgacttgagatattattgtggaaatagagatagcaaaattttatctaagaaattacctatgtcattgattcatgaaagtgtaggtgaaattgtatacgactctgaacatcgactgaaaaatggaactaaggttgttatgattcccaatacaccgtctaaatcgcataatattattgcagaaaattatttaacttctagtcattttaagtcaagtggttatgatggttttatgcaagattatatagtaatgaaacctgatagagtagtcactttaccacaagaaattgatttgagtgtagcgtcgtatactgaattagttacagttagtgttcatgcaatagatcgttttcaatcaaaagcaataccacaatttgaatcattggggatatggggagacggtaatttagggtatatcactgcagttttactaaaaaaactatatcctactacaaaaataatagtttttggaaaaacattatataaattaagccgtttttcatttgtagatgaaattattcaaattgacaatattcctcaacatatcaaaattgatcatgcatttgaatgcgtgggtggtaaaggaagtcagcaggctattgaacaaattattaatattattaatcctgaagggagtatcgctttattaggagtgagcgaactgcctatacaagtgaatacaagaatggttttagaaaaaggtttaactataattggtagtagcagaagtggtttaaaggattttgaaaaaactattgaattgtatcgtaaatatcctgaagttcttaatcaattagcattacttaaaggtaaagaatttgaaataaatacca

SEQ ID NO: 3635 - DNA, 3286 bp, Artificial Sequence
  Description of Artificial Sequence: synthetic nucleic acid sequence
caatctttaatcgatttgcacaaaagatggttccaacagcctatacgagagaaggggatatttcttctttaggtactcaaaaggaatttaaagaagaagagatgcctggtttcggaataagtttattgactgctattttacctgttattcttatgttgatttctacaattgtgcaactgattacaggacacgaagaagcaacaaatgtattcgaacaaattgtttacttcataggaactgctggtactgcaatgcttatcgcagtgatatttgcaatctttacaatgggaatgaagcaacaacggaaaatggaagacattatgaaatcagttacgcatgctatttatccaatcggcatgatgttactcatcatcggtggtggtggtattcttcaaaagtttgattagtttgatgatttaagacagtaactgtttgtctctcatcattgatttgtataacttcatggtatgtttttacagtgatttgctttttgtcataaaattgattgggcgtgtatgctaaaactttacgacggtcctcgataacgttgccaatataataaggtaatgcacaattagcaaagctcatgtctctatctttttcaaaaacaatgatttcactctctttatctaatcttcgaatttgacttgcacaagtcgcaccaccagcaactgcaccgactattataattttattcatagctgtctctcctttatatatgtatgatattaaaacacgtatgcctttttaatcatcacttggattgtttattcaacttaataataacgtattttcaaattaaaaaagtcatttaaataacgacctattccgtcttcattattactatacgtagtctcatttgctatttcctttaaatctttcaagccattggccattgcaatgccatgggtcgcaaactttatcatttctatatcattgtcctcatcaccaaacgcaatgatatgatcgtcggcgatgtttaaatagttttgaacatgcttgattccacgtgctttgttaatcccacgcttcacaatttctattactggaaacggtgcgccccaacgacgatgttcaatattttctgcataaaaatgtgttaacatatctttaatttcaggaatattttcttcttctgcttcaacaagtaatgacgtaggtgcttcattaagattttcaagtaaattacctgtttgaattttaggatttcccattgaaaaaccttcgtaaagtcttgaatcataactatttataaagacatagtcttttacttcagcaatgatatttgtaatatgagattgttgaagtgctgtaataatatttttagaaatttccacatcaagtacttcatgtatcactttaaaatcgtttgcttttggatgatgtacaaatgctccattaaagttaacaacaggtgtgctcatatttagttcatgataatacatctggcttgcgcgatagggtcttccagtagcaatcataacgtagtgtccacattgttgtaattcggttaatacttgtttagtgtaaggtgagatttctttattgtcatttaataatgtaccatctagatctagacaaattaaataaggttgcatatattactccttgtgttgttaattattatgtaacagtatcatagcattttattggcgttttgtcggatatttgatatattggtgtaaagaaaattttaaagaggtgatactgatggaagaagcactaaaagatagtatcttaggcgctcttgaaatggtaatagatcctgagttagggatagatatcgttaatttaggtttagtatataaagttgatgttgatgatgaaggtttatgtacagttgaaatgacattgacttcgatgggatgtccattaggaccacaaattattgaacaagttaagagtgttttggctgagattcctgaaatttctgatacagaagtgatgattgtatggagtccaccttggaataaagatatgatgtcacgatatgccaaaatagctttaggcatcggataatataaaggatagctactcattgtttggaataatgatgtagctatcctttttaattattaaagaaaattcaataagaattatcgtatgttcacgtggcttcatttatgatttaaatcaagaaatagagaccgcctatttatctttattgacaagtaaaatggaagggttcaatttaggtgtacttgaaacgattgctaaaggcgtacctacagtaagttatgataccaaatacggaccttctgagttaattgttaatcataaaaatggctttttaattgaacaagataataaagaacaactctatcacagcgttaaaaagttattactcgattctaacttaagagaacaattttctaaggaaagtattaaacatgcccaaatatttaatgacaaaaatgtttttgatacatggctcactgttttcagaacgttaaaagttaatttataatcgccaatttattaagatatataagggtgaagagaagtgtgaaacatcatacatcatcttcacctttaatttattctataatatttcatctttaatctgtgccttttgatattgaacatagcctgatatataatgttcgatatcatcaatccgaactcgatacccatggtgttttatgaagaaactaccaagaattcgctttggatttttgaagtacattgcaatttcaggatagaaaaatcctactcgttgatattctgctcttgtatgaatcacattgattaatttttcttcatcaatcaactgagtcacaagctcttgacgatgtgtagcttttgctttttgaataagcttataggttgccattaacatttctaaaaatgttgggaatgttgtttcacgttgttcaatatattccaaataggtgttcacattcttaatcccaaattcaaaatatttatcttgcggacacaattgaactaactcgttcgtgcaatacccaagccaatgatcatggtattgccaatactctttttcaataaatcgatccattaacttcttcacaacttccaaccatttatcattatgatcttggtgatataagcgtaataatgctaaagctgcttcaccatcataataaataattctaaatgattctttcacagttaaatccggataatttaaaatatgagttgtttcgtatgtatcttgattaatcattgataaaattcctcgagcaactttttgtgccacgcataagtattgcttattggggttatgctttaaatattcacaaaccgcaaatataaaggcagcatt

SEQ ID NO: 3636 - DNA, 3190 bp, Artificial Sequence
  Description of Artificial Sequence: synthetic nucleic acid sequence
ccgaagaaggttcaaacactagcgcagcatctgaatcaacttctagtgatgtcgttaatgcttctgcaacacaagcattaccagaaggcgacttccctgaaactacagaaaaaatacctgcaatgcgcaaagcaattgctaaagcaatggttaattctaaacacactgcacctcatgttacattaatggatgaaattgatgtgcaagaattatgggatcaccgtaagaaatttaaagaaattgctgctgaacaaggtacaaaacttactttcttaccatatgttgttaaagcattagtttctgcacttaaaaaatatccagcacttaatacttctttcaatgaagaagctggagaggttgtacacaaacattactggaatattggtattgctgcagatacggataaaggattattagtaccagtagttaaacatgccgatcgtaaatcaatattcgaaatttctgatgaaattaatgaactagctgtaaaagcacgtgatggtaaattaacttcagaagaaatgaaaggtgcaacatgcacaattagtaatatcggttccgctggtggacaatggttcactccagttatcaatcacccagaagtagctatcttaggaattggccgtatcgctcaaaaacctatcgttaaagatggagaaattgtagctgcaccagtgttagctttatcattaagctttgaccatagacaaatcgatggtgctactggacaaaatgctatgaatcacattaaacgcttattaaataatccagaattattattaatggaggggtaaaaacatggtagttggagatttcccaattgaaacagatactattgtaataggagcaggtccaggtggatatgtcgcagccattcgcgcggctcaattaggacaaaaggtaacaatcgttgagaaaggtaatttaggtggtgtatgcttaaacgttggttgtataccttcaaaagcattactacatgcttctcatcgctttgttgaagcgcaaaattcagaaaacttaggggtaattgctgaaagcgtttcgttaaactatcaaaaagttcaagaattcaagacttctgtagttaataaattaactggcggtgttgaaggacttttaaaaggtaacaaagtagagattgttagaggtgaagcttatttcgttgataacaatagtttacgtgtcatggacgaaaagagtgctcaaacttacaatttcaaacatgcgattatagctacaggttcaagaccaattgaaattccaaattttgaatttggtaaacgtgttatcgattcaacaggagctttaaatctacaagaagtacctaacaaactagttgtagttggtggcggatatatcggttctgaattaggtactgcttttgcaaactttggctctgaagttactatccttgaaggtgcaaaagatattttaggcggatttgaaaagcaaatgacacaacctgttaaaaaaggtatgaaagaaaaaggtatcgaaatcgttactgaagcaatggcaaaatctgcagaagaaactgaaaatggtgtcaaagtaacttatgaggcaaaaggtgaggaacaaactatcgaagctgattatgtattagttacagttggccgtcgccctaatactgatgaattaggattagaagaacttggtctgaaatttgctgatcgtggattactagaagtggacaaacaaagtcgtacttctattgaaaatatctttgcgattggagatattgtacctggattaccattagctcacaaagctagttatgaaggtaaagttgctgctgaagcgatagatggtcaagccgcagaggtagactatattggtatgccagcagtttgctttacagaaccagaattagcacaagttggttatactgaagctcaagcaaaagaagaaggtttatcaattaaagcttctaaattcccttatgcagctaatggacgagctttatcattagatgatacaaatggttttgttaagttaattacacttaaagaagatgatacgcttattggagcacaagttgtaggtactggcgcatctgatattatctctgaattaggtttagctattgagtcaggtatgaatgctgaagatatcgcattaactgtacatgcacacccaactttaggtgaaatgacaatggaagctgctgaaaaagcaattggttatccaattcatactatgtaattactagttaataatgataaatgtatataaattaatatgatttatttatgatttgtacgtatattactttttcgtttgtatagtcacggactggcaaagacatacgtatcttaaatcatttcaaaatacccttagcgtttagctactctaaataatagcaatctgctaggggtatttattcatggtgggatagaattcaaaaatggattttatcccatctttttatgccaataaaggtatactgtgttatttttaatatatctaaatgtgaaaaataaaagtatatgaaggagaggacactatggaatatcaatatccattagatttagattggactaatgatgaaatgatgaaagtaattcatttctttaataaaatcgaaaattattatgaggcatctgtaaaaggtgacgaagttttaaatgcttataaaaattttaaacatattgtgcctggaaaagctgatgaaaaacagatttttaaagaatttgaaaataaaagtggttataatagttacaaagtagttcaagaaattaaaaaaaatccaaatcaaactttatttagtaaagatttcgactaactttttctattaaatccacaataataagttaatataaaactattgattacgtagctatattctgttatttttattaagcattaaacaaaatgtttgatataagtaaacatgatatagcttttttaggtggttagaaagatggatattggatacaaattacgtaatttaagaagaataaaaaatttgacacaagaggaattagcagagcgaactgatttatcaaaaggatatatatcacaaattgaaagtaatcatgcttcacctagtatggaaacatttttaaatttaatagaagtacttggtacttctgcaagtgacttttttaaagaaccgtcagatgagaaggtactttataagaagaaggaacagaccatttatgatgagtatgataaaggttatatcttt

SEQ ID NO: 3637 - DNA, 3309 bp, Artificial Sequence
  Description of Artificial Sequence: synthetic nucleic acid sequence
aatgaatagctcctaaaaataatgcgaaaatatctgtggtaagaggtttaaaataatctgatgaatcgtaaatgttcataaataaatgaacacatccccaagaaagaaatattccaatgcatctacctattacaatacttatattatttttaaagccaaatttaaaaatggatatactcattaatatagcaactactataaatgggatgtaacctattaataaacctgtttgataatcagtaaataatccgataaattctattggaactaaagataaaattaatataatgatttttaaccatttcattttaaaatttctcttttcaatattatttttccttcaatatcattttattaatataattaggtagaagtctacgctgtctctaagtggtagatgaatgatctctattttttattatgttatacatttatattattttctgtaaggttctgattctaaaagatatttataataggagtctttcttttgtaaatctgtttccccccacaccttatattctttatcatctgtccatggtgctggtgtcacgttatactcatactcactatatggttgatctttaaaaacaatatctttttcagcatatcccattataatattaaaactcattttttcattttttatttttttatcccaacccttacgttctataacgtgattgatgattttctcactcttgtgtttctgataagtaatcacactaaaagtccaaactgttaaggtaataatgataacaataatagaagttattaatatttttaagattttattcattttttaatttctataccatgctgttttaggccagtttttatgtttgggtttacctttccatgatgagcaatctttgacaccttttctataaatactattcaaaccatcgcatttagtcatttttcccaaggaagaacatttataagctttggcgtgataccagcaatcacttttataaaaatctacataagctctaggatgtttttttgaccagtatctatgatcagattttgttccgttaaatctattacaatgtacatgagtccctttttttactttttgaccatcgtgttgtccgttatatgatttaccactataaaaggttatcccatccgatatttttccatcatctttcccatccatattaccaacaaaatcagagaaattaattacttttgtattattttcagcactaccatcagctgaataacttgaagttttattctctggattaggtaatttgtcttctacaacgactttatctattaacaatattactaatgctacaactacacaattagttaatgatgctaaaaatagtggtaacacgagtattagccaaatattaccaagtacagcagtcaaaactaatgcattagcagctctagctagcgaagctaaaaataaaaacgctataatagatcaaacaccaaatgcgacagcagaagaaaaagaagaagcaaataataaagttgatcgtcttcaagaagaagcagatgctaatatcctaaaagcacacactactgatgaagttaataatattaaaaatcaagctgttcaaaatattaacgctgttcaagttgaagttatcaagaaacaaaacgctaaaaaccaattaaatcaattcattgataatcaaaagaaaattattgaaaatacgcctgatgcaacactagaagaaaaagctgaagctaatagattgcttcaaaatgtactaacttccacatcagatgaaattgctaatgtagatcataacaacgaggttgatcaagctttagataaagctagaccaaaaatcgaggcaattgtaccacaagttagtaagaaacgagatgctttaaatgcaatccaagaagcatttaattcacaaactcaagaaatacaagagaagcaagaagctacgaatgaagaaaaaactgaagcattaaataaaataaaccaattacttaatcaggctaaagtaaatattgatcaagcacagtcaaataaagatgtagatagtgcgaaaacacgtagtattcaagatatagagcaaattcaaccacatccacaaacaaaagcaaccgggcgtcacagattaaatgaaaaagctaaccaacaacaaagtactattgcaactcatcctaattcaacaattgaagaaagacaggaagcaagtgcaaaactacaagaagttcttaaaaaaagccatagctaaaatagataaaggtcaaaccaatgatgatgtagaaaagactgtagtaaacggaatagctgaaattgaaaatatattacctgctactacagttaaagataaagctaaagctgatgtaaatgctgaaaaagaggagaaaaacctacaaattaatagtaatgatgaagcaacgactgaagaaaaattagttgctagtgacaatttaaatcacgttgtcgagacaacaaatcaagctattgaggatgcaccagataccaaccaagtgaatgtagaaaagaacaaaggtataggtacaattagagatattcaaccacttgtagttaaaaaacctactgccaaatctaaaattgaaagcgcagtagaaaaaaagaaaactgaaattaatcaaacacaaaatgcaactcatgatgaagtaagagagggtttaaatcagttaaatcaaattcatgaaaaagccaaaaatgatgtaaatcaatctcaaactaatcagcaagttgaaaatgctgagcaaaatagtttagatcaaatcaataacttcagaccagattttagtaaaaaacgtaatgcagtagctgaaattgttaaagcgcaacaaaacaaaattgatgaaatagagcaagaatttagtgctacacaagaggaaaaagacaatgctttacaacatttagatgaacaggttaaagaaatcattaattctataaatcaagctaatacagataatgaagtagataatgctaaaacttctgggttgaataacataactgaatacagaccagaatataataaaaagaaaaatgctatattaaaattatatgatgtttcagatactcaagaagctataattaatggttatcctgatgcaactgaagatgaacttcaagaagctaatagtaagttaaataaaatacttttagatgcaaaaaaacaaattggtcttgcgcacacaaataatgaagttgatgatatttataatgaagtttcccaaaaaatgaaaactattttaccacgtgtagatacaaaagcggtagcacgttctgtacttaatgcacttgctaaacaattgattaaaacttttgaaaatactgcagatgttact

SEQ ID NO: 3638 - DNA, 3723 bp, Artificial Sequence
  Description of Artificial Sequence: synthetic nucleic acid sequence
gaacctttttcaacaccagctgcttttttaagtagtactggagccggcggagtttttgtaatgaatgtaaatgaacggtcttcataaacactgatttctaccggaatgattaaacctgcttgttcttgcgtacgagcattgaattctttacagaatcccataatgttcacacctgcttgacctaatgctggaccaactggtggtgctggattcgctttacctgcaggaatttgcaatttaactactttttctacttttttagccacgatgtgcacctccttgatatcgtgatgtggtcacagggcttagttttgccctcccactcttaaacatttcgtgacgaaatgagcgctataaaagcgcgaccacattattttaacactcatattgataaaaaatcaatagttaaaatttcaactttgctaactacgctattattatttgttttattttatacattcataacgcttgtttatgtacatccatcacttataaataaaggaatatacttttctaacttataattctattttcttttaatgaatatctttcttaaatctattcaaatgtgttttgagtgaatttaaacaaaatagttttataatttttcaatttggtcaaattcaacttctacaggtgtttcacgaccaaacatatcaacaagtacagtaagcttgaatttatccgcttcaatctcttgtacttctccaatttgattagcaaaaggacctgattggatacgaacttgttccccaacatcgagttcaacatctattgttttctctttaagacccatttgcttaagaatgaagcgtacttcttcaggaagtagagggttaggttttgatcctgcacctgcagatccgacaaatcctgttactccaggagtatttctaactacataccacgactcatctgtcatgattaactcaactaatacatatccaggaaatgttttcttcacaatctttttagctttcccatccttaacttgagtttcttcctcttctggtatgacaactctaaaaatttgttcagtcatattcatagattctactcttttttctaaattctttttaactttattttcatatcctgaataggtatgtacagcataccaacgcttagcgcctacttcttcagacatgtcttcactcctaacctaaaaataattgttttaatgcattaattcctatgtctaaggcatagaaaaagactaagaagaatatcactgttgatacaactattattgtatatttaaataattcttccttagttggccaactcgtcttttccatttctgacttaacgcctttaaagaaactttcttttttagccatcataagacctccacactctataactttctaatgaaagtcatactcaattaattgatatcatcttatttcgattctttatgaactgtatgcgcgttacatcttggacagtatttttttaaagtaagtctcgttgctgagccttcctttttaggaacattgtaattccgattgccacaattctcacaattcaaaggtactttcttcacaattattcacctttactcattataataccaatatactatacataagtattgtattaaatgtcaaacttatgcgccacgctataatttcctcaccatacagtatactatttgcatattattttcttattcaaaacttcttttaagtttacatttactacgttgaatcgcattataaacaactttggattccaaatttaaaaccatagcaatctcctttggcttgtaatcattaagtagtaatcgaatgatacgtctttccattcgactgagtttgacttcgcttcttttaaaagctaatgttaattcttttctaattatcgatctttctatatcgtttaatgccaaagtagcgttatattcaacaatgtattccttaccgacagcttcccattttatagatactgttatgataattccgagtaaagggacaatggacaagattaacatagtattcgttagacctactgcagcaagaatgattggaaagacaaaagtacctatgatactaccagtacgacttacagattctacaaagccagtagcttgtgaacgtaaatgagtcgggaatgataaggcaccaattgtttttccttgagtaccaggacctcctgaatggccaaataaaaataatccaataaggaaagtgttaagaagcattggtagatgatgataaaagagtcctacacataccattgaaagtaatacaagtgtgaagcctatcattgtaagcttgcgtgtacctaatttataagtcaattgagcacctaaatatgcgcctagaatacctgctatattgactatagcagtacctaataatacacctattttatccttactaataagataagttgcaataataggtatgtataaaccgacaccatagtactgcataccttgtaatgttgaaatcgcagtcgccaggataattctttttatatatctcggtttaaataagtctgtccaagaattatgtggcgaagtcacatcagaacttaaatcatcttcaagcgttccctctaggtggatgtctttatgataatattttcttacaaattcagttgctttttctaaagaataatgattaatcacccatgtcggactttcgtgtaaatatttaattcgcaagatgtacaagacaaaagcaataagtgcaccaaatccaattgcatatctccacaaatgtgcaccagcccctagcataaagaacgcaatgaccactaaagcagaagtaactattgcaacataccaaacgacttgccaatagttaacatttcttcctttgtgctttaaattacttatttccgcaataaaagtgaaagcaactggactatccattccaatagcaaaccccattatacaacgacatattattagaataattacatttggtgcgagtgccgcaccaagagaggttacagtgagtgttagtaaggcaattgataaaatatgcttgcgtccaaactgatgtgctaatgtaccaccaagtaatgcaccaaataatgcaccaataggtaaagaggtcattactatagatagcgttgatggtgataagtgaaactgttgagtgagttgatcagtcattgtacctaaaatagtaatatcatatgcatctaaaaatatagttcctaatattaagaataaaaccatcttagatgtcgatgtttgcgcttcattgtctatgagtctaaataagtcagtttttgatttaacgaaatccatattttcatcccttattttcattttcttttcaatcgtaatccaaggtcattaattcaatataaaattaagattaaaaaattattaatgtttttaaagatgagaagtgatttgtggataactagataggtaaaaaatagaaaagttgttatagcaacgttttaagttagggtgtaattatccacagcagctggattatatgtgtataatttacagaattgtgtgacaatcatagctgtttatttgctatcaacagttttaaatgttggagatatagattgtatgataaattacgtttaatttattattaaagttaaaggttgtatattttttataatttcaaataatctaattagaaaattcttttgattaaatataatttgttgtattatttaataaatgaaaagcaattagatttttgtaatagtttagaaaatatttggtgttgagaaaggtttatt

SEQ ID NO: 3639 - DNA, 3048 bp, Artificial Sequence
  Description of Artificial Sequence: synthetic nucleic acid sequence
gttcgttcaagaagacgtaaaaaaaattatcaatgacttatccggcggcgaaaaggcacgattacaattagcacttttaatgttacaacgtgataatgttcttatcctagatgaaccgactaaccatttagatattgattctaaagaaatgcttgaacaagcattgaaagattttgaaggcactgaaattcaaccaaatatttttcatcacgttaggtgatgattcaacagtttccattgctttttcccatgcaaaaagtagctttttttaaccttttaattcgcttgtatcttcttctataaatggctgatcataatatgtgttgctaattttactgataggccaaatcctaactgtacaagctgttactgcagcagtaacaaacaaggtagaccaaaaatataaattccatatatccattaagtgtaaggttttagcaataactatcataaaagctacagtaactgtagaaaagccggttgctatgataacagcttgtttttccgtgaatttaccttctttatactctttattcgttataagtaaacccacagcaaaactagcaacaaaagatgctaaagcattaactgctgaacgtccaggcgttttccatatcgggtacataattttttgcgcataaacacctacaaattctaataagccatatcctactaataaagctaataccgcgcctcctgcaggtactgttaatcctaccggaattaccaaatagttaaaaacatacattcccgtttgttcattaagtaaccaacttggcccaatgttaaaaattaacaaaacgcctataatgactcccaaaactttaaataaactaaaaattgtttcaacggtattccgattccatgtccctttaataaatggataaatagcacctagtataatgataatcattatgaatatcttagttaaaagaggtaatgcgctacttatccatgtgacaaaatgatctaataaaattgaagagttattattaatcgttaccggcacaaaaaatatagcaattcctataagactatatacaaaaaacggttctgttgcaaagtaaaaaatatagctaaccactaatttatcatgtcagtgttcgcttaacttgctagcatgatgctaatttcgtggcatggcgaaaatccgtagatctgaagagacctgcggttctttttatatagagcgtaaatacattcaataccttttaaagtattctttgctgtattgatactttgataccttgtctttcttactttaatatgacggtgatcttgctcaatgaggttattcagatatttcgatgtacaatggcagtcaggtttaagtttaaaagctttaattactttagccattgctaccttcgttgaaggtgcctgatctgtaattaccttttgaggtttaccaaattgtttaatgagacgtttaataaacgcatatgctgaatgattatctcgttgcttacgcaaccaaatatctaatgtatgtccctctgcatcaatggcacgatataaatagctccattttccttttattttgatgtacgtctcatcaatacgccatttgtaataagcttttttatgctttttcttccaaatttgatataaaattggggcatattcttgaacccaacggtagaccgttgaatgatgaacgtttacaccacgtccccttaatatttcagatatatcacgataactcaatgcatatcttagatagtagccaacggctacagtgataacatccttgttaaattgtttatatctgaaatagttcatacagaagactcctttttgttaaaattatactataaattcaactttgcaacagaaccggtttttttatgtcaaaaattcctttcaacaagaaaaatagctataatcccttacataccaaggattacagctataattttaaaatcgagttatttctatatagtatcaagacaagaagaaactcgttttcaactcgtttcaaaaacctttcaaaaaccatcaatccacaaaaataccacgcgaatgacactcaaaatacaagactacaattaaaaaatacttagaataaaattaaataaaatacgaaaattaaaaggagttaaaaatgccttatatttatttaataatagccataagtactgaagttattggaagtgcatttcttaaatcttcagaaggcttttcaaaatttataccatcctttagaataaaattaaataaaatacgaaaattaaaaggagttaaaaatgccttatatttatttaataatagccataagtactgaagttattggaagtgcatttcttaaatcttcagaaggcttttcaaaatttataccatccttaggaacaataatttcatttggaatttgtttctattttttaagtaaaacaatgcaacacctaccactaaatataacttatgcaacttgggcgggactaggtttagtcttaacaaccgtagtctcaataattattttcaaagaacaaataaatctaataactatagtatctatagttttaatcatagtcggcgtagtttcgttaaacattttcggaacatcgcattaattgctttattccaattgctttattgacgttgagcctcggaacccttaacaatcccaaaacttgtcgaatggtcggcttaatagctcacgctatgccgacattcgtctgcaagtttagttaagggttcttctcaacgcacaataaattttctcggcataaatgcgtgttcttgttataatatagacatcacatttagggtgcttattaaaagtagttttttataatctacttcgcaaaagcaaataaaaagccaatccattttatctgggttggctttttatttttatatgcctttatttgaattttaagggggcattttaaagattcagggggtaaatcatatagttttatacctaaaagtctatatacgcttttaaaacgcaaatatgagccaaataaatatatcttaatttcacaaacaaaaatttgagcaaaaccagtgactaattttttagacactgcccagttatatgcaaat

SEQ ID NO: 3640 - DNA, 3638 bp, Artificial Sequence
  Description of Artificial Sequence: synthetic nucleic acid sequence
aatcctaaaaaggataatgatgttacaatttctcattatacgcagtcatcaaatgttaaagttttagttggtcctgaacaattagatgaattcttcaacaagtttgttttccatggacgcatacagtacaatgtggatgatttacaagatatcatggataaaatcgagtcattcaattaaattattaaagaaatactttatttttcatatgagtgcttattatagtcttcaaaacaattactacaaattaattgttttgaaggcttttttgatttgatagtattacttttttaaatagtaaaaatagggtatgtattactagtaaacttttcaattacaatgattaaaggagagattatatggagacggttcaattttataacggaagaacaatgccgaaaatagggctcggaacttatagagtaaaagatggcgatgaatgtagagaatctgtaaaatatgctatcgaacaaggttatagaagtatagatacggcaatgatttatggtaacgaagaaacggtaggtcaaggtattaaagaaggattagaatcgactggtttaagtcgtgaagatttatttataacttctaaattatggctaactgattttggacgtcaaaatgtggaagatgcctatcgacaatctgttgcaaaattaggactggattatttagatttatatctgatgcattggccaggtacaaatgaagcggtaatgattgatacttggagaggtatggaagacttgtataaacaaaatcaggtgaaaaatattggtgtgagcaattttactccagaacattttgaagcattgcttgcccaagtttctattaaaccggtcattaaccaagtagaatttcatccttatttaacacaaaatgaattacgaaagtatttagaagctcaaaatattatcatggaatcatggtctccattaatgaattcacaaattctccatgatgaagtcataaatgaagtagctaatgaagtaggaaaaactccagcccaagttgtaataagatggaatattcagcacgatgttgttgttatacctaaatccgtaacaccacatcgcatagaagaaaatttagacgtatggaattttgaattaagcgacaaccaaatggaaagaatcgatcaattaaatcaagataaaagaattggacctaaccctcttgaatttaacggtaagtaaatcaatagtaaaatgaggttgggatataattcctagcaaaatagccagtaaatgagttttcagaaattcatttactggcttctttatttacaatacttcgtattgttggctcgctttcttaggggacagcttcagcctgtagtcttcagcttgtcctgttccctcaagagtctcgccaaaatactttgtattcatatgtaattttacattaaaatactttaaaaaaataaagccctttcgtacaatttaataaatagcaataaactaaattaacgaggtgccttatgtataaagactataacatgactcaacatactctactaatggaaacttcagttcttatccccgcgaatgatatttcacgacatgtaaatgatattgcagaaacaattcccgatactgaattcgatgaattcagacatcatcgtggcttaatataagaaaagtaacagctcaacgaactgaaaataatcaaaaaactataaaaaagacaatttctatattatttcaatagaaattgtctttaaatacttatcttggaactttttgtcccagcctctttcctacgattagtcaagtacttataattaaaataagcattacttaactaaaccgttcattttaatttttttgaataaggtgttaaactatatttgattgtacgtttggctaatgtggtgacatttgataatcgtacaatttatgattcattacaagataatgaattgtttttaataatcgatttatacaagcaatgatggcagtcttatgaggtttctcattaggctgctttcttagtttgtagtaataatcgacgacatgattgtcataatgatgctgccctcttattatattcataatcacccaaaataaaagttttctcgcttttttattaccacgcttgttgatggtatctctacagtgtgtatgacctgattgatatcgtttgatatcaatgccaacaaaagcattgagttgtttatttgatttaaatcgcttaatatcaccaatctccccaataatcatagctgtgcttagtttaccaataccaggtatcgaatgaatattttcaaaataatcgagttgttgtgctaattgaatcatggcatcatctaattgtttgagatgatgaatagattgttttaattgttgaataagtaagcgtaatttttcgactagaaaggaatgtctatcgacattaggatagctttcttgagtaatcactcttaattgaagtgcatattttgtagctttatccattgacattcccttatctgtagaattgaatatatgtgtaatcagtacatccttgtcgatatcaagaaccatgtctggatgagtaaagatttctgcgatgttgagtgcaatgattgaatatcgactactaaacaatctttctaaaccagggaatgtttgatggagtaattcaaggatctgaaatttaagtcgattttgttcattctcgatttctagatgaaaacggacgcgttctcttaattcaaagaatattaactcatgtataggtaagctgtctgtttgtttaagcgtcggtcctaaacaagcaagcttatgagcatctgcctgatcagttttccatgatcttagagcgctcgttttaaatttggcttctaacggattcatttgaatatagttaatttgatttacacaacaaaatcgttccatacctcttgaatagatacctgtagattcaaaaatgagttgtgggtggtctaagtcattcaaatacttgagtaaataattgtaaccatttttattattctggatgaaaaactctttttggaattttccttttttataatgggcaactacactacttcttttactaatatcaacacctaagtaatcgataaaaaaacctcctttgaataattgagaagctaaaaactttacttaacctttctcatttcattttcctatacacggtttcaagaacccaacatactacatacgaatttcaaaaggcgagagtaaagctgacttgttttttatacggatttaaaatccaagagtctggacagtctacttctctctataactataaaaaatagctatgaaaaaatctatcgtcatagatttcttcatagctaatcttagtatgtttattatatattggtacaacatcgttgagttgagaatatgtttattatatattggtacaacatcgttgagttgagaatatgtttattattttaactacaatgattctagttgtcatgatagcttgaggaccttaataaggatttagtttcgttgagcttctaaattaataagaaaattcaagatacaaatagaaatcataatctatgaaataaattaatataaccgttagtaaaagttattttaatattagatgcgatatccataaaagcaagcaatgaaacctaaaataaattgtaatagggaataaactacaaaacgtat

SEQ ID NO: 3641 - DNA, 4094 bp, Artificial Sequence
  Description of Artificial Sequence: synthetic nucleic acid sequence
taatggctttaccagcactcatattaggtatatttaatcatcttgcatgtagaatcatatcggcgatattacaaataagtgcactgatgatgtgggggtttttagtaatcattagcttaattatgggacaaattgtcattatgcttatggcttccttaacgatacttgcattacttgttagttctattgtcacactttcagtgcacccatctacttcagataaaataaattaatcaaataaaggggcaagaaaggtagaatttacagtgaaattctctttgttggggcccatccccaacttgctttgcttgttgaatttctcagtgaaattctctttgttggggccccatccccaacttgctttgcttgttgaatttctcagtgaaattctctttgttggggcccatccccaacttgctttgcttgttgaatttctcagtgaaattctctttgttggggccccatccccaacttgctttgcttgttgaatttctcagtgaaattctctttgttggggccccatcctcttgtaaaaaatggtttgatatgtgtgtatatttttaattctatcatttgactgattgtatgttatgaaagcctgggacatcgataatctatgccccaggcttcactcacaatcctatattatatataacaatattgctacggttgtttatagacatcaatcatatcttttgatagagaattaatatcaatttagccagcaattacaattttacaactcaaatgattatatatgtattcaaaacttcatttcttctttaattaaatatggatagcaattatgaatttccgtcgttaaggcttcttccttagttatcattttaaaatagacgaaaaaacatctaattacaacttggtgcgcaactatcactacacgtctctgctgttgattaagctcattttcaatgaaagtaaccactctatcatagacatcttgataactttctccttgtggtgctttttgcgaaaagctatgtctaaagtatttataattaggatcacggaaatatttttcgaaccgtttgtctttacaaacttcttctttatttttaccttcaaaaacacctaacgaacgctctcttaacgtctttgtatatattgttggaatatcataaggaaatagctcctcatacgtttgccttgttctttttaaatctgatacatatacattgtcaatgtatttatttttaaaataaacagatagttctttagcgctttttatacccctttccgtcaaagggacgtctaactgtccacaaaaatatagatacccgtgtttattatcataattggactgtgactcaccatgcctcactaaataaatttccattctgtctcctcatttctgacttagctacttttacttaataataaattaatagataagccaattaaaacaaaccctacaatataatcaaatatagccttgaatctcggtctgctgaataataatttaatatattgaaagatgaatacacaaaataaaaaccataagcatataactacaacaactgaaaaagcaaataacgcaacttcagatttcatatgtatattaccgttagaaaggaactgcgggaatatactaacataaaataataaagccttagggttaagacttgtacttaaaaaaccttgtctacttttattattttcagtgttatcaatatcttcaattttaattactggtatatgtgaggatattgcttttccatatgtgagcactgctgcgacttcagcgtcttcaataataaattcaatgcgtttatcgggataagtgacgtcaataggtacataagaacctccaacttttaatacagcaatcatactagcaaccatttcaaaacttcgttcagttaaaagggctacacgttcccctttttgaatgccattttgtatcaatgtttgagccatactattagaataatcatcaagttcttgatacgtcatcgattgtccattcattttaagtgctacatcatctgctttcgctttcatgacatcatgtaaaagttgctgtattgacttattttttggcaagtctaaagaacaatcattcacatgcttgtccaaccaaattaataagtcatcattttcatcaatatcttgaatttttaggttttcggtagatattacatgtttaataatcatttgaagttgttcagcaatatgatgaatggtctcttgtttatataaatctgtattatattcaatattgacgacatagtcatcttgatcttcttcaataataaatgacaaatcaaatttagctgttgttgactgaggtggaatatgtgtcaattgactatgtccaaaattcgcatgatttgtttcattattttgaagtacgagcatcacatcaaataacggattatgtgaagcatctctttcatcaacaagatcattgactaagctttcaaaaggatattcttgatgttcatatgcccctagacacatctctttcatctcagccatcaattgatcccatgtcttttgatcatgtggtcgaccacgatatacaagtgtattagcaaacatacctaacatattttcagtatcgcgatgagtacgcgcactgattacactaccaatagcgatatcgtcctgacgtgtatatttgtgcaataataccatgattgcactagcaaagaacataaagtctgtcacttgatgttgttctacataagatttcaattgctgtttgatttgacgattgtaatgaaacgtcaacatattaccgttggttgttttaatacttggtctaggataatccgtaggcatatttaatattggaacctgattttcaaattgctgtaaccaaaagtgacgttgtttagataagtctctgtgcaccatccactcactataatctttatactgaagcttaagttcaggtaatgatttatcttggtataaagcgttcaaatcagatagtaaaatcgtgttactcataccatcattaatactatgatgagtatccataaataaataatcttgttgtggtccatgtatatatttaactcgcatctgacttggttgttctaaatcaaacggttccataaatgattgaataatatcttttcgtctgcaggcgttaatacttcagactcatctatatagtcaacacccatcgattctaaaactctagcttctgtaatatgaccaattctggctttagccataaccggaattgatacggcattcataacttcttcaactattttaggattcgccatacgtgcaacaccgccagcagcacgaatatctgatggtacacgctctaatgccattacggcaacagctccggcttcttcagcaattttagcttgttctgcattaacgacgtccataatgacaccgcctttttgcatttcagccattcctcttttaactcgatctgatcctactattttagacatactacttaccccttttcttattgattaaatatattttacgagataaactgatatttaaaaaggttcaatttgtacataaagataggggtcagttaattgaaagtaaatcaaccactttatttatcgttatatgaaaagttaaaaaatcaaattatcgaaggtcaatatcaatcaaatgatagatttccatctaaacgacagttaagtaactatttatctgttagccacactacaatagaacatgcatatcaattacttgtagatgagggtttcatttattcgaaacctagatctggctacttcgtttccgatatagaatcgttgccagtgatacatcgacaaacaaatcaattaaacactgataacttagaaaagaagcaacgacaatataaatatgcttttaatttactgatgaaatgttagatgattttcacttcttaggtgaagaaaaagcatatgaaatcgttgtaacaaatacaaatgagctcgctaataaaattgaaaaagtggttcctataaaagataaactatttacgccaagaatggatggggctaatgaagaaattcgtgagttgagttattctaatgcgaaaaaactatatggtgaagatttaccacaaattgttatagatcgccttgaaaaggaattagata

SEQ ID NO: 3642 - DNA, 3755 bp, Artificial Sequence
  Description of Artificial Sequence: synthetic nucleic acid sequence
aaagcatccatagagttccttgttaattcgggttcaccaacgccatctttaaacttaattttgtcgatttctttttttaattgttcttcagctttatccatatctgtaccattatcgtattctacagttactatagaagcattaggtatagattcagtctgtacactatttacgtaggccaacgagcgtacttgattatcaatcttgctacttatttcatcttgtgttgactggggtgttgctccagacattgtagtttgaactgaaataactggattttcaacatctggtaataattcaagttttaatttggcgcttgaataaacgccacctaatataattaaaactaccatcaaaaaaatagcgaatttattacctaacgaaaattgtaataattttttaatcattcattttttcctttcttataaaaaatctgaacgctctcaatttatctatagaagcgttcagatctgaatgtagtagttatttacctttaagtttacgtgatattttaattttagctttcgttaaacgaggtttcactttctcaactaaatgatatagcggttgatttaatacataatcaaattctccaattttttcacttaaatatgtaccccaaactcgtttaaaagcccacaacccataatgttctgaatctttatcaggatcattatctgtaccaccaaagtcataggttgttgcaccatgctcacgtgcatatttcatcatttcaaattgcatgtgatggtttggtaagaaatcacgatagtcattcgaggaagcgccatagagatagtaagatttgtttcctgcaaacattaagagcgctcctgacaagtaaataccttctggctcgcttttttcaagttctgttaaatccgattttaattcatttgttttcttaattttattatcaatatcattaagtttattaagtgtctttttatcttgcttttttgattgtaatttctctttctcagctaattgtgcttcaagatcttgattaaccgtatctaatactggcttaggctctaatttaacaaggaagagttctgcatcaccgtcttcatgaagtgcatcatatatattttcaaaataactaatatctcgagttaaaaaaccatctctctccccagttatcttcattaaattagcaaagattttaagcccctcgcgatttgatcgttctactttagttccacgcttcagtgcaagtcttacttttgaacgatttcgacgttcgaaactttgaactaattcatcatctgttttgtcaataggcgtaatcatagtcattcttggttgaatatagtctttagacagtccttctttaaaacctttatgtttaaacccaagctcacgtagatttttaagtgcttctgcacctttatctacttcgacatcgggatctattttgatagcatacgacttttcatcttttgctacttctttagcatagctaagtagagcttctaacacttctttattattataatcagctacaaatcccctagatacatagcataaagtgtatggaagtttaggtatttttttgaatagtagctggccaacacctttaatttgaccattttcaccgacagcaattcttcttgaataccatcctgttaattttttcgtatctgcccacttagataattgtaataaatcaccattgggatgagatttcacaaatgcgtcatgttgttgattagtgatgttcatcttttccatggtttaaaatatctcctttattttacagtaattttaattatacatcttaatgagaacgatgtcgacgatgtcactttcaaaccgttttagttctttcaatactattacccttgatataatgattactaacaactagtaaagaggtttttatatgagaaagtttattttattgttatttattatcctaaatctcgtggcaatcattattacaatcaatcacccactaacaatttcatattttagtcttcgtgtcatcttcgtagcatttatatttattatatccattttttttatttttttacgtaccacaaactatgaattgattctaagtattttatctaccgttttcgctttcatacacatcggtttaattattcacagtgcctatctatatttatactagttgggtggctcaaaacgatatttagcaccacgtataaatattgaatatggtgctgtggcattgatatcggtcattattaatgtatgaaaacctgaatctttgccgtcttctattttatagataacttcatcagtttctaatttgagatcagtagatgtagccgtttcatttactattttcaggttataccattctttccaaagacttactgttgtttcacgttgagtgctagtaataatcacctctttaattttaaacgatgacaagttgaaattatgtatttgtgataggttttgctttttgttgttatcccattctataaagaaaggtggtttgactgtatagtcagggttagcaatatatagcaatctccaacgaatttgatgaccttttttgttttctctttccatatcaataggacctatcacatcaacgcctctattttctaaagtacttttaacctgatttatatcctttgttctaaaacaaatacctttaaccccttgtttaaaatgatcctgcactatttttgtagcaaatgatacacgaccttcttcagttttagctatattgctaagttttgactcattttcaacatctagcaattcgatataactatttttaatcggtgctatttgattaaaggtgcccaaatgatgatgtcttccaccattttgcaattctaatatttctccgggaaacttaaatgactctaattgatgtaaatagtgaatgatatggtctaattttaagttcaactttctccccctccacatgttattgctcattttaacaaaatctaactttaattactttaaatattaaaaaggaatctaagaccattgcaaaattcacattttagtcatataattgtctctgtcttttaaatagttagccaagctaactaatataacaatgaggtgttagatattttaaccaatgaatttttcaatagttttataggtatatatagaccctatattaaacttacacaacctatattagatcagcatcagattcatactggccaatggcttgtgctaagagatattgccaattatcaacctactacccttgtaaaaatttctcatcgtcgttcaatagaaaagcctacaacacgaaagttgattaaagtgttgttagacaatggttgggtcatgacaaaaacaggagttgataagagagagaaattattgagtttaactgacaaaggccaaagactttttgaaactattaataaaaagatcactgtcattcaacaagatattataaaaaaaactggattaactgatgagcaagtatttgatattacaaatgcgatgtctcaaattcatgaagcaatgataaaggaggaacagtaatgaatcagtctacaataattaaagaccccatctttacgaagagttttaatattaactttgctattaacttttttgtttatctatgtatgtatttattaattgtcgttatcgcgagctatagtaaatcagaataccatgcttctgattctgttgctggactcgtagtcggactttttatagtaggatcattaataggtcgatttgtaacaggtaaatacgtcaatcgatttggtccaaaaaaaattctcatttttggt

SEQ ID NO: 3643 - DNA, 3076 bp, Artificial Sequence
  Description of Artificial Sequence: synthetic nucleic acid sequence
gtggtcgtatcggtattcctaataaaggagaatggacaaataaaccactacgtttcactgttaaaggcaatccatatgtctctagaatgcgcaaatcagattttcaaaatcccgacgatacatggaaataaaaaaagggagcaggatattatcatgagtcctacttcctttctctaaatttattcaaattaaaatctgcaaaaaagtgcatattaaaatacaccattcattatttattgaaaatacttctttcctcaattttgagctaatgttagaaaaatacctttattttactttaatatctccattttcattgattaatttcactttattatttccattttcaactttactattatataacacacgatgatcgatgtctgtttccccttcttcattacgagtgatgatttgggtgtgatgaagttcttttttataattcaagtttatatccccttcttcatttttaatacgtaaaggaatatcagggtctaattgtttcatttgaatatccccatcctcattatgaagtgtcacctttttatatcgtcctttttgaactttaatgtctccagattcagcatcaaatcttcctgtgccactatttactccaacaatatttaaatccccggcattagttttaatatctatgtttttaatatatttaggtactgtaatcgtaatgtgattactaactttaccttgtattctaaaattaatatgtggacttgtttgacgctctgtaattacccaacgttgattgttcaccttgctagttacgtttaaatttttgtcattccctttggacttaaccgaaaaatgtttaccttttttcacagttatatcacttacttttccatcaatgtaaatacttttcacagtattatcatcatagtttttcattaaatttgttgtttgattattatattgattgtctttactcaattttttattttgtgcataaactcccacgctacaaataataattagtgacaagcctattaaaaatattatcgctgcaatttttttcatgattgtacacttcctttgacaatagagatattccattttagatatttcatagtcacatcaaatagccacttaatgagatagtaagtcaccactgcaagtacgagtccaacaccaaacattaaaccagtcataaatgcgtcatataagataatggaatgaaaaccatccataattcctttaatgagcaacatcaatggtgcagctagtgaagctagagtaaaaatgatgaaggttaatacgagcaaaatgcataaaaaagctggtattataacaataaaaaagttaagcaaacttagccccattactgctacaattgcggatgaaatattcattaacgacactttttgatgtgcattttctacactggaagtagctgtaagttccttacctattaattttggattacctaattctttacacacgtctgattcagactttccctcttgctgtccgctataaaaatgcgtatcgtattcattcaaaatatcttctttttcttctttattcatatgtttcaaatgctttttaagttcttttaaataatcatttttattcattcattctcactctcctcaatgaaatgttctacagcttccgtaaacaatttccaatcctcctctaattgattaactctcgcagccccctgttgagttaattgataatactttcgagacggaccttcagttgaaggttgataatacgtactcagttccccacttttaaccaaacgccttagcagaggataaactgtaccttcagctatggtcatatatctggagatattttgtacaagtgaataaccatactgatcttcttttttaataattagcagaacaattaattctaaagcacctttcttaaactgtacattcatatatctacctcctcagtcgtataaacagtattaaactatacacagtagtgattcaaattaactatagcatccactactatacattgcaaggtactgagtttaatttattaatacacacgtctttattcaaattacaccatcttttattgacaaattataaaaatcaatatttttaatatacttatatcattatttggtaaactggatttatttcatttgtgtatgtataatgtgtattatgggactttataaggtttacattgatttactttaatataactagttataaagggtttcatacaaagggggcttttaaatgatagaatttgatgcaattaccacattatgtttggcatgtgttttatatttaattggtcaaacaataatcaaccatgtttctattttaaggcgaatctgtattccagcacctgtcattggtggtcttttatttgcaatattagtggctatattagattcatttaatatcgttaaaataaaacttgattcggcgttcattcagaatttctttatgctcgctttctttactacaattggacttggcgcatcattaaaactattcaaaattggcggaaaagtcatgttgatagcgagaatgtctccatttttaggattttggacaaccattaacgcattgtccatatccttagcaccttgactacgtaatttagaaatttgtttttctaataaagattctacttttttctgtaaatcaatatctatagttaattgtaaatcatgacctcttgagccaggattaagtacttctgaacttattactcttccagatttatcagttgtatatttcatttgtttcttcgtgcctttaagaacatcttcgtattgatattcaagataagatttaccgacccgatcatttcgtgaataaccttttgataaatattgttcagttaattctttaggtataccttcagtcgaagtcgacacatctccaaatatgcctcttaaagtatcaccgtatgggtattttctatcccaatccattgtagtatttacaccaggtaatttagaaagctgttgtgatacggctgcatattctttctcgcttacgtcttcatttttaattgtttgaggatctagagttgacccagcgttcatttcccgataaattgctaaaacttgcaaatcttt

SEQ ID NO: 3644 - DNA, 3328 bp, Artificial Sequence
  Description of Artificial Sequence: synthetic nucleic acid sequence
ccaattatcagtcaaaattaattattgaattctaaaattaataattaaatgatttcattcagaaaggctttagataacactaagtatgttggtggttatataagtgtaaaatgagaaattcataataaattctcttgtactctttatataaaagaaatatctataatatctaaaaatgaaactttatgacgttctcttgaatgaggagcagtaccttcaatctcataatttattgaatcaatccgatgtacaatgagctctataaaattaatatatccttcttcgtaatatttgatattgactgggcgtgattgttgtagtgcttcatgtaaatgtatatttagttgcgaaagttggtcgtctgaaagcactggtctgctcactttattttgatctatcatatattgataaattgtttcaaactgttctggtaaagttgcgaatggttatatatatgttgaagaatatagactattttgtttaaaatgaatcatattttaagaaaaaatgaacaaagtaaaaatattaaatagtctttttttattacgtgtaataagtttaatatgtatgatgtaaaaagaatttgaatagtgtatacttatactattaaaattagaaatgagattattatgaaaatagtagaagtaaaatctaagaatggtaccaattttatgattttagatggtaataatgaacctatagtagatgcagtaagatatttgaagtatctggatagtgttaagaaaagtttaaataccaagaaaacctatgcctatgcactaaaaaatttttttgtttacttagaaagtaaaaagatatgctataaagaagttagttttgataactttgttgattttataagatggatgaaaacaccttttgaatatgagaatgtcctctcttatcaccgaaaagaaaaaagcattagtcctaagacaattaatctgactatgactgtagtatctaatttttatgattatctcctgtctttgataatctttcatcactgcaaacgcaatattcgacaaacctataattgatatgatatttactattgccataagacccataaataaatcggcagtactccaaactgtttctgttttagcaacagcacctacaaatactaaaagtactacaaaacatctaaaaataaataatatcatcttattgttagataaaaattcaatattggattgtccatagtaatagttacctacaacagatgaaaatgcaaataaggtaactgctacagttaagaaaatacctcctgctgaacctaaatgttcgttcaacgctgattgcgtaactgctacaccttgaggcgcgctatcaccaaattgcaaaccagaatataataaaatcataattgctgtagctgtacaaacaagcatagtgtcaaagaatacacctaatgattgaattaaaccttgtttaacgggatggggcacagcagatgtagcagcagcattaggtgcagatcccataccagcttcgtttgagaataaaccacgtttaataccttgaagaatagcagctcctacagcaccaccagtaacctgctgaactccgaatgcacttttaataatagtgccaatcataggtacaatttgatctatattgagtaataaaatgattaaaaccatacctatataaacaatagccataataggcacaataagtgaagatagtgtagctatgctacgaacaccaccaaagatgataatacctgtaataactgcaagtactattccagtaattaccgggctaatattgtattgtgtatttaatgattcagcaattgtattcgcttgaacagtattaaatacaaaagcaaatgtaactgtaattaaaacagcaaatacaattccaagccatttttggtttagcccttttgttatgtaataggctggtccgccacggaatccaccttctttgtcatgtaccttataaacttgagcaagcgttgcttccataaatgcactagctgcaccaataaaagcaataatccacatccagaagactgcaccggggccaccaagaacaatagcagttgcaacaccggcaatatttccagttcctactcttgacccagcactaatcgcaaaagcttgaaatggtgaaatacccttctcaccactacttaaagtttctggcttttcagttaatgctctaaacatctctggtaacattctgagttgaataaatttagaactaattgtaaagaaaaaacctgctgttaataataatccaataagatattgagaccaaattaagtcattcccgacttgaacaaatgttttaaaccagccaggaattaagttatcaaaatcttgcaaaacgaatccctctcatccacttaaatttatcgttttaaatacaccaagagatttatgctttaatttcattaacaaagattaaacattcatattaacaataaatgtatattatcactttgatagttcaaattagacataaatcccttgtgctcattttagttgctattattaatttttattttatcattttattttgtgattgcatatacttttactctagaatcatactttctacttctccaaaatcatcagtatcaataataaatgatccattagtatattgttcagataagtgtacatcatcgatattaccatattcttcatgatgttgagagaatacaatatatttcgtgtgattttctttaactactgcacctgccacaattcgatgcggttttttctttaattcttttagtaaagtaattccacgttgtgcgcgtttagcttcttgaagaacattaaaatcaatacgcttcatagcaccacgttgtgtaaccattattatggaatctgagtcgttcacatcttctgtcataacaacatagtcttcatctttaagattaattgatttaacaccagctgctcttaagcctgtatccgataattcattagttgaataagttaatgacatgcctttatgggttagaacagtaattaactgatcagactctaatcgaacgacattaataagttcatctttgtctttaaccttcatatttatgagtggtttattaaaccgagtagttttaaattgtgaagcactacttttcttaatcatgccgttttttgtagccataatataaaaggcttcatttttaaaatctttttcgttgtatacatttaccacttcttcatcttcatctattggcacaatttgtgatatgtgttgaccaagctctttccaacggatatcggctaatttatgaacaggtataaacaaatatctacctttatttgtaaatacaagaacagtatcttgagtattcacg

SEQ ID NO: 3645 - DNA, 3191 bp, Artificial Sequence
  Description of Artificial Sequence: synthetic nucleic acid sequence
acgtaaatctaaataatagctataactttcctcatccaattcgtgctcattaatgcgttgttctaataattctaaatcattaatacgttcggaaccaccaataatttcaccgtaaccttcaggcgcaattaaatcagcacataatactgtatcttcattgtctggatttggttgcatatagaatggtttaattttagttggataatttgtaatgaatactggtaaatcatagtgattagcgatggctgtttcatgaggtgcaccaaagtcttcaccccattcaatatcatcgaatccctcttttttcaagaattcgatagcatcatcataagaaattctagggaaaggtgtagcaactttttctagtttagttgtatctctatctaaagctttgagttctaattggcaatgatttaaaacagattgaacaatgtgagacacatactgttcttgtatttctaagctttctgcatgatttgtaaaggccatttctggttcaatcatccagaattcaattaaatgacggcgtgttttagatttttctgcacgaaaagttgggccaaatgaaaaaacacgtccgtgagccattgcggctgcttccatatacaactgcccactttgtgataagaatgcatcttcatcgaaatattttgtatggaataactcacttgttccctctggtgcacttgctgttaaaataggtggatcaattttagtgaagccattttcattgaaaaactcatatgttgcacggataatttcatttcttattttcatgacagcatgttgtttttttgaacgtaaccataagtgacgatgatccattaaaaattctgttccatgattctttggtgtaataggataatcgtgtgcttcatgtacaatttcgattgatttaacttgcatttcgtagcctaaatcagaacgattatcttctgtaatcgttcctgtgatgtataaagatgattcttgagttatatcttttgctagttgaaatgtttcttcatctacttcagattttactactactccttgcataaatcctgtaccatcgcgtaattgtaaaaacgctattttaccacttgaacgtttattagttaaccaagcaccaattgttacttcttggttaagatgttttttcgcttgtttaatcgtagttttcataaccaaactcctatatttttctttttaaatacttatttattttaacaaaatatgtctttaacttctacaagttgagtaactggaatcattcgatattatttattatatatttctaaaacgttagcttttactctcattatcgatagacctctgtatttgattcagtaatttattaaactgtttaatattaccttttcgttgtttaaaatgttctagtgattgagcaaaaaagcttttatatgtgctatttactagtcgatcatcaaatgacacaataagtcctttgtcgtcttcgtgtcgaataagacgtccaagaccttgtctaaaccttgttacagcatcaggtaatacataatctttaaaagttgatgtgaattcagaatccataagccagtatttaatattatgtttattcataaatggtaatttagctatcattacacatttaaggccattggcttgaaaatcaaaaccttcaaaaaatgttgatgttccaagaagtatagatttatcaaagttattaaattgttgaacaattttataattttggttttgttgttgggttaaaatgacataatcttctaactcaggtaattcatttaacaaatcttgaaccatatgcatcattttatagcttgtaaataagacaagacatttcgactgtgtcactgtgatgtattcaacaatatagtctacaattgaagctacataatcgtctaaatttttataattgtacgtttcaacatcattgggcacaaaaacatttgtatggttggatgatgttaaaggtgttgaaatttcaaatgtattaaagtctatatcttcattaaaccaattttgaaatgctttaaatgagtgattgaaagttaatgtgccagatataaatgtaagagacttaaatttttcgagtacttgtttcgtcaagatatctttaacatcataatccttgactaagagtcggattgttgatttttgtgctaaatttttaattgaaataaagcttgtatgatgatcttttatactttgttcgataagtttaaatttgtcatgtaagtataataattgtttccgtacagacttgattgttttgtgattcattccgttaaaaatttctatcgttttatttaatttatctatgattgcacgtaaatcttttaaaatctcacccgtttcaaagtcataaacgtaatgatacttatgaatgtcatcatcataaacgtctgatgtttgaataatattataaattgtagtgaatagttgctcatttaaatcatgtaactcattgatatttattttcagtccaaaaacgtctataggtgcaatatctagtttctctaaaatacgttgttgctcaagtttgtctactgctttaagtagtttttcattttcatttttgccaataagtcctaattgatatttaacatctgaataatttaaatcattagtaacttgatttagcgcatagtcaggcaatctatgtgcttcatcgatgatgcaatcatcaaatagttgatatatagtgttttcactgtctgaatgaattaagtgcgcatgattagtgataccaatttgtatgttttgagcatttctttttatataattataataatggatatcatgacgaactggaacgtatgtttcaattttttggtcaacatacattttttgtccacctttaagatttaattcctgtatgtccccagtatttgtttcagttatccaaataagtaactgcattttaagaatacttacttcataattatttgtatcgtctttaagaatttggctgataagaccaagagatatataatcatttttacttttgattaatgacgcgttaattttaaaatctaaaacatcattgagtaatggtatgtctttctctaatagctgactttgtaataattttgtatttgttgaaatcattacatgacgaccggtctcaatattatacattgttgctgcaagcaggtaagcaagagactttccactacccaaaggagcttcaatcattgccttatcactat

SEQ ID NO: 3646 - DNA, 4185 bp, Artificial Sequence
  Description of Artificial Sequence: synthetic nucleic acid sequence
agctacaaaagaaaataaaccaattaataatattacaaaaatgattgataaaattgcaattttcattttagaacgtttcttgtcgcttttttgataataacgtggttcagacgattgaaattcttgttgctttattgaatcgttaacaataggtatttgcatggttttattaaggtcattttgattttgttcatcatagattttatgattcaaatcatctttagtgagtggtaccgttttagttttatctagctcgtatttttcttcattcaaacgattctcatgtaaagcacttgttaaatcgtcacacatttcttgaacagtatgatagcgatgatatttatctttctcggtagcacgtaaaacgacattactcaatgattgaggtacatcatctcttttatccgttgttatatttgggatactatcttgaatatgctttatagcaatactcactgcagtctctccattgaatggtggctctccaactaacatctcatataatacaattccaattgaatatatgtcagtactttcatcagtagcttcgcctttagcctgttcaggcgataaatattgaacagttcctaaaacatgatttgtttgagtcagcgacgtttcactcaatgctttagcaataccaaaatcaaaaatttgtaattttttattcttatcaattaatatattctgtggtttaatatcgcgatgaacaattctcatatcatgcgcatgtttgattccactcaaaatttgttctgtaaactgaatagcagtttctacactaagtggaccatgactgtgtatatattccgctaaagtaggaccttctatgtattccataacaatataaaaacaatcatcttcctcatctacgtcaatcatactgactatattctcatgagaaagttgagaagaattatgtacttctctttcaaaacgtttaaatgtctcttctttttcacttggaggaatcgaaatcgctttaatagcaacttttctgttaagtattgaatctacagctaagtagacaatactcatcccaccaccaccgagtttatcggtaatagtatagcgttcatttatgactttacctatcatactttatcaccttctaactttaaaaggataaagctgacattatcttttgaatcatgggcaagcgctaagtccaataactcattaccatggacgtctaatgaattatttgaacttagtagttcttggatttcataatctctgacataatcagtaagtccgtcagagttcaaaagaagataatcataaaaatgagttctcttgataaataaatctggagaaacacgtttatctgttcccatgactttagtaataatattacgttgtggatgatgaaatgcttcatctttagtaatttgtccagtcattactaagtgattaacaaatgaatggtcgctcgtaatttgatccatctgtctctgattaattacataagcacgcgaatctcctacatttgctacaacaacttgtttgtcataaatgatggcacaaacgagcgttgtacccatacctctgtaatcttcattttcttgagcatagttgtacagctgaaaattgatttctttaatgttcgaacgcaaccacgattcagcacgatttatttcaattagattctcttcttcaaaacgcttttgaagttcataagtgacaaactgactagctatttctccagcttgatgtccacccatgccatcgcataatactagcatttgttgctgtgtttgattgtaaaatataccgccagcgtcctcgtttttctcacgatgttgcccagtatcagtgaaaaattgtgcgtttaacatatgtctttacctcgtttctacttgtcgttccttcgctcttaattgtccacacgcagcatcaatatctgacccttgctcacgtctaattgtagcattaattcctaatctctttaattccttctcgaatttaaaaatatcatcttttggtgtctttacataatttctttctgggacatggttaactggtattaaattaacgtggcaattgagattcttaattaaatgtgccaaatctctcgcatgttcaagttggtcattaacaccaccaaacaatccatattcaaaagtaacacggcgatttgtcttttcttgataataacgaatagcttccattaacttatcaacgttataagcacgattgataggcattaatcttgatcttatttcgtctttagcaccatgaagactcacagcaaaatttatttgtatatcttcttcggcaaaatcataaattcttggaataattcctgaagtagatacagtaatatgacgtgcaccaatatttaaactgttatcatcattaacaattcttaagaaatccatcatttcatcataattctcgaaaggttcacctatgcccataatgacaatttgtgatacacgttcattcgtttcgtctagtgccttttgtacagttaatacttgagagacaatctctccggcctctaaattacgctttaatccgcccaaagtggaagcacaaaacgtacaaccaattctacatcctacttgtgttgttacacagacagaatttccatattcatgtctcattaaaacagtttcaatagtataaccatcttgtaattcaaataagaacttaattgttccatctttactttcttgtttaacaacagtggtcaatgtcgtcattgcaaaatgatctttgagaatttgacgtaactctttagacaggttagtcatttcatcaatagtattcacacgcttttggtataaccattcaaaaatttgttttgctctgaatttttgttgtccgtgatcaataagccattgttgcatctcgtcatatcttaaggagtagatcgattgtttttcgaaattaggtaagaatttgtttttcttctttttttctgcagttatcatctctaactttcctttctttttatcttgctaataaagaatccatccgaattaaaatcttgtggaagtatctgtaacgttttaacctgttcaccagtcgctggattttggaatggttcaaactcaaaatctttatgtctctttaaaaaagtatagatgacattttcgttttccatttgttctattgtacatgttgaatacactattgtaccaccaggtttaatattatctttaacattttctaaaatttgtaattgtaattctactaaagacttaatgctattttgtgattgactatatttaatttcaggtttgtgtctaagaacacctaatccactacatggtgcatcaacaagaatcttatcatacattttatcgtatacttctgtagcatcatgttgaaaagccttgatattattcaatttcaattttttaatattttgctttataagatttattttatgttcatgaatatctgttgcatcgacgtgaccttctggtgaaagaatttctgccatatgacaagctttaccaccaggtgcgctgcacgcatctaaaactttgtcatctcgccctaggttcattacataagctaccatcattgaacttttatcttgaatagagatataaccttctttaaaagcgtttgaattaaccacaggcatacctgatatatgaagacaaaatggtaacatatcgtcttttttaacgtggtaaccttcctgttctaacttagagataattgaatcaatagaatcacgagatatattggcgcgcacggttgtggttacaggctctaaaaaagatcgtgcaatgttttcagttttttctactccaaaatgtgtaacccaatgatcaacaatccatttgggaagactatattgaattgcaattctttttttagtatcatctatatcttcaaagcttggcaattcagtgcgcattactgttcgtaatacaccattgactatattccctgtgtgatagccaccacgtttttttgctatatctaccgcttcatgaataatagcatggttaggtattttatctaaatataaatattgatataaactcatccacagtaattgtcgcacccatgatttgattttagttttgataaaaggctttagtagataatctaacgagtattttctttttattgttccatatactaattctgtgaataaatttttatctactgtattaatgttatttgtagatagaacttcattaattttcaaattactat

SEQ ID NO: 3647 - DNA, 3647 bp, Artificial Sequence
  Description of Artificial Sequence: synthetic nucleic acid sequence
tcttgagtgtcagttgtatctagagctattggcacaccattaatacccgcaaaacttttgaacagtgctgcctttccttccattactggaatacttgcttctgctccaatattccctaaaccgagaacagcagttccatctgttacaacagcaactgtatttcctttaatagtgtactcatatacttttcttgaatcttcatggatttctttacaaggttctgcaacgccaggtgagtatgctaggcttaattgttgcttatttgtcactttaacatttggtgtaatttctagtttaccttggttctctctatgcatttctaaagcgtcatctcttaaagacatttaatcaacccctattttattttgtgagaagtcattgaactatatatattcaatacataagtcaatccatgaaaagaaaactgaatcattttaaatatacacgatttactagtaaatatgtagaacaatagtacaatcattgaaagtaaattgatttttagatgttgcaattcaaattatttcttctgctgataaaacagatttagtgtgttaaatcagaacaaaaaataattataaaagaaaaactgatgattaagaaataatcatcagttaactatatcataatttaaaaatcgttaaaagttaaataaatctaatatcagctggcgaataagtttgtattaatagatcaaaattttgacgttgacgttcaatttgtcccaacattgtcatcttatttgcactttcgtcaaaaccataaatatttaatgcatgttgttcattagattctacttttgaatgttcaaattgtggttctagatgtgttacattacgtaaaataacttttttcgaattagacaattttgtttgctcatacgcttcaacttcaaaaagttgattgatgataagttgcatttgttggttacgcttttcaaatttacctaatacgatatacatctgttcctttgaaatagaagtttcgtattttttaaacttatctgggaaaatcactccatccatcatcgttcttccatcattcatcgttacaaatgccatattttgaccattcttcgttcttatttgtttgatatggtcaaattgaacaagtataggttggtagtgacttccattagacaattgaaatatgcctaaatattgtttcttttcaaatttcttttcaactggatgtttactaatatagaatcctaggtattctttttcataatcacttaataattgatcaggtagttcctctttttcttcatacgattgtttaggagttaaaagatcgaaaagcatttcatcttgctcaacatcagaattcaaatctaatacttgatcaattgcttgtaataatgtcgctctagttttgccaaaagtgtcgaatgcgcctactaagataagagactcaagtaattttctatttttcaccctttttggtatacgtcttgaaaaatcaaagaaatctctataaggtccattctgctgacgttcatcaataattaatttaacgctttgatatccaattcctttaattgtacctaaagacagatatattcctttattacttgccttataataccaatgactttgattaatattgggaggcaagatgctaattctttggtgcttagcttcgtcaatcatagctgcagtctttttttcacttcctattacattactcaagatatttgcataaaaataatgaggatagtgcacttttaaatagctcataatgtatgcaatttttgagtaactaacagcatgggcacgtgggaacccataatctgcaaacttaagtattaaatcaaaaatttgcttacttatctgttcatcgtaaccgttattttttgcaccatcaatgaaatgttgacgctcactttctaagattgcacgattctttttactcattgcccttcttaaaatatctgcttcaccataactaaaaccagcaacttgacttgctattagcattatttgttcttgataaatgataacaccatatgtgttttttaagattggttctaaatctggatgtaaataagcaaattggttaggattatgtctacgggttatataagttggtatttcttccattggtcctggtctatataatgatgtgacagctacgatatcttcaaaatgttcgggttgcaatctttttaatacgcttctaacaccgtctgattccaattgaaatatacctgtagtgtcaccgtttgataataaatcaaaaacttttttatcatcataaggtatagcttctatatcaatatttatatttaaatcctttttaacttgtaaaataatttgatgaataattgatagattgcgtaatcccaagaaatcaatttttaataatcctatacgttccgcttctgtcatagtccactgcgttaataatcctgtatcaccagttgttaatggggcaaatttgaataatggttgatcattgataatgatacctgcagcatgcgtagacgtatgtcttggtaatccctctaactttttactcacttcaaaccaacgttcatttctatgattacgatgaacaaatgctttaaactctggcttttggtatgcttcttcaagagttatacctaatttatgtggaataagttttgaaatctcatttaaactcgtttcatcaaatcccattattcttcctacatctctagcaacagcacgagctaacagatgcccaaatgtcacaatacctgatacatgatgttcaccatatttatcttgtacatacttaattactttttcacgtctcgtgtcttcaaaatcaatatcaatatctggcatagttacgcgttcaggattaagaaatctttcaaataaaagattatattttaacgggtctatagtagtaatacctaataaataacttactaatgaccctgctgatgaaccacgacctggcccaaccatcacttcatgtgttttagcaaaatgaatcaaatcacttacaataagaaaataatcctcgaaacccatatcagtaataattttatattcatgtttcaaccgattgaaataagttttatcattaagttcccattctcgtaacctatgtataagtatcgtccaaagataatctttcgaagtttcaccattaggtgtcacaaattgtggcaacagggattgatggtatgcaatttctgcttggcataattcttcaatttcattcgcgttagtaatcatatcttcactaagatttagtgtttgaagttcttctatactaggaaaatgttcatcaagtgtttctttctcatgtattaaatctaacttagtattatctcttatggcatgtaacgctggaatggtttcagcatcatcttcatttaagtatcttgcagattgcatccatacacgtttgccagtcaatgtattattactattgtgatttaaatataattctttcttaccttcaaaagcatcaataacttgcttatgagacaactcagcctctttaaatatgataattaaatgttcgtcgtatctttttagccattcaattggcacttcttctttatttctcatcattatagcagaagaaagttgatataatgacttgagtccttgattattttttgctaaaacaaccgtttcaatagtatagagaccatccgttaaata

SEQ ID NO: 3648 - DNA, 3435 bp, Artificial Sequence
  Description of Artificial Sequence: synthetic nucleic acid sequence
aaaaagtgaaaaaacgattaaaacaaccaaagcaattaataactggccaatcatttttttattaaaattcttgcttaaatacataatcacaaaaatagaaccaattagaccaaatattgctccactagcaccgactgaaattgtagtcgtattaaatgatagagaaacaaaatttccatataatccggatattatataaattattagcattcgccatgatccaatgattgattcgacaattttaccaaaaataaatagagagagcatattcattaaaatgtgttcgaaattaaaatgtaaaaacattgacgaaataagtctataccattctccgtgaacaacattaaaatgaacaagtccacctacttctaatagtttaacatcagaaaatcgatttaagtataaaatcatacataaccatatcacaatattaattaagataagtgtatatgtaataggggtaaaacgttgcatatgtttatcaacaagattttgtgttaaaacttttcttttgtaatgaaggtaagtccttttatcttcattattaattagcatttttaaaagtaaaaagtttatagggagtgaatttaagctttgctcattgcttataattttaaatttcagtttaattggtttttcttcatttaaattttcttttgaaagctctttatccgtaaaataataaaattcataagattcaggtatataaccgatgaattgttgtatttcttcaggtcgttccataatttttgatttatcaaacctaatctcttgggtagatgtgacatcttttctaaatacaacaattgaatgttttctcttatgagacaaccatatttcatcgtcctctttatcacgataaattacattataattaagatacctaatccagtagtataaagccttccaataaagtttattaatattcatttattcctccaccactttattgtgataaataattaattgctctacaggttgatcgtgtggttctatattgaattgggctaactgaaaatcgtatagtaaactaactgtattacatttatgttggctcaggaatcggtcataataaccaccaccatatcctattcgatagcccaatttgtcaaatgcaacccccggtactacaactaagtccattttattcgttgtaccgactggggaaatagaatgataaatacctttgctatctttctcgatatcctcaattgataatagttgcttaaaagtcatgtcttgctgttgataatttgtttcaggaacaaaaattttcttattattgtttagcgaatgagtaataattggatatgtattaacttcatgaggcatcgataaaacaaaaccaattgtgttagctttgcgataagcttcactttgatataatttcttagccaaccattcatcagccaaatatttttgttctttgtcgtaagatttcatctttttaattatatttctacgtagtccttttttatccattttattcacccatttcgttcacttaacattataacgtttatagttactaatgtcattaagttggtatttaatgataaaaaaagtaaatgaaaaatcccttcaaagttttcacttttataagtggttactttaaagggattaaatcgattttatattgtcatgtacaaattttaaaaaatttattatttagtttcacgatgtaaagtatgtttgttatcacgtgaacaatattttttcatttctacacgttcaggattatttcttttgttttttgttgagatatagtttctatctccacattctgtacaagctaatgtaacgtttacgcgcatgagtttctcctccttaccttttcaaaatacgacttttttattataccaattacttaactaattgcaaagtataatttcgtgattagttgagttgacaatttaaattaatcttctttctcttcgttattagattgagagtcatcttttttattatccttatctttaaaatagtagttgattacgtctctacctaaatctccaccatttaaccaaggtggtggaacaggttgatttgtatagacaattgaaaaagataatttaggatcatcgacgggtgcataaccgatatatgttgagttaactctaggttctccgtcttgaaaaacttcagcagttcctgttttaccagctgaaggtactacagtatttctaaaactagcataacctgtaccttgcttttcattgaaagccattttgaagccttcttgaacttctttaatttcgtcatttgagttatttaccttatttaaaacattacccttaattttacgttttaatggaccagtttcatctttattagtagattcataaatagacaatccaatatgtggttgaattctatagccatcattagcaatagttgatacgtattgggacaactgaagtggtgtatatgtgtcgtattgtccaatagctaagtctaaatagttaccaggattattagttaagggttctatttggcctggcgtttcgttcggtaagtcaatacctgtttttaagccaagacctacttgatttaaccctttacgcaatttacgaccagcatctgctatattattaggtaatgacatacctgaagtataggggtcacctgctaatttaagtgcggttttaaacatgtatacgtttgatgaatgcataagtgcttgtttatcatcgatagatacatgaccatttttattaaaataagaacgcttagttaaaccaccttggaattttaatggctcatctaccatagtttctccaacattaatagctttattttggtatccagctaataatgttcctccttttactgaagaacctactgtgtattgagctgtaaagttgccgatatcataatctttgagtttaccttgcttatcaatttgctttcctgcaatagcgagaatgtctccatttttaggattttggacaaccattaacgcattgtccatatccttagcaccttgactacgtaatttagaaatttgtttttctaataaagattctacttttttctgtaaatcaatatctatagttaattgtaaatcatgacctcttgagccaggattaagtacttctgaacttattactcttccagatttatcagttgtatatttcatttgtttcttcgtgcctttaagaacatcttcgtattgatattcaagataagatttaccgacccgatcatttcgtgaataaccttttgataaatattgttcagttaattctttaggtataccttcagtcgaagtcgacacatctccaaatatgcctcttaaagtatcaccgtatgggtattttctatcccaatccattgtagtatttacaccaggtaatttagaaagctgttgtgatacggctgcatattctttctcgcttacgtcttcatttttaattgtttgaggatctagagttg

SEQ ID NO: 3649 - DNA, 3320 bp, Artificial Sequence
  Description of Artificial Sequence: synthetic nucleic acid sequence
aattaagtgagctaggtacagaattcgttatttcatcccgtgtaacgagatttataaaggaaatacctcgacgtaatgtatttttcgtttacttctttgatagccagtatataaaatgcttaggaacaatgttttgtatcctaagcattttattgttttatttagcatcatagagttaatattagtgcgctatgacttcatttattaatttctatcaaattaaaaaacctaggacgtcactatctatcctaggttaataaataattatatagggatgtattagaatacttgttctacttctattacacctggaacttcttcatgaagtgcacgctcgatgccagcttttaaggtaattgtagaactaggacatgttccgcaagcgccatgtaattgtagcttaacaataccatcttcaacatctacaagcgtacaatcgccaccatctcgtaataagaatggacgcaaacgttctataacttctgctacttgatcaaacattgttggattctcagtaggcatgtgacatgtctcctttcagagcaattatttcataatcattattattacattataatagataaagtagtaaaaatctataaaacaagataggggattttaatgactaaaattagtgttgtcgtatatggagcagaagtcgtttgtgcgagttgtgtaaatgcacctacatctatagatacttatcaatggcttcaagcattacttttaagaaagtttcctcaacatcattttgaatttacatatattgacatacgaaatgatactgaaaatttaactgatcatgatatgcaatttatagaaagaattaatgaagatgaattgttttacccattagttacgatgaatgatgaatatgtagcagatggttacatacaatataaacaaataacccgttttattaaatcatattttactatgtaagattaaaagagggggcaatattcatactaacgatgtgcctcaattgacagtgtctgtgttattttttagtgaaaatcttcatttttaggctatatcttttattgagaagaaggacatttcaatgctgtcatagtttgtgattattaattaagcacctagggaaatgtaaatgccctaggtgctttatttattaaccattatgatatttatagcgccacagaacacctgattttagaatagaggctaatcgtccggtaactgttcgatccatgatataagcaaaaccttgtttgtcacctaaagagcctaaaaagccttgtactttaatttcaggcattttatctggaagtggttcgttattccattgcttcttcaacacctcagcaatctgttcaccttgtagttctgctagttgagcactgggtgcatgtggtaaattagcacagtcacctacgacataaacatttctataggttgggacttgatggtactgattaataattacgcgtccagtggtactcatatcaataggaagattacgcacaatttcaacaggttgtatgcctgctgtccaaacgactaaatcaatattttctggtttaccattattataaatttttccgggttctactctgtcgatgactgaattaggtactacagtaacattgtgtttagaaaaccaattagatatgtatttactcagtttctctggaaaattccttaaaattcgaggccctctatcatataacaaaatttccaagtctgatcgactttcacgtagctcgctcgctaattcaatgccacttaaacctgccccaacgatacctacacgtgcccctttaggtaactcgctaattctatggtatgtttcacgcgatttagataatgtttgaatgctatgtgtatatgcttcagcaccagggacattatgatatttatcctcacaccctagaccaatgataagttcgtcataatctatttttgaatttccaactgttatcatttgttcgtccaaatctatatcactgatttccccataaaccgtattaatttgactgctatctggaaattggattcgcacctctttgtcagatttagttcctgctgcaagtgcataaaattcaggttttaaaccgtggaatggcatgcggtcgattaaagttaagtgatatccctcaggaattgaatgaggtaaaatgcgcgacataattcgcatattaccatagcccccgcctagtaatactaagtttttcattgattaatacccctttgttataattgttttattgaaacccttttcaaaaatcactagaatactctaaatgaagatgattcctagtccctgatagttataataattgtatgcatgactattatatctatttttcaaaatgactacaaacaaatgtagaatgcaatttaattattatgaaatttaaaaagataaacaaaattaaaatcgtcataccgactgatagtcaggacattgaatactttgttataatgtttaaactaataaagataagaaggtgacttatgtttccgttagtggagttctgtatttcaaatatggccaaaggtagtgatgttgtatttgaaaaattagaaaatgatcctaacatagatgtccttgaatacggttgtctacaaaattgtggtctatgcgcaagtagcttgtatgcccttgtagatggtgatattgttgaaggtaacacaccagacgatttattaaaaaacatatatcaacatatcgaagataatgatataacgaatttgttatagagattaaaaaattatgggaggttttttatatgccaacagtcattttaactgaagcggcagcatttgaagttagagacatgttaaaaaataacgacatgtctgatggttatttaaaaattaaagtaaatggtggaggatgcacaggattaacttatggtatgtcagccgaagcagaacctggtgaaaatgatgaaattctcgaatactatggtttgaaagttctagtagaccgaaatgatgctcctgtattaaatggaacaacaattgattttaaacagtcacttatgggtggaggatttcaaataaacaatcctaatgctattgcctcatgtggttgtggaagttcatttaaaacagctaaagtcgctggaaatccagagcaatgttaatttcatattgccatccgaaattaaattaaacttttcacaaactatccctattgtagcttgaaaatatagggtaaaagctatagaattaaaattagattaaaagtgtcttttatgtgaacaactgaagagcaaaacccaaaaaagacttgaaaattttaaatgttgactaagactataaagaaagagacaatttggcttgtcatatgt

SEQ ID NO: 3650 - DNA, 3494 bp, Artificial Sequence
  Description of Artificial Sequence: synthetic nucleic acid sequence
tctattttccatctccaaacgactatcaacaagttggtcaaagttcaagaataattcggaagtttcatttacactctctaacgtaatattttctacgatatcaagcatatcaaatacactcactccctcgaaatagagttttgcatattgattagcaatatattctggagaatttaaacttgatatgaattctccaataaattgctttttcaacaaatcaaatgcttcttgatctttaaggtttcctttatattttcttaattcatccattattaattgtttaaatagatcaggctgttgtgttgcactagtaataattgaaaaactgtagctcggttccaatacaaattgataaccgaatgtttcatctattaaatctttatttaaaagttgttgataaaactccgtttcctctccaaaaaccaattcgtagaaaaatgtcatttccaaatctctttgaacaaatttagttgcactttcatctaatggttcatttttaaaacctagcatcaatcgtggtgactgtaacttcattttctcagaaacaaaccgtgatttatctctctaggctcatcaatttgcgcacgttcaatacgtggttgataagttttatttctttgattttcatgcttttctacaagtttaattatcgattgaggactaacatcgcctaccacaaacaacaccatattagagggatgataaaatgtctcatagcatagatataaatcatcttttgttatttcataaatgctttcaacactaccagcgatatccacccgtatcgggtgcttggaatacatagcccttaaagtattaaacattaatttatatcctggttgttcctggtacattttaatttcctcagctataatccctttttctttattaactgtttcttcagtaaaataaggtgtttctaccatattgaggagacgtttaatgttactttcaatattacttgttgcgctaaataaataactcgtacgatcaaagcttgtaaaagcattagcttgcgcattctcttcggcaaatgcagtaaataaatcttcatcttctttttcaaacaatttatgttctaaaaaatgtgccacaccgtcaggaacttttacaaattgctgactacctatgggcttaaaatgattgtccaatgaaccaaactgtgttgtgtaggtcacatacgttttttgaaaaccaggcttaggaatgataaataatttcaatccattatcaaactcatgttcgaaaactttctcatctataagttcatattgatgtgttttcatcagtgttggtctcctttcgttagtacataaattgtatctagaacagcttcatttgccaatttaataacatcttttttcgtcacttgattaactgcatttataaaatcttgatcagtttgctgtcggtttaataataattgattatgtagtatttcaattatacttttaggtctatctgatgcttcgtgtctatgggaaataatgatttttttagctaattcaattttattagaatcaaaatctccattttttatcttatcaaactctttgatgacagtatcttttgcttgctcatatttctcagcagaaacaccacttaaaacaaataaaaatccgtttttaccatcaatttgtgaatgtatagagtatgccaaactttgcttttctctgacttcattaaatagtactgaggaaggatctcctccaaacatcatatttaatactataaatgcatagtaattacttttcccataataagatggaaagcgatatcccaaattcaatttagcttggtcaacatcgtctttttcaattatatattgcggttgatcaaaagaaggtgtgatttcagtactttctttattttctaaatagaaaggcttaattgcaaacttatctagaattagttgcgttacttcctctttgttaatatttcctacaacatatatggcacaatcatcattttgtaccatggatagatatgtatcgtatagactttcagaagtcacttgtggaatttgttctaattgacctgtcgctatatatcgatagggttcttgtttaaacatataattcattaactgaagaaatgaatactgtgctttattatcttccattgcttcaagttttttgctaagtaaagacttttcttgagctacatatgtatgatcaaagcatctatctttgattaatggattccaaattatttcttttaacgtatctaatcccttttcaaataaaggggttttatcttttaagaatttttcattaactacttctaatgagattgtaataacatgcttatctttaaacttagaaacaaaactattaacataggcgccatacaattctgataactgtttatttaaagttttatcggtgggccattgttgtgttgcacgaactaatactttacttaaaattgaacgtgaagtaattgttttatagtttaatggtgccataaatttaaatgtaattgtcgttgttttaaatttatcggtaggcaaaacattgactcgaacttttgtgttatcttgattgaatctcttcaaaatctaacctcctggttttaatatgacaatttattcacttttagtaatagtgaatttaactaaactactcttaatataatttaaagaatacaaaattggttgatgcttttcgtcataatgtactactttaagtaacataagcccttcgtgaggtgaagcattaagcacttcagagatatggggttcgtaactaattgcttctaaatccatttctgcatgcatgatttgatgatttgtagatgctttaatagcttctaacattgaaccactactctgttgataatctgtacaagttagataagtttttgctattttgtctaaacaatatacgacaggcttatgattagcagtccttagtctctcaataattgttataggttcttttgtttctatacctaaatgttcagcatctaaaatagttgcaggttgctcgtcaagattcagatattctgttcctgcttcataacccgcttctttaatcatagtccctatactaataattttatttaacgggtaatagaaagggggctttacttttacgctagtcccctcttcaaaattatccgttactacttgttcagtaatcaactcatctataccatcataaacatcatctgttttaacatttaatgctctcgcaattgacaaattactaggtaatttacttccattggttagttcaccatctttgattaaatttaaaatgtattgttttactctatagattgcactcatttccgacatttttacacctcgtcattttctaaatcaactaatatttgtctaggtttacttcctttttgtggaccaataacttggttacgttccaaatcatccatgagccttgaagctcgattataaccgattctaaattgtcgttgtaataaagaagtactagctttttgcttttctattacaaataaataagcttcatcat

SEQ ID NO: 3651 - DNA, 3059 bp, Artificial Sequence
  Description of Artificial Sequence: synthetic nucleic acid sequence
taagctactggtccatcggttcatggggaggtagtggtgtttgtactttgtttggtggtttaatggcaactaaccttggatggcgctcaatctttattgtttcaattattctgacaatattatccatgtttctcattaaacatacacccgaaacaaaagcagagcctataggagatcaaccgacagagacaaagaaatttgatgttgttggtttaatcatcttagtggttagtatgttaagtattaatgtgataataactcaaacctctcaatttggtttgttctcaccatttattttgggacttattgcaatttttgttatatcgttaattatattcgtgatttacgaaaataaaatcaaacaaccacttgtcgattttgatatctttaaaaacaaaggttatacaggtgcaacgatttcaaactttatgttgaatggtgtagctggtggtacattgattgtagtaaatactttttatcagcaaaaattagattttaactctcaggaaacaggatatatttcacttacatacctaattgcagtattaattatgatacgtgtgggtgaaatgatattacaatcgttaggacctaaaagacctttgttactcggaagtgccttgaccgtcataggattaatattattatctttgacgtttttacctaatgcttggtatatagcgtcaagtgtcattggttatttattatttggtaccggtttaggtgtttatgcaacaccatccacggatacagctgttgcacaagcaccagatgataaagtaggcgtcgcatccggtgtatataagatggcatcatccttaggaaatgcatttggtgtggccatctcaagtacagtttacagcgtacttgcagcccaacttaatctgactttaggtggttttactggagtaatgtttaatgcgcttatagcattattagcattcctttctattttgttcttaataccgaaaaaacagtctaatgtataagagtatagtcaacaacttttaatttcatctttaatgttgaaatggaaaatatgaatttatgtctgggacatcatcggtgtctcagacattttgatatattgatatagagaactaagcaaaaatgtaagtatgaagaagtctataaattttaattcttgttaaagagaaaagagataatcaagtcaatatgaagttagttctactcatattttaaaaacgcaactgaaatagaataataaattaacaaagaaacgattcactgtgcaaattggtaataaaatgtcgaatgagcaatgtacgtttgagagataatacttattcttaattaacagaaaattcttacaaattaaccgtattatattgactggtatgtagtaaagtagtattttaaaaacaatatagaattgtaaggagatggaatatatgaaaatagcaattgcaggttctggcgcattaggtagtggatttggtgctaagttgtttcaacatggttatgacgtcactttaattgataattgggaacctcaagttactacaatacaacaggacggtctacatatcgatattaatggtgaagcgcatcatttcaggctacctatgtatagactaacggaaattcctaaagcaacgtcctatgatattgtttttctatttcctaaatctatgcaattagaagaggtgcttagtcatattcaaccccatcttcatgataatacaattgttgtgtgcactatgaatggtttgaaacatgaacgtcttatacaacaatatgtttctatagatagaattgtacgtggagtaacaacgtggactgccggtattgatcaacctggtcacacgcacttaatggggcaaggtcctgttgaaattgggtgtctcgtgcccgagggaaaagaaagcgtagatatcattgttaatctgctacaaaatgcagaattaaaaggtgtaaaaagtgaacatttacatcaatcaatttggaagaaaatatgtgttaatggaacagctaattcattatgtactatacttgaatgtaatttggcagcactgaataatagtgatgacgctaaaaatttgatatataaaattacacaagaaattgttcatgttgcaacagttgatgatgttcatcttaatgttgatgagatttttgattacttaattgctttaaatgataaagtaggcccacactatccttctatgtaccaagacttaattaaagataatcgaacaactgaaatagattatattaatggagcagttagtaaattagggaaagagaatcatattgctacacctgtaaatgattttgtaacaaatcttgtacatgctaaagaaaatcaacgtggtgcacaatgataaaataatatgaatcgtttgagttataagctctttttaaattattaacatggcatatttaatagtggagaacgaaaagcacgctataaacaattttgcaagattgtttatagcgtgcttttttatgactcttcggttaataactcactattgtctttattttgctctaatttttgtttgagttttttagcttcatgtagtgccactttcttataatgagagtgagcaaaatgcatttgcactattagaaaagcagcgcttatactccaatataagcccaaagctgcagcagaatgtagagacgcatatgttatgaatatcggtgaaaataccatcataaagtaatatgtttttctttgatcttttggataatggattgagtttacaagtggctgaacaaaatacatgattgctgcgattattgtcataatcaaatcaggttgcgttaaatcaaaccataagaaatgtgggtattcagtaattccgtgactcgaagggtacttcaaactcatataaagccccattaatataggcatttgtataagaacaggaagacaccctaacatattttttaatggattaattccatacgattgatactttttcataagcaattgattggctgcattacgttcttcttgtgatgttgcgtgtttcattttatctcttatagcatccaattctggttggacgacttttgttttttcgcgcatc

SEQ ID NO: 3652 - DNA, 3280 bp, Artificial Sequence
  Description of Artificial Sequence: synthetic nucleic acid sequence
tatactttcaagtgttttacatgtgtcataaagtgactcacccttttttacagatgatgtacttgtttcaaaattaataagttttaatcctaatttttgttctgccatctcaaagctacactttgttcgcgttgaattttcgaagaataagtttgatacgtattgaccgttaaattgaggtaatggtcgctcaccagatttgaattggcaagcgatagtaattaaatcataaatttctgaattagataaatgctccattgataataagtgttccataaagcgcctcctatagaaataaagcttaatttatttggtttttatcttttggcaaaattaaatttaatattattcctgaaagtgctgataatgccattccttcaatttgtaaattgatacctatgccttttaaattgataagaagattaccaattagcgatcgttcaagatcaagatagtcaagagctttcagaccaactcgtaaaaaacaatttcagagctacaaagttagcaactactggtggatttttaagagcaggcaatacaactttcttatgtggggttaaggatgaccgtgtcgacgaggttctatctgtcattgataatacttgtggtaatagagaccaacttgtttcaccaataacaccaatgggtggtagtgcagattcatatattccttatccagttgaagttgaagtaggtggcgcgacagtatttgtaatgccgattgaagcatttcatcaattctagttgtttataaaaaatctacttttcatttacatatttatgttaacgaaaagtgtttaaaatgtaattattatagatgtattttttatttggctacttgaaatgtagtttgagattgaaggcatattcattcaaaatttatacttcatcctttgagtttttagcgtgaaagttagtaattatatgcgtttaattcaaggaatgcagttgctaattcgaaattgtttgaagacgatgctcaacagtctagaactatcatttaagtagtctttttacataatgaatatcataaagggagtaagtcgcttatggatgaacaacaacagttagctaacgcatatcattctaacaaattgtcacatgcatatttgtttgagggtgatgatgcacaaacgatgaaacgtgtcgcaatccattttactaaattaattctttgtaataatagtaatcaatgcgaactgaaagttgatacttttaatcatcctgacttttcatatgtgtcttctgatgaaaatacaattaaaaaagaacaaattgaaaaacttgttcatcatatgaaccaactacctattgagggtcaatataaagtatatattattgaggattttgaaaaattaactgttcaaggggaaaatagtatactaaaatttttagaagagccccctgataatacaattgcgatacttttatcaacgaaaccggaacaaatattagacactatacattcaagatgtcagcatgtatattttaagcctattgataagcggcagtttatagagcgtttagtagagatgtcaatagcaagaccggtagcagaaatgctaagtacctatacaactcaaatagaagcagcatcgtcgttaaatgaggaatttgatttagttactttaagaaaatcaatcatcagatggtgtcaattaatattatctaataaagctatggctcttataggtgtcattgagttattaaaacaagctaagaatcgtaaattacaattacttactttatcagccgtcaatggctttttcgaagatataatgcatgcaaagatagaaatggataattattatacatttagtgatttaactgaagaaattgaaaattatgcaaatcaattaacttttaatcaattaatcctcatgtatgatcagattactgaagcgcataaaaagttaaatcaaaatgttaatccaacacttgtttttgaacaaatagtaataaaaggtgtgatttaaaatgcccaatgttgtaggtgttcagtttcaaaaagcagggaaattagaatactacgcgccgaatcaattagatgtagaggttggtgactgggttgttgtccaatctaaaagaggtatagaaattggccacgtaaagtttccattacgtgaagttgatgtagaagatgtcacattaccgctaaaaaatatcattcgtaaaatgaatgaagatgatcaagaaacatattatcgtaatgaacgcgatgccaatgatgcgttagaattatgtaaaaaagtagttaaagatcagcaattagatatgcgattagttaattgtgaatatacattagataaatctaaagtgatttttaattttaccgcagatgatcgcattgattttcgcaaacttgttaaagttttagctcaaaatctaaagactagaatagaattacgtcaaattggggtaagagatgaagcgaaattattgggtggtatcggtccttgtggacgttctttatgttgttctacatttttaggagatttcgaacctgtatccattaaaatggcgaaagatcagaacctatcattaaatccaactaagatttcaggagcttgtggtagattgatgtgttgtcttaaatatgaaaatgactactatgaagaggctcgaactcaattacctgatgttggagatatgattcaaacaccagatggtcacggaaaagtgataggattaaatattttagatatttctatgcaagttaaaatagagggtctagaacaacctttagaatataaaatggaagagatagaagtattgaattaaggaggttgaataacctttgaatcgaaacgaattattcgaaagacttatgaaattagaacatcacgttgaacaacttacaaccgacatgtcagaacttaaagatttaacagtcgaacttgttgaggagaatgttgctttgcaagttgaaaatgaaaatttaaaacgattgatgaacaaaactgaagaatcggttgaaactcacttagataaagataattataagcatgtaaaaacaccatctccaagtaaagataatttagcaatgttatatcgtgaaggttttcatatttgtaagggtgaattattcgggaaacatcgtcatggtgaagattgcttattatgccttaatgtgttgagtgattaattctttcgataaataaatgtttaaatataaggatgtattataagtgtgtagtttaagtcatactgtaataacatcctttttttaggagtaaagatatgttagaagataatgaacgcgttgaccatttaataa

SEQ ID NO: 3653 - DNA, 1244 bp, Artificial Sequence
  Description of Artificial Sequence: synthetic nucleic acid sequence
tctcaataatcaccttttatcgttaaaagtagcgcgaaaaagtgccttaaaaagatacgtttttactggtgacatagtattaaaaaataaaaaattgtctcaatcaattgaaagtttagaagaacttcttcaaatactaacggaaatatttcatatcaacatttcaaaacgattatacgatgaattaatacatagtagggatagtttgtatgaaacgtacaaacatttttataatagacaaacactcattcatcagagtatgaaatttagtaaattacccgattctataaattttattgcttggctgcaacatttacaagatagtggtattacagatgatttaagttactcggaaagtcttgtgatagaagggcatccaacacatcctttaacaaaaactaaattgcctctcagtactaatgaattgaaactttatgcaccagaatttgaaaaagttattccattaaatattatgcttattgaaaaaaatcatgtagtaacaacagcaataaatgatgatcaaaattttattctaaatcaagttattcctgaatatcgagatcgtttaaaatgctacctcgagccacttcgattaaatcttaacgattacagagtgatgttgatacatccttggcagtatgatcatactatcggcgaacaatttgaagaatggatagccaagaaaatcttactacctacaccatttactgttgagtccaaagctactttatcatttagaacaatggatttaattcatacaccatatcatgtgaaattgccagtaaatgttcaagctacaagtgctgttagaacagtttcatcagttacgactgtagatggtcctaagttaagccatgcattacaaggattgcttcaggaatttccagaacttcaagtcgcgatggaaccttatggagcttatgctcacacggcatctgatttatcaaaacaattagcgcttatcatacgtcaaaaacctacgatatatgattatggttgtacagttgtaacagctagtttagttaatcctaatccaattgataatcaggcagttgtagatagttatttaaaatggatagaaaatgaaatcacacttgatcatattaagcattttatagcaatttatacacaaaccttagttacaccgcttattgcgtatattcaaaattatggcatagcacttgaagcacatatgcaaaatacgattgttaatcttggacctaattataaaatgaaattcattg

SEQ ID NO: 3654 - DNA, 3253 bp, Artificial Sequence
  Description of Artificial Sequence: synthetic nucleic acid sequence
agcgcaaccattgcccaaacttcaccaatttttgttacacctaacataatagatgtggtaatgaaactttcagatgaataaataaattcatatacttcgttatctatccattttccaagccttgattcatgaaaaaaagctattataccaaaaataagtgtaaaaacaataagcaatgaaatgcgtttccatcgattcattataggtgccccctacttgtttaatgcatcatgaataattttatcaaataaatcttctttcgtgtaactctcttgatatgtttccatttgtttaataatagattcacgatgtaattcaatatcatttaattcttgcaataagttaacttctgtaagttgatcttcaggaatatgacgaccataacccttagattcaaagtttttagcattatcaatttgatctcctcttgattgatcaagtcctaaggggatgagtaacatcggtatacgtagcgttaaaaattcataaattgcgttagaacctgcacgacttacaacagtatcagtgattgctaataaatcagttaagtcgtctttaacaaattcaaattgaacataaccttttttattgattgagtcatcaacaagtccttttccagttaagtgtataatttgataatcgtggagaagtgcctcaatattttgacgaatgatattattaagttttttactacctaaacttcctcccatgactaataacacttttttatttttatcaaaatcagtgagttgatatcctctttctttattcccttgttttaagtcctcacgtacagtagccccaacaaaatcagctttatcaacatataattgatagattgaaaggtgaatttaaaaatgtgggtacagtcgttcaagcttatctgtatgaagccgatgatataattgataaatatcctgaattacgtttgagacttgtgaaaggtgcttataaggaagatgcgtcaatcgcttttcaatcaaaagaagaaattgacgcaaattatattagaattattaaaaaacgactactaaattcaaagaactttacatcggtggctacacatgacaatgaaataatcaaccaagtcaaacaatttatgaaggaaaatcatgtcagcaaagataaaatggaatttcaaatgttgtacggtttccgcacggaattagcacaaaaaatagctaatgaaggttatttttttacagtttatgtaccatacggtaatgattggtttgcgtactttatgagaagactagcagaacggcctcaaaacttgtcattagctataaaagaatttactaaacccaaaatcttaaaaaaggtaaccttgggtataggtatatttgcaactttattgacgtctcttattcttggcattaaaagacataaaaaataaagaggctgggacataattccctagcataatagccagtaaatgagttttcacgacatgtaaatgatattgtagaaacaattcccgatactgaattcgatgaattcagacatcatcgtggcttaatataagaaaagtaacagctcaacgagctgaaaataatcaaaaaaattataaaaaagacaatttctatattatttcaatagaaattgtctttttttacttatcttgaacctttttgtcccagcttctttattttttaattgatttgcttaattagattagccagttatggcaatttgtatggcaattttttatttattggtaggtttagattttgatatatttgaatatcaattccaaagccgtttcaaaaaatttattcttatattattagtaggagcatcgataggaacgtccgtagttattttccaatctattactacaaatagattattaactccttctattatgggacttgattctgtgtatttatttgtcaaagtcttacctatttttattttaggtgaacaagcaactgttgttacaaatatctaccttaattttttaatcactttgatcgcaatggtgtttttttcattgctattatttcaagttatatttaaactaggtcacttttcagtctatttcatattactagttggtgtaatattaggaactttcttccgtagtattacaagttttctccaacttataatgaatcctgaatcttttttagcagttcaaaatgttatgtttgctagctttgaagcatcaaattctaaattagtaactgtttcaggcatattattagttatattaataattgttacaataatacttcgaccatatttagatgttcttttgttaggtagagcacaagcaattaatctaggtgtttcttatgagaatatgacgcgtatgtttcttattttggttgctttactcgtctctatatctactgcattaataggtcctgtaacatttcttggcttattaactgtcaacttagcacacgaatttatgaagacctatgaacacaaatttattttaccggcaacaatattattcagctggattagtttatttatagcgcaatgggtagttgaaaatctattcgaagcaacaactgaattcagtttgatagtagatttagttggtggaagttacttcatatatttgcttgtcaaaaggagaaatgcaaattgattcaaattcgaaatttagataaaacgatagacaataaacctattttaaaagatattagcgtagatattaaaaagggaaaattgacttcactcataggtcctaacggtgctggtaagagtacattattatctgctatcagtcgcttatttagttatgagaacggttcaattttgattgaagacaaagaaatttcagaatataaaactgacgatttagctaaaaaattaagtattttaaaacaatctaatcacactgatatgaacataactatcgagcaactagttaaatttggtcgttttccatattcaaaaggtcgaatgaagcaagaagactatgacaaagtggaatatgctcttgacttattacagcttaatgaaattaaacatcgtaatattaaaacactatctggaggtcagcgacaacgtgcatatattgctatgactatagcacaagatactgattatatattattagacgagcctttaaataatttagatatgaaacattcagtacagattatgcaaacgttacgagatttatgtcgtcagttaaataaaacaatcattatcgtattacatgatatcaactttgcttcttgttattcagacgacatcattgcgcttaaacaaggtgagctagttaaagctgatg

SEQ ID NO: 3655 - DNA, 3337 bp, Artificial Sequence
  Description of Artificial Sequence: synthetic nucleic acid sequence
tattgatgcctaaatttaaaatagaagctcctccaaatttaaaagatcgttttcaattatttttaaacaagcatgtactaagagttatttcggttacattatgcgctgccattgctagtttaggtttgtataaattattcttcagaagataataaggtaatagtaagagtatatagaaatgacaataaagtttatttagagattcaagattatggtattggtataagtgaaacagatcaaaagcgtatatttgaacgtttctatcgtgtagataaagcgagaagtagagattcaggtggtacaggacttggtctgtctataacaaaacatattgttgaagcacataatggtagaatagacgtgaaaagtgcacctggcaaaggttcgatattcaaagttctatttaatgataattaaatttgagggcactacattgtcggtacagacaatgtggtgtcctttgttgtagtgattatttagaaatataatgttaagacttatgctattaattaaaatcaaaatacatcttgtcattgacagacataagatgagtggaaattttttaagaaacatttaacttaatatttctttagcatttataagttaaatattagtaatagctaatgcgtagtgaatactaaactcgcttactcgttatgtatttgtatatatgctaaaatatatgtaaatctgttctggaggttacgtattttgaataaattagtattaatagatggtaatagtctaagctttagagcgttttatgctctccctttactttcaaaccatgcaggtattcatacaaatgcagtttacggctttgctatgctcttagaaaaaataattaaagaagaaaaaccgaatcattttttagttgcatttgatgcaggtaaaacgactttcagacattctaagtacagtgaatataaaggtggtcgtcaaaagactccacctgaattaagtgagcaatttccatatattcgtcaacttttagatgcgtatcatattaaaagatatgaacttgataattatgaagctgatgacattataggaacattaagtagacaagctgatgaagaagattttgaaaccattatcattacaggtgatagagacttaactcaattagccactgataatgttacaatatattatacaaaaaaaggtgttaccgacgttgatcattatacacctaaatttatagcagagaaatataatggtttagtgccgaaacaaattatcgatatgaaaggtctaatgggggatacctctgacaatattcctggcgttgctggtgtcggcgaaaagacggctattaaattacttaatcaatttgagtcagtagaaggggtctatgaacatattgaggaggtcactgcaaaaaaattaaaagaaaaactcatcaatagtaaagatgatgccttaatgagtaaagatttagcaacaatcaatgttcacagtccgattgaagtatcattagaagatacaaaattaactctacaagacgacactacagaaaaaattgaactatttaaaaagctagaatttaaacaactattagcagatatagacacatcctctacgaatgaagaagtcatagataaaacttttgaaattgagcaagactttcaaaatgtagatttgaatgatttaaacgaagcggtaatacattttgaactcgaaggcactaattatcttaaagacactattctcaagtttggtttttatacaaatcatcaacatgtagtgataaatgctgaggatgtaaaggattataaacatttagttcaatggcttgaagataaaaatacaactaaaattgtctatgatgcaaaaaaaacttatgtatctgctcatcgattagggattaatatagaaaatattgaatttgatgttatgttagcaagctatattattgacccatcacgttctattgatgacgttaaatctgtggtaagtttatatggacaaaattatgtaaaagataatattacaatatttgggaaaggtaagaaacatcatatacctgaagaaccaattctaaacgaacacattgcctctgtgacagaagctatagcagctgtaactccaaccatgaaatcacagttagaagattataatcaaattgaactgttgaaagatttagaattaccattagcaagaattttaagtgaaatggaagaaattggtatatataccgatatcaatgatttgaaagaaatggaattcgaaattcaaaaaaaattggatgtattaatatccaatattcatgagtcggctggtgaagcgtttaatatcaattctcctaagcaattaggtgttgttttatttgaaacattacaattgcctgtcattaagaagaccaaaacgggctattcaacagctgtagacgtattagaaaaactacaaggtgagcatcctattatagatgatattttagaatatagacaacttgctaagttgcaatctacgtatgtagagggattacaaaaagtaataagcaaagatcatagaattcacacacgttttaatcaaacgcttgctcaaactggtagattatcaagtatagatcctaatttacaaaatatacctatacgattagaagaaggaagaaagattagaaaggcctttaaaccaacttctaaagatagtgtgattttatctgctgattattcacaaattgagttacgtgtacttgctcatattacgcaagatgaaagtttaaaacatgcatttataaacggacatgatattcacactgcaacagcaatgaaagtatttaatgttgaatctgaccaggttgatagtttaatgagacgtcaagcaaaagctgttaactttggtattgtatatggtatcagcgattatggattgagtcagagcttgggtattactagaaaacaagcaaaagcatttattgatgattatttagctagttttccaggtgtaaaacaatatatgtcagacattgttaaagatgcaaaagcacaaggttatgtggaaacactacttcatcgtcgtcgatacattcctgatataacaagtagaaacgttaatttaagaagttttgcagaaagaacagcaatgaatacacccatacaaggtagtgcagctgacataataaaattagcaatggttaaattcagtgaaaagattaaagaaactaaatatcatgctaagttattattacaagttcatgatgaactcatatttgaaataccaaaatcagaagtagaagattttagtaaatttgtagaagaaattatggaacaagcattagtgctcgatgtacctttaaaagtagattcgaattatggtgcaacatggtacgatgcta

SEQ ID NO: 3656 - DNA, 3761 bp, Artificial Sequence
  Description of Artificial Sequence: synthetic nucleic acid sequence
caaagataaccatcatttcatcggtatgataaccagtccttactactaaatgacgtattaaacctgtttttgttttttcgttatatatagatatatttaattcattgagccagtacttcactcgattcattacttcttgatgttgtctatcttgtataagacaactatccatatctataatgtcatggctacgttgtctatagaatcccattataacttgattcgagttactttgacctacaggaatttgagatttattacggtatcgccagggattgaccatgccaatagtttcctttataaccgtattctcaaaagggccttttctatgaaaaagattaactacttgttctcttttcatatccaattgcgctctatatgtcatatgttgtaattgacaaccaccacactttgcataataaatacaaggtggtgtcactctatcatcactttcacttatgacctctatcaattttcctatagcaaaattctttttcactttaattaatttaaatttaatttcttcatcaattaaagcattaggaataaaaattggatatcgatcaactttaacaactccgtgtccctcatgagttaaatcaataacctttcccgttttaacttcgtttttcttaattgtttccaattttttccctcccacatacaaaaaggttaggaatataatgtgtggcattcctaaccttaaatttgatgtcgtaataattttattgcttatcaggcgtaatatcagttatcgtatcattttctaatagttcttcgttaaatacatctttaggtgtaaaaatttctatgtgctgttctaaattaaggaaatttgcaggtaatttcccaccgtattcaccatcaacattaagttgcatatcagtaaatgatgaaatattaatagacttcgctttagcataaatgactttaggatgttttgtatgctcacctcgagacgctagtgtcataatatgacccaattcagcaagatttgctttttctacaataattaacgtgaaataaccgtcgtcaagcttcgcatctggaactaatttttcaaagccagccattgaattcgttaaacctaaaaggaatagtaaagcttctccttggaagatgttatcatcatattcgatacgtacatctactgctttcatttgaggtaacatttcgaatcctttaatgtaatacgcgaacggtcctacaattgatttcaacttacttggtgtttcataagatacttgtgttagtttcccccctgcagctaggttaatgaaataacgattattcatctttccaatatctaccttggttgtgtgaccatcaatgattacatcaatcgcccccattatatcgcttggtaaatgaagtgctcttccaaagtcattaacggtgcccattggtattacacctaatttaggccgattgggttgttcggcgattccgttgaccacctcatttaacgtaccgtcacctccagctgcaatgagtaaatcatattcactttctagtgctctttcagcttcaaaagtagcatcaccaattttttcagttgcatatgcactcgtttcataacctgccttctcaagtttaatcagtgcatctggtaatacacgtttaaaaagttcttttcctgatgttggattatatataattcttgcacgttttctcatagttaatccctcaaattcatatactcattacttatattatatgatttatacatcagttaaaagtatttatttccgatttctctaaactaatcggtactacaaagataaaatatatgtaattttaaacattaagaaacttaatacttaaacttttcaaaagtaataaaagcttctaacaaagttcatatcctttgttagaagcttaaagtattataattttcgaattaacggttatctaattcttgttttaataggctattaactttttgtgggttagcttgacctttagaagctttcataatttggcccactaagaatcccatagctttacctttaccatttttataatcttctattgattgtggattattatctaatgcatctgttacaaatttaagtagtgttgcttcatcagaaatttgtactaaacctttatcttccataatttgtttagcatctccaccattttctgctagttctggaaaaacttttttagcgattttactactcattgttccgtcttctattaatttaatcataccagctaaattttcaggtgttagttgcgtatcttttaattcaacttgatttttattaagatactcgttaacacctcccattaaccagttggaagtaagtttaacatctgcaccatggtcaattgcgccttcaaagaaatcagacatttctttagttaatgttaatacatgcgcatcatattctggtagtccaagatcatttacgtatttagctttacgttcatctggcaattctggaattgtttctcttacacgtgctttccaatcttcatctacatataatggtacaatatctggttcagggaaatatctataatcatctgaaccttctttcacacgcattaaaattgttttaccagtagattcatcaaatcgacgtgtttcttgaccaatctctccaccatttaataattcttcttcttgacgtttctcttcatattctaaaccttttttaacgtagttaaatgagttaaggtttttcaattcagtttttgtaccaaattccttttgaccatatggacgaagtgaaatattagcatcacaacgtagggatccctcttccattttacaatcagatacacctgtatattgaatgattgaacgtagtttttctagataagcatatgcttctttaggtgaacgaatatcgggttcagatacaatttcaattaatggcgtaccttgacggtttaagtctactagagaataaccatctttatgtgttgatttacctgcatcttcttccatatgaagacgtgtaataccgatacgttttgtttctccatcaacttcaatatcaatatagccattttctccaataggttgatcaaactgagaaatttgatatgcttttggattatctggatagaaatagtttttacgatcaaattttgaatttgtagcaatatccatatttaatgccattgaagctctcattgcccaatctactgcacgtctattaactactggtaatacacctggataagctaagtcgataacatttgtatttgaatttggttcagctccaaaatgtgcgggtgatggagagaacatttttgagtccgtttttaactcaacatgaacttcaagtccgattactgtttcaaaatgcatgatttccactccttataaattttcgtatgcgtcatgtaagttgtattgtgtttcaaattgataagcgacacgatataacgttttttcgtcaaaaggtttaccaattaattgtaaaccaattgggcgtccgtttgattgtccacaaggaactgaaataccaggtaaaccggcaagattaactggtgtagttaataagtcattcgcatacattgttaaaggatcatcaatttcttcgccaatattaaatgctgttgtaggtgctgtcggtccaaccacaacatcataagattcaaatactttgtcaaaatcatttttaattaacgttctaactttttgagattttttatagtatgcatcgtaataacctgagcttaaagcaaaagtacctaagaagatacgtcttttgacttcttcaccaaagccttccgatcta

SEQ ID NO: 3657 - DNA, 3520 bp, Artificial Sequence
  Description of Artificial Sequence: synthetic nucleic acid sequence
ctaatgatgatcaattatcatctgaagaacagcagaaatacaatgaaaatactaacgaaaacaaacagaatagtcatgttgacttaaattcattacctgctacagattttcgaacagattggatgtctgaatctggtcaaaaacaagtgaatgatttagcaaaccaaaaagatagcggtcaaatttcacaatacgaatttaatgatcgcgtatctgatgtgatgaataatgaaatagataatcaacagccataattgaaatatagggtagcacgtctaccctttttatttagggagggtaaacacgtggcataagaaattcacctataaacatggtgaaactaaaaatcgctattatgagaagtacaaagaccctctcacaaacaaatgacgacgtgttagcgtggtacttaataaagaatggtaaacagtcacaaaaagaggctcagaagcgcttaaatgagcttatagaggcaaaattaaacgataagacacctactacacttaagtcactaacattccatgatcatttgatgagtggtttgaaagatacaaattaacttccggatttaaacaatctaccgttacaacgaaaagttataaaatagcgcacatcaaaagaaatattgataaaaatatactcgctcaaaatacgaatgctgatgttttacaagacttaattaattcttcattaacagagggattaagtcataaagtggttaaagatgatttgagtattataaaaaatatactacgctatactcaaaagaaatataacattactgataaatcttacatagatgatgtaatagtacctaaaaaagcgactacaatagaagaagttaaagcaaaacgtgagaactatttagaaatgaatgaagttcatcttatcgctgaagagttaaaacatatagcaaataataagcgtgctagttatatatttatttactgcttatatcattgaaattcaagcattaaatggtatgcgtataggagaacttttagcaatacaaccagaaaacattgatttcaaaaacaaaaaacttatcattgatggcactatacattggcgtaaagagggtaacaacctcggttttaaagatactacaaaaacagctttatcttatcgaactatctctctgactactcgaagttgtgatattttacgtaaagttatgttagagaataagaaagcatttcagtggaaaaatatgtatgtagatagagattttatatttactaatcataaaggaaaccctatatcacttacatcaatcaacagaaacatacaaattgctgcaaagaatgtaggtattaaaaagcatataaccagccatactatgcgtcatagtcacatatcattattatcgcaattaggtatatcactgcgtgcaattatggatcgtgtaggccatacagatcataagactaccctacagatatacagtcatgttactgaacaaatggataaagatatgatgagtaagttagagaaagtaggtattaattaaatatgagtagtactcgtaaaccaaaattagattatgaggaacaaattaaaaagttgaaatcattaggaattctattcaatgaaataacagaagaagaagctaaagaaatattaaaaaataacacttatttttttaaattgatatcttttcgtaaaaatataaaaaaggatagtagtggaaattataattttgagttttctgcactttctgattttgctactttagatatgcgattaagatatactttattacctatgtgtttggatatagaacattcactaaaaacagatattcttaaaaagattactgatgatgtaaacgaagacggatatacaattgttcaagattttataaacaatcataatggagatttagaaaaaatcttttctagcgtgattaaaagagatggtacagttataccgagttttcaaaaatattatgatgatcctccaatatgggtatgcttagaattaatgacttttggccaattttcagcatttgtagaattttattctgaaagaacaaatgactctgagttacgtaaggctggtaaatttattaaatttgctaaaaacattaggaataaatgtgctcatagccaaccaattttattaaatttaaatccacgcaaaaactttaccgttgaaagagaattaaaaaagataggtagaaaacaaagactgtctgataaaaaccttaaagtattagcaataattgatattcttgcattattagttttacattctaaatattgtagtaaaggtataaaagataatcgaaaaaatgatttattaacttttaaacaacgtaaaaatagatattttcatcattatcgaaatgttccttctctttcatttttctttctatcacttaacaaaatgattgactattatgttcaaaacaattaatataataaataaggaaagagggacatccctccaagagttatttctatactcttgttttttatgaaagaattttctattctttccgttttaagaggttgaccgagaggttgcctctttttttatgcctaaatctcttaagttttaacacgtcgccctttttttgccctttttccaacttataaaatacaaaaacaaccccctcaagcctatgcctaaggggtttcattattctatgctattttattcccactcaattgtacttggtggcttagaggtaatgtcatagacaacgcgattaacgtggtccacctcattgacaattcgacttgaaatcttttgtaagacttcccaatcaattctagcaaagtcactagtcatgccatcgatggatgttaccgcacgaatacctacagtatgatcatacgtacggtagtctcccatgacaccgaccgattgaatacctggaagtactgtaaagtattgccagatatctctttcaagaccttcctcacgaatcacttcacgtaaaatcgcatctgattcacgaacaatttcaagcttatcttcagtaatttctccaagtacacggatacctaatccaggtcctgggaacggctgtctccaaactaagtgttcaggtatacctaattctattcctaatgcgcgcacttcatctttgaataatgtattgattggttcaataagttcaaattccatgtcttcaggtaatccacctacattatggtgagatttaattgtttgagctgtcttagtacctgattcaatcacatccgtatataacgtaccttgagctaagaaatctacatctgttaatttcgcagcttcgtcatcaaagacatatacaaactcattaccaatgattttacgtttacgttctggatcagacacaccttttagtttactcatgaagcgttcttgagcattaacacgaataatattcatatcaaaaccttcaccgaattgctccatgaccatgtcaccttcacctttacgtaatagaccatggtccacaaaaatacatgttaattggtcgccgattgccttatgtaaaagtacagcaactacggatgaatctactcca

SEQ ID NO: 3658 - DNA, 3625 bp, Artificial Sequence
  Description of Artificial Sequence: synthetic nucleic acid sequence
agtcagaacatgggtgataaggtccgtgttcgaaagggaaacagcccagaccaccagctaaggtcccaaaatatatgttaagtggaaaaggatgtggcgttgcccagacaactaggatgttggcttagaagcagccatcatttaaagagtgcgtaatagctcactagtcgagtgacactgcgccgaaaatgtaccggggctaaacatattaccgaagctgtggattgtcctttggacaatggtaggagagcgttctaagggcgtcgaagcatgatcgcaaggacatgtggagcgcttagaagtgagaatgccggtgtgagtagcgaaagacgggtgagaatcccgtccaccgattgactaaggtttccagaggaaggctcgtccgctctgggttagtcgggtcctaagctgaggccgacaggcgtaggcgatggataacaggttgatattcctgtaccacctagtatcgttttaatcgatggggggacgcagtaggataggcgaagcgtgctgttggagtgcacgtccaagcagtaaggctgagtgttaggcaaatccggcactcataaggctgagctgtgatggggagaggaaattgtttcctcgagtcgttgatttcacactgccgagaaaagcctctagatagataacaggtgcccgtaccgcaaaccgacacaggtagtcaagatgagaattctaaggtgagcgagcgaactctcgttaaggaactcggcaaaatgaccccgtaacttcgggagaaggggtgctctttagggttcacgcccagaagagccgcagtgaataggcccaagcgactgtttatcaaaaacacaggtctctgctaaaccgtaaggtgatgtataggggctgacgcctgcccggtgctggaaggttaagaggagtggttagcttctgcgaagctacgaatcgaagccccagtaaacggcggccgtaactataacggtcctaaggtagcgaaattccttgtcgggtaagttccgacccgcacgaaaggcgtaacgatttgggcactgtctcaacgagagactcggtgaaatcatagtacctgtgaagatgcaggttacccgcgacaggacggaaagaccccgtggagctttactgtagcctgatattgaaattcggcacagcttgtacaggataggtaggagcctttgaaacgtgagcgctagcttacgtggaggcgttggtgggatactaccctagctgtgttggctttctaacccgcaccacttatcgtggtgggagacagtgtcaggcgggcagtttgactggggcggtcgcctcctaaaaggtaacggaggcgctcaaaggttccctcagaatggttggaaatcattcatagagtgtaaaggcataagggagcttgactgcgagacctacaagtcgagcagggtcgaaagacggacttagtgatccggtggttccgcatggaagggccatcgctcaacggataaaagctaccccggggataacaggcttatctcccccaagagttcacatcgacggggaggtttggcacctcgatgtcggctcatcgcatcctggggctgtagtcggtcccaagggttgggctgttcgcccattaaagcggtacgcgagctgggttcagaacgtcgtgagacagttcggtccctatccgtcgtgggcgtaggaaatttgagaggagctgtccttagtacgagaggaccgggatggacatacctctggtgtaccagttgtcgtgccaacggcatagctgggtagctatgtatggacgggataagtgctgaaagcatctaagcatgaagcccccctcaagatgagatttcccaacttcggttataagatccctcgaagatgacgaggttaataggttcgaggtggaagcgtggtgacacgtggagctgacgaatactaatcgatcgaagacttaatcaatttttaaaaaacgttttgcgacgcaaaatcttacttactatctagttttgaatgtataatcattcatttgtctggtgacaatggcaaggaggtcacacctgttcccatgccgaacacagaagttaagctccttagcgccgatggtagtcggactgacgttccgctagagtaggacgttgccaggcaaatatcgtataagatgcgatgagcctaatcgagaccgaaaggtctcttttttttatacaaaaatagttctaaaaaataggtttctcggcgaggagaaagtattaggaacttatgaataaatgagagagacaatgaatttagataatctaaacgagttaatgaacactatatataaagtgagagcctagcgcttgtcttgagtgaaggaaacttcttagcatccgatgatggtagttggactaacgtttcgatagaataagatgttaccagacaaagtacgagaccgaaaggtctcttttttatattaaataattacaataattaggtttgggaaaattttctttttaataaagcaattttaaatcgaacatctaagtaagttgaaatgacaatgattaagaagttagttaagtattagagaaaatttgtgttttctaatacactagtaataaataacaagaaattaagaaagagggatgactttgattattagggcattggagaagacagatttatcatttatacatcatttgaataatgagtattccattatgtcgtattggtttgaagagccttatcaatcattaagcgaattagaaaatttatatacaaagcatattttagatgaaacagagcgacgtttcattgttgaagagggatcaacatctgtaggcgtggtagagttattagaaattaactttatacatagaacttgtgaagtgttaattattatcgatccgcagtatgcaaataatgggtacgcgaaaaaagcctttaaaatggctattgactatgcttttttagtattaaatatgaataaggtatacttatatgtggatattaagaatgagaaagcagtacatatctatcaaagtaataatttcgaaatagaaggaacgttaaaggaacacttctatacaaggggagaatatagagattgctatgtaatgggcttgttaaaaaggaattgggttaataagaatgatgatgatttgtctcatataagatgaaaaattaaatttagagagagttattaatatgaaaagaccaataattcaaaaattaaatcacttgatagagaaaaaagctatctctatgcatgttcctggacataaaaacatgacaatcggctacttaaataggcttgatttagcaatggatatgacagaaattactggattagatgatatgcattatcctgaaggaattattttagaaagcatggagaattttaggaaacataaaaactatgatgctttcttattagttaacggaacgacttcaggtatattatcggttatccaagcgttttcgacaagaaaaggtaaatatttaattagtagaaatgttcataaatcagtatttcacggtttagacataacacaacaacaagcgacaataactaagacagatgtcagtaagaaaacgaatcaatatgtaaatccaaagataaatcaagataaaaatcaatattataaacttgccatctgtacatacccta

SEQ ID NO: 3659 - DNA, 3350 bp, Artificial Sequence
  Description of Artificial Sequence: synthetic nucleic acid sequence
atcatttcgttatacacgttttgttgagaaatgtggtagctatggtcaaaatcaatcagacattggattccttcatcatataaagtttcagcctttgcaattgcacgttctttatctcccttgattaaatatagatttcccttgtcattcttattattattcaataacgtacgattaatgtcatcaagtatattacctaaaatgcatatgcctggatgaccttctagttgttgagaaaccaattgttcttcaatcgtacttaaatgacctataacaatcttttcattgtagcaggaagcattaaacactattgcaatggggtagtcttcattcgtatatgattcaatttgtttaataatttgacctaatcttttcacacccatataaatagctaaagtgcctccattaatcaagttcctaatatccgtatcgtgattaaccgaatctttaaaatgaccagttgagaaagtcacactcggtgcgatagaacgcatcgttaatcccatattcatagttgctacggcagcacttgctgatgtcacaccagggacaatctcgtaatgaatatgatgattttctaatgtttgtacttcttctgtaattctaccaaaaatcgcaggatctcctccctttagtctcaccacacattgatattgattagctgcttcaacaattttttgattaatctcctcttgttgaatgtgtttacaataaggtttctttcccacattgatcacttttgtttgagaagaagcatactgtaagatgaaaggatttacgagacgatcaaataaaatcacgtcagctgatctaattaaccgttcagcttttttagttaataagtttggattgcctggtcctgcaccgattagatatactgtgccaggataagttatagacataagtaaatatctccatcaataacttctacttcgtatgtctctacacatcctgtatcaggttgttgtacttctccagtttttaaagctattttttgatcgtgtaacggacagtaaacataatcaccacttacagtcccttcagacaacggtccttctttatgtggacatatatttccaatggcatataaatcaccattatctgtgagaaaaatacctatttctttttcgtttacaactacttttttgcctatttgaggaatcatttcattcattgttgtaactttaatcttttctttagctttcattcttacaccttctcaacttcaaagattttttgtgcttctttattttcaacaatagtttcccatggttcattctcaacagcttttttggcttccataattcttaaatacagttctttttgcttttcttgatttaataagacattcttgacattttcaaagcccatacgttctaaccatggtgctgttctttcagcgtaaacacctgtttctctgtaatactgcatgagggcaccacataattgaatcacttcatcttcggtttcaactgtcgttaacaatttacctacagtaacatcagtaccaccattacctccgataaatatttggtagccattttcaacagatatgacgccaaaatctttaacaccagactctacacaacttctcggacaacctgatactcccattttaaatttatgaggtgtatcaatatattcaaatgttttttcaagtcttattcctagtcgagttgtgtattgtgtaccaaaacgacaaaactctttaccaacgcaacttttaacagaacgcgtctttttaccataagcagaagcagaacgcattcctaaatctttccaaacttgtggtaattcttctttcttcaatccatataaacctacacgttgcgaacctgttactttaacaagtggtacgttatactttttagcaacttctcctaatcgaatgagttggtcagcatctgtaacaccaccgcgcatttgaggaatcactgagaaagtaccatcattttgtatatttgcatgatatctttcattagcgaagcgagaatctttttcgtctcgatgttcaaaaggataaaccatatttaaataataattaattgcaggtcgacatttaggacaaccatctttatctttgaaatcaagaacgtgtcgtacttcttttgatgatttgagatttttagccctgatttgagttacaatttggtctcttgttaaatcagtacatggacaaatacctgttggttttgcagcaataaagtcgtcacctaatgtatattgtaataactcaccgatttgacctttacacttaccacatgaattacctgcttttgttgctttagtcacttcatctacagacgttaaacctttacttgtaatagcattgacgattgttcctttatcaacaccattacatccacaaatcgtttcatcatcagacatatcagcaatagatgtccccgcatcttcatcacctttatgcaataaagaaacaagtgtataatcttcaagcgtttcatgttttttcatcatattataaaatcgtgatccatcatcagtatcaccatacaagacagcaccaacgacttgaccctgacttaaatacacttttttgtagatattgtcgacactattaaaaatttccacaccatggacatcttcatcttcaacaatttgccctgcactatataaatcacaaccagatactttaagtgaagtgaaagtagtagatcctttataaccttttgtttctttaccagttaaataatctgctagcactttgccttgttcataaagtggcgccaccaatccataaactttcccatcatgttcggcacattcaccgactgcataaatatgagaatcagatgtttgcatataatcatttacaacaatacctctattgacatctaatccactatctttagcaacttcagtataaggtctgataccaacagccataactactaaatctgtttcaatcacccgaccgtcagctaatttaatagcttcaacatctttatcaccaatgatttctttagaatttgcttgaagttcaatcttcataccttgcttttctaaatccgctttaagcatttctccggctttacgatccaattgcatttccatgagccaatcagctaaatgaagaactgtcacttccattccttgatctagaagtcctctggcacactctaagcctagaagacctccaccaatgacaactgcgcgttttttcgtttgggcaatttcaatcattttatttgtatcatcaattgttcgccatccaatgacactaggaagatttgaacctggtataggtaatacaaaagcttttgatccagtagcgaaaatacaaatgtcatactctacttcaatacctttagaagtagtaactattttgt

SEQ ID NO: 3660 - DNA, 3048 bp, Artificial Sequence
  Description of Artificial Sequence: synthetic nucleic acid sequence
cttattatttgttactttatagtgatagggtttcgtagaggtatttggttatcgatattgcactttgcttcttcaattgtatctttatatattgcgtcacaacattatcaatctattgcgcaacgtttagttgtctttgtgccatttccgaaaacggtggcgtttgacatggtctatactattccttatgatcatttgcaatacagatttgaaaaagtgatagcatttattataatatttggtatgtgtaagcttattttgtatctagttgttgttacatttgataatataataacgtataaaaagatacatttagtaagtcggatatcgagtgtcgttttgagtatcatagcggtttttatatatttacaaattggactttatttattatcgctatatccgcattcatttatacagtaccaattatctcaatcgctattaagtcgagttgtgattgaacaaattccttatttatcacaatttattttaaatttataaagtaatgacatgaggtcaggacaaattcgaacgttaatgttatgtcctggtcttctttttatggagtgatattgatgacaaaaaaagatgtaattcaattattagaaaaaatagctatatatatggagctaaaaggagaaaatacatttaaagtttcagcgtatagaaaagccgcacaaagtctagaggttgatgagcgtacattagaagagattgatgatgtaacagaacttaaaggcattggaaaaggcgtaggagaagttattaatgaatttaaaacacaaggtcaatcatcgacccttcaagcacttcaagatgaagtacctgaagggttagtgccacttttgaaaatacaaggattaggcagtaaaaaaatagcgaaactatatcatgaacttcaaattacagataaagaaatacttcaaaaagcctgtgaagaaggtaaggtcagtgctttaaaaggttttgcaaaaaagacagagcaaaacattttagaagcagtgaagtcgatgggtgctaaaaaagatcgttatcctatagagctaatgagaggactcaaccaagaaattgtaaaatttattgaacagttagaaggagttgaacaatattcaactgctggtagttttcgaagatataaggaaatgagtaaagatttagatttcataattagtacatcagagcctaaaaaagttcaacaacaattacttcgtattccgaataaagtcaaagatgttgctgttggggatactaaaatttctctggaattagcttatgatgatgagacgattggcgttgattttagattgatagaacctggtgctttttaccatactttacaacacttcaccggttcgaaggatcataatattagaataagacaattagcaaaagcacgcgacgaaaaagttagtgagtatggtatcgaacaacaagatggtaagctattacaattacaaagtgaagaagcaatctatcatcattttggtgtagattggattgcgcctgccatgcgtgaagatggtagtgagtttgataaagatctgagtcaaatcattcaattagatgatatcaatggagatttgcatatgcacacaacatatagtgatggtgccttttcgattaaagaaatgattgaggcaaatattgcaaaaggttatgaatttatggtcattacagatcactcacaaagtttaaaagtagctcatggattacaagtcgaccgtctgctaagacaaaatgaagaaatcaagaaattaaatgaggaatatgatgaaattgatatttactcaggtacagaaatggacatattacctgatggaacattagattacgatgacgaagttttggcacagcttgattatgttatcgcagctattcatcaaaactttaatcaatctgaagacgaaatcatgaaacgtttggaaacagcatgtagaaatccatatgtgcgtcatattgctcatccaactggtcgtattattggacgtagaaaaggttataaagctaatattgaaaagttaatgaatttagccgaagaaacaaatacaattttagagattaacgcaaatccgcatcgtttagatttaaatgcagaaatcgttcgtaaatatccaaaggttaagttgacaattaatacggatgctcatcatacaaatcatcttgatttcatgaaatatggtgttgctactgcacaaaaaggatttgtcaataaagagagggtcattaatacaatgacgaaggaagcctttcgctcatttgttgaaacgaataaatataagaaatagagggattgcatgagacaaaaaacattagatgtcttggattttgaaaagattaaatcatttgtggctgatgaaactataagtgatttaggtcgtgaaaaagtacaagagatggctcccgctagtaatttcgatacagtagaatttcaaatgaatgaaacagatgaaatttcacaaatctataacaagcatcgattaccaagcttaagtggtctagcaaaagtgtctccacttgttcatagggctagcataggaggcgttttaaatgtgggagaattaaacagaattaaacgcctagttcaagtgcaaaatcaatttaaaacattttacaatcaaatgctagaggaagatgaagaggttaagtatcctatactgcatgataaaatgaatcatctaccgatacttacagatttatttaaagaaattaatgaaaaatgtgatgcacacgatttatttgaccatgcgagttatactttacaaagtattagaagtaaaatttcaagaacaaatcaacggattcgtcaaaatttagatagaatagtgaaaaatcaagggaatcaaaaaaaactatctgatgcaattgtaacagtaagaaatgatcgcaatgttattccggtgaaagctgaatatagacaagatttcaatggtattgttcatgaccaatcggcatcaggacaaacactatatattgaaccgaattctgttgtagagatgaataatcaaattagtcgtttgcgtaatgatgaagcagttgaacgtgaacgtatat

SEQ ID NO: 3661 - DNA, 3050 bp, Artificial Sequence
  Description of Artificial Sequence: synthetic nucleic acid sequence
tgttactttttctgttggttcaccttcgccaactttttcccctgttaatgggttcttagttgttggtgttgtaattgtttttgttcctggttcacctttctgtttaacgcgctctttacctggttttaaatcaggattgaattcacgtttcttgtcgaatggaatttcttccgttgacgtgatcggatctccatcaactggaccatattttgtcacatcatccactggtggtgtgactacttcgcctgtatcagggtttttaactcctggtttacctggaacgtcctcttggctacctttcggtgcatttggatcaaattcatccttatggcctggcttgatttcttcgccaccatattctgtgatttcatctactggttgttttgttattttttctgttggttcaccttcgccaactttttcccctgttaatgggttcttagttgttggtgttgtaattgtttttgttcctggttcacctttttgtttaacacgctcttcacctggttttaaatcaggattgaattcacgtttcttgtcgaatggaatttcttccgttgacgtgatcggatctccatcaactggaccatattttgtcacatcatccacaggtggagtaactacttcgcctgtatcaggatttttaacccccggcttacctggttgcgttgtttgactacctttcggtgcatttggatcaaattcatccttatggcctggcttgatttcttcgccaccataatgaacgatttcatccactggttgttttgttactttttctgttggttcaccttcgccaactttttcccctgttaatgggttcttagttgttggtgttgtaattgtttttgttcctggttcacctttttgaacgactttctctgtacctggcgctaagtttggatcaaattcgcgttttttatcaaacggaatttcttccgttgacgtaatcggatctccatcaactggaccatattttgtcacatcatccactggtggagtaactacttcgcctgtatcagggtttttaactcctggtttacctggaacgtcctcttggctacctttcggtgcatttggatcaaattcatccttatggcctggcttgatttcttcgccaccataatgaacgatttcatccactggttgttttgttactttttctgttggttcaccttcgccaactttttcccctgttaatgggttcttagttgttggtgttgtaattgtttttgttcctggttcacctttttgaacgactttctctgtacctggcgctaagtttggatcaaattcgcgttttttatcaaacggaatttcttccgttgacgtaatcggatctccatcaactggaccatattttgtcacatcatccactggtggagtaactacttcgcctgtatcaggatttttaactcctggtttacctggaacgtcctcttggctacctttcggtgcatttggatcaaattcatccttatggcctggcttgatttcttcgccaccatattctgtgatttcatctactggttgttttgttactttttctgttggttcaccttcgccaactttttcccctgttaatgggttcttagttgttggtgttgtaattgtttttgttcctggttcacctttctgtttaacgcgctctttacctggttttaaatcaggattgaattcacgtttcttgtcgaatggaatttcttccgttgacgtgatcggatctccatcaactggaccatattttgtcacatcatccactggtggtgtgactacttcgcctgtatcagggtttttaactcctggtttacctggaacgtcctcttggctacctttcggtgcatttggatcaaattcatccttatggcctggcttgatttcttcgccaccatattctgtgatttcatctactggttgttttgttattttttctgttggttcaccttcgccaactttttcccctgttaatgggttcttagttgttggtgttgtaattgtttttgttcctggttcacctttttgtttaacacgctcttcacctggttttaaatcaggattgaattcacgtttcttgtcgaatggaatttcttccgttgacgtgatcggatctccatcaactggaccatattttgtcacatcatccacaggtggagtaactacttcgcctgtatcaggatttttaaccccccggcttacctggttgcgttgtttgactacctttcggtgcatttggatcaaattcatccttatggcctggcttgatttcttcgccaccataatgaacgatttcatccactggttgttttgttattttttctgttggttcaccttcgccaactttttctcctgtattaggattgacataagttggtgttgttgttgtttcaattcctggttcacctttttggactactttttctgtacctggggctaagtttggatcaaattcacgtttcttattaaatggtatttccttagttgatataattggatctccatcgactgctttaggagtgtatgtcaatgttgcaccatctaaatcagctctcataacgccacttgcgtatgtaccactattaccatttccatattgacttgatgtaactaaaaaattgtaactatcagttggactcaatcctaattcagataacgtagccgtccaagttttaccagcataagtagctgtaaaagtttgatttgaagcattatatttcaaattaacattatttaatttttgaccatggaatttaccatctaaatcattagtagtattatctgcgtagttaagaaaatctgttgatggagtacctgatcctactttagaagtattaccttgggagtcatttttaacaaatgtcccataccctctatagccttgaccagcttgtttctgtattttatctaatggatcgttattataatatcctgtatcaattctgaaaccagctgcactaggtgtacctttttcacgtaagataccaccgttttttaggaaatcatccccatctttcttgctgaacataaagccccaaccatctgcaccagttgta

SEQ ID NO: 3662 - DNA, 3442 bp, Artificial Sequence
  Description of Artificial Sequence: synthetic nucleic acid sequence
ccaaacgtatctgaaagtgcacttaagaacttagatgatcgtggtatcgtttatgttggtgcagaagttaaagatggtgacatcttagtaggtaaagtaacgcctaaaggtgtaactgaattaacagctgaagagagattattacacgctatctttggtgaaaaagcacgtgaagttcgtgatacatcattacgtgtacctcatggtgctggcggtatcgttttagatgttaaagtctttaatcgtgaagaaggagacgacactctatctcctggagttaaccaattagtacgtgtatatattgtccaaaaacgtaaaatacatgttggggacaaaatgtgtggtcgtcacggtaacaaaggtgttatttctaagattgttccagaagaagatatgccttatttaccagatggtcgaccaatcgatattatgttaaacccattaggtgtaccatcacgtatgaacattggacaagtattagaattacatttaggtatggcagctaaaaacttaggaattcacgttgcttccccagtgtttgatggtgccaacgatgatgacgtttggtcaactatcgaagaagctggaatggcgcgtgacggtaaaactgttctatacgatggacgaactggtgaaccattcgataatcgtatttcagttggtgtcatgtacatgcttaaacttgcacacatggtagatgataagttacatgcacgttctactggaccatactcacttgttacacaacaaccattaggtggtaaagcacaattcggtggtcaacgtttcggtgagatggaggtatgggcacttgaagcttatggtgctgcttatactttacaagaaatcttaacttataaatctgatgatactgtaggtcgtgttaaaacttacgagtctatagttaaaggtgagaacatttctagacctagtgttccagaatcattccgagtattgatgaaagaactacaaagtttaggtctagatgttaaagtgatggatgagcatgataatgaaatcgaaatggctgatgttgatgacgaagatgcagcagaacgcaaagtagatttacaacaaaagagtgctccagaatcacaaaaagaaactactgattaataagcacttaagataactgaaaccttagaggtatggaatgctagtcatttcaacctctttaaggtatttaatttcaatgaatgtaatcaatcaaatagcacagctaatctaaattgaaggaggtaggctccttgattgatgtaaataatttccattatatgaaaataggattagcttcacctgaaaaaattcgctcttggtcttatggtgaagttaagaaacctgaaacaataaattaccgtacacttaagcctgaaaaagatggtctattctgtgaaagaattttcggacctactaaagattgggaatgtagttgtggtaagtacaaacgtgtacgctacaaaggtatggtatgtgatagatgtggcgttgaagtaacaaaatcaaaagtgcgtcgtgaaagaatgggtcatattgaattagcagcacccgtatctcacatttggtatttcaaaggaattccaagtcgtatggggctattattagaacctaatgcataaatatttggtatatttgtttggaaattatgatttactgggatataacctttatcattcagtatgacgttagatgatttaataaattgtgaatttggatgagtacctacaccttcgataataagatcaaagttttcaactttaccagatgtgaatgtaacttcatgtccatttacgtgactaatttcttcgttaaatctataagtgatatttctcttttctatttcgtcgatgatgggttgattcatatcttgatccatcagtttattaatatttgtagagcgatgaatccatgtgacatccaaacctctatgatgtaaattttcaaggacttctaaagagatgtaacccgcgccaacaacaagtgcacgttgtgctttggtattcgtaataaaggtatcaattgtttcagtatcttcgagatttcgcacagtaaatgagatatcactatgagtgtttaatcgatttgcagatgcgccaggacttaaaatcaatgtatcgtaactttcttcaaaagtttgattagtttgatgatttaagacagtaactgtttgtctctcatcattgatttgtataacttcatggtatgtttttacagtgatttgctttttgtcataaaattgattgggcgtgtatgctaaaactttacgacggtcctcgataacgttgccaatataataaggtaatgcacaattagcaaagctcatgtctctatctttttcaaaaacaatgatttcactctctttatctaatcttcgaatttgacttgcacaagtcgcaccaccagcaactgcaccgactattataattttattcatagctgtctctcctttatatatgtatgatattaaaacacgtatgcctttttaatcatcacttggattgtttattcaacttaataataacgtattttcaaattaaaaaagtcatttaaataacgacctattccgtcttcattattactatacgtagtctcatttgctatttcctttaaatctttcaagccattggccattgcaatgccatgggtcgcaaactttatcatttctatatcattgtcctcatcaccaaacgcaatgatatgatcgtcggcgatgtttaaatagttttgaacatgcttgattccacgtgctttgttaatcccacgcttcacaatttctattactggaaacggtgcgccccaacgacgatgttcaatattttctgcataaaaatgtgttaacatatctttaatttcaggaatattttcttcttctgcttcaacaagtaatgacgtaggtgcttcattaagattttcaagtaaattacctgtttgaattttaggatttcccattgaaaaaccttcgtaaagtcttgaatcataactatttataaagacatagtcttttacttcagcaatgatatttgtaatatgagattgttgaagtgctgtaataatatttttagaaatttccacatcaagtacttcatgtatcactttaaaatcgtttgcttttggatgatgtacaaatgctccattaaagttaacaacaggtgtgctcatatttagttcatgataatacatctggcttgcgcgatagggtcttccagtagcaatcataacgtagtgtccacattgttgtaattcggttaatacttgtttagtgtaaggtgagatttctttattgtcatttaataatgtaccatctagatctagacaaattaaataaggttgcatatattactccttgtgttgttaattattatgtaacagtatcatagcattttattggcgttttgtcggatatttgatatattggtgtaaagaaaattttaaagaggtgatactg

SEQ ID NO: 3663 - DNA, 3133 bp, Artificial Sequence
  Description of Artificial Sequence: synthetic nucleic acid sequence
gttcctgaagaagaatacaaaattgacattggaaaagccaatgttaaaaaagaaggtaatgatattactctaatatcttacggggcaatggtacaagaatcactaaaagctgctgaagagttagaaaaagatggttattcagttgaagttattgacttacgtactgtacaaccaattgatatagatactttagtagcatcagttgagaaaactggacgtgctgtagttgtacaagaagcacaacgtcaagctggtgtgggtgcacaagtggcagcagaattagcagagcgagcaattctttcattagaagctccaatagctcgagtagccgcatcagatacaatttatccatttactcaagctgaaaacgtttggttaccaaataaaaaagatattatagagcaagctaaggcaactttagaattctaattattaaaaaagcaaacgtaaaaatatcaatcaaataaagtttacatttagttgtaaggttttccttaccttacaacttttgtataaattttcaataatttaaatacgtaaatcttaggaggacaagaacgtggcatttgaatttagattacccgatatcggggaaggtatccacgaaggtgaaattgttaaatggtttattaaagccggcgatacaattgaagaagatgatgtattagcagaagttcaaaatgataaatctgtagtagaaattccttctccagtaagtggtactgttgaagaagtgttagtagatgaaggaacagtggcagtagtaggagatgtcatcgttaaaattgatgcacctgatgcagaagaaatgcaatttaaaggtcatggcgatgatgaggattctaagaaagaagaaaaagaacaagaatcaccagtgcaagaagaagcttcatcaactcaatcacaagaaaagacagaagtagatgaaagtaaaactgttaaagcgatgccgtcagtgcgtaagtatgcacgtgaaaatggtgtcaatattaaagctgtaaatggttctggtaaaaatggacgaatcacaaaagaagacatcgatgcatacttaaatggtggtagttccgaagaaggttcaaacactagcgcagcatctgaatcaacttctagtgatgtcgttaatgcttctgcaacacaagcattaccagaaggcgacttccctgaaactacagaaaaaatacctgcaatgcgcaaagcaattgctaaagcaatggttaattctaaacacactgcacctcatgttacattaatggatgaaattgatgtgcaagaattatgggatcaccgtaagaaatttaaagaaattgctgctgaacaaggtacaaaacttactttcttaccatatgttgttaaagcattagtttctgcacttaaaaaatatccagcacttaatacttctttcaatgaagaagctggagaggttgtacacaaacattactggaatattggtattgctgcagatacggataaaggattattagtaccagtagttaaacatgccgatcgtaaatcaatattcgaaatttctgatgaaattaatgaactagctgtaaaagcacgtgatggtaaattaacttcagaagaaatgaaaggtgcaacatgcacaattagtaatatcggttccgctggtggacaatggttcactccagttatcaatcacccagaagtagctatcttaggaattggccgtatcgctcaaaaacctatcgttaaagatggagaaattgtagctgcaccagtgttagctttatcattaagctttgaccatagacaaatcgatggtgctactggacaaaatgctatgaatcacattaaacgcttattaaataatccagaattattattaatggaggggtaaaaacatggtagttggagatttcccaattgaaacagatactattgtaataggagcaggtccaggtggatatgtcgcagccattcgcgcggctcaattaggacaaaaggtaacaatcgttgagaaaggtaatttaggtggtgtatgcttaaacgttggttgtataccttcaaaagcattactacatgcttctcatcgctttgttgaagcgcaaaattcagaaaacttaggggtaattgctgaaagcgtttcgttaaactatcaaaaagttcaagaattcaagacttctgtagttaataaattaactggcggtgttgaaggacttttaaaaggtaacaaagtagagattgttagaggtgaagcttatttcgttgataacaatagtttacgtgtcatggacgaaaagagtgctcaaacttacaatttcaaacatgcgattatagctacaggttcaagaccaattgaaattccaaattttgaatttggtaaacgtgttatcgattcaacaggagctttaaatctacaagaagtacctaacaaactagttgtagttggtggcggatatatcggttctgaattaggtactgcttttgcaaactttggctctgaagttactatccttgaaggtgcaaaagatattttaggcggatttgaaaagcaaatgacacaacctgttaaaaaaggtatgaaagaaaaaggtatcgaaatcgttactgaagcaatggcaaaatctgcagaagaaactgaaaatggtgtcaaagtaacttatgaggcaaaaggtgaggaacaaactatcgaagctgattatgtattagttacagttggccgtcgccctaatactgatgaattaggattagaagaacttggtctgaaatttgctgatcgtggattactagaagtggacaaacaaagtcgtacttctattgaaaatatctttgcgattggagatattgtacctggattaccattagctcacaaagctagttatgaaggtaaagttgctgctgaagcgatagatggtcaagccgcagaggtagactatattggtatgccagcagtttgctttacagaaccagaattagcacaagttggttatactgaagctcaagcaaaagaagaaggtttatcaattaaagcttctaaattcccttatgcagctaatggacgagctttatcattagatgatacaaatggttttgttaagttaattacacttaaagaagatgatacgcttattggagcacaagttgtaggtactggcgcatctgatattat

SEQ ID NO: 3664 - DNA, 4429 bp, Artificial Sequence
  Description of Artificial Sequence: synthetic nucleic acid sequence
aatacaacatcaacacgttcttggaacactcatgtcactgggaatacaaagagatcaactcggtgatattatagttggagaagatatacagtttgttttgacaaaacaattagaatcatatattatatctgaattaacgcgtattaagggagcctcagttaaacttaattctattcctactgaagatatgatacaatcagaagagaattggaaagttcatagtacaactgtgagcgctttgagattagatgtagttttaaaagagatgattcatgacggtacctaatcagaaagccacggctaactacgtgccagcagccgcggtaatacgtaggtggcaagcgttatccggaattattgggcgtaaagcgcgcgtaggcggttttttaagtctgatgtgaaagcccacggctcaaccgtggagggtcattggaaactggaaaacttgagtgcagaagaggaaagtggaattccatgtgtagcgctgatgaatcccctaatgatttttatcaaaatcattaagttaaggtagatacacatcttgtcatatgatcaaatggtttcgccaaaaatcaataatcagacaacaaaatgtgcgaactcgatattttacacgactctctttaccaattctgccccgaattacacttaaaacgactcaacagcttaacgttggcttgccacgccttacttgactgtaaaactctcactcttaccgaacttggccgtaacctgccaaccaaagcgagaacaaaacataacatcaaacgaatcgaccgattgttaggtaatcgtcacctccacaaagagcgactcgctgtataccgttggcatgctagctttatctgttcgggcaatacgatgcccattgtacttgttgactggtctgatatccgtgagcaaaaacggcttatggtattgcgagcttcagtcgcactacacggtcgttctgttactctttatgagaaagcgttcccgctttcagagcaatgttcaaagaaagctcatgaccaatttctagccgaccttgcgagcattctaccgagtaacaccacaccgctcattgtcagtgatgctggctttaaagtgccatggtataaatccgttgagaagctgggttggtactggttaagtcgagtaagaggaaaagtacaatatgcagacctaggagcggaaaactggaaacctatcagcaacttacatgatatgtcatctagtcactcaaagactttaggctataagaggctgactaaaagcaatccaatctcatgccaaattctattgtataaatctcgctctaaaggccgaaaaaatcagcgctcgacacggactcattgtcaccacccgtcacctaaaatctactcagcgtcggcaaaggagccatggattctagcaactaacttacctgttgaaattcgaacacccaaacaacttgttaatatctattcgaagcgaatgcagattgaagaaaccttccgagacttgaaaagtcctgcctacggactaggcctacgccatagccgaacgagcagctcagagcgttttgatatcatgctgctaatcgccctgatgcttcaactaacatgttggcttgcgggcgttcatgctcagaaacaaggttgggacaagcacttccaggctaacacagtcagaaatcgaaacgtactctcaacagttcgcttaggcatggaagttttgcggcattctggctacacaataacaagggaagactcactcgtggctgcaaccctgcttactcaaaatctattcacacatggttacgttttggggaaattatgaggggatctctcagtgtgtagcggtgaaatgcgcagagatatggaggaacaccagtggcgaaggcgactttctggtctgtaactgacgctgatgtgcgaaagcgtggggatcaaacaggattagataccctggtagtccacgccgtaaacgatgagtgctaagtgttagggggtttccgccccttagtgctgcagctaacgcattaagcactccgcctggggagtacgaccgcaaggttgaaactcaaaggaattgacggggacccgcacaagcggtggagcatgtggtttaattcgaagcaacgcgaagaaccttaccaaatcttgacatcctctgacccctctagagatagagttttccccttcgggggacagagtgacaggtggtgcatggttgtcgtcagctcgtgtcgtgagatgttgggttaagtcccgcaacgagcgcaacccttaagcttagttgccatcattaagttgggcactctaagttgactgccggtgacaaaccggaggaaggtggggatgacgtcaaatcatcatgccccttatgatttgggctacacacgtgctacaatggacaatacaaagggtagcgaaaccgcgaggtcaagcaaatcccataaagttgttctcagttcggattgtagtctgcaactcgactatatgaagctggaatcgctagtaatcgtagatcagcatgctacggtgaatacgttcccgggtcttgtacacaccgcccgtcacaccacgagagtttgtaacacccgaagccggtggagtaaccatttggagctagccgtcgaaggtgggacaaatgattggggtgaagtcgtaacaaggtagccgtatcggaaggtgcggctggatcacctcctttctaaggatatattcggaacatcttctacgaagatgagggatgacgtgacatattgtattcagttttgaatgtttattagcattcaagttttaatgggcctatagctcagctggttagagcgcacgcctgataagcgtgaggtcggtggttcgagtccacttaggcccaccattcaataatttaaaaccttagggggcttagctcagctgggagagcgcctgctttgcacgcaggaggtcagcggttcgatcccgctagtctccaccattatattttgtacattgaaaactggataagtaagtaagattttaccaagcaaaaccgagtgaatagagttttaaataagcttgaattcataaataatcgctagtgttcgaaagaacactcacaagattaataactagttttagctatttattttgaataacaattcaaaatatggtggaaacatagattaagttattaagggcgcacggtggatgccttggcactagaagccgatgaaggacgttactaacgacgatatgctttgggtagctgtaagtaagcgttgatccagagatttccgaatgggggaacccagcatgagttatgtcatgttatcgacatgtgaattcatagcatgtcagaaggcagacccggagaactgaaacatcttagtacccggaggaagagaaagaaaaatcgattccctgagtagcggcgagcgaaacgggaagagcccaaaccaacaagcttgcttgttggggttgtaggacactctatacggagttacaaaagaacatgttagacgaatcatctggaaagatgaatcaaagaaggtaataatcctgtagtcgaaaacatattctctcttgagtggatcctgagtacgacggagcacgtgaaattccgtcggaatctgggaggaccatctcctaaggctaaatactctctagtgaccgatagtgaaccagtaccgtgagggaaaggtgaaaagtaccccggaaggggagtgaaagagaacttgaaaccgtgtgcttacaagtagtcagagcccgttaatgggtgatggcgtgccttttgtagaatgaaccggcgagttacgataaaacgttgacaaaaatttttacgatatgtagaagcaccaactgccactggatcaaaaactattggtgtaccttgctgattagcaattttacctattttgataatgtcttcttcattttcacgtgtgagtgtaccgatgttaattaaaagcgcactagccattcgagtaaaatcttcagcttcttctggtgcctcactcattgcgggactagcacctaaacttagtaaaccattcgcagtaaagtttttcacaacatcattggtatagcaaattacgagtggattttctgaacgtaatcgttctaaattattcatcatctaaacctactttcttcatataagcaaaatgatttacaggtcctctccccttgccaatttctggggtatgttcaatacttaatgaaataaactcttttgcttttttaactgcatcttttatggaacgacctttagctaattctgctgtaataactgctgaaaaagtacaaccagttccatgagtatgtttagtatcaaagcgtttgttctcaaaggtatacgtttcattcttagtaaaaagaaaatctttagcattatttaaatcggctgaatgccctcccttaattacaacacccttactaccaatttcattaataaagatttgacctgctttacgtatgctttc

SEQ ID NO: 3665 - DNA, 3180 bp, Artificial Sequence
  Description of Artificial Sequence: synthetic nucleic acid sequence
tgtttccacattgaatacaataccaacgctcactgtcttttataacaccttttgaaacttgagatactgattcatcttcaagttgatgcgttggagaaatcagtctaccgtaatatttaattttacttcactactttcaaaaaagtctgaaatactcaaataagcgaacacaagtgatatctaatgatattaccactgtgttctttcctatcaagctttcagacttttgattatatattaattaatgtcgattcttcttgggaagtaacccaatcctaaaccgcctgatcctaaatgtgatgctatcactggtccaaattcacaatactgaatatgaacattaggatgatcttcctttaattgctgaagaaatgactttccatcttcagttttatcaccgtttattacaaatactgtcacatcttccatgccttctatttctttaaaaatgtttgtttctaaagattttagcgcacgttttttagtacgtactttttcgtgtggatgtattttaccatcttcttcaaaacgcaagacaggtttcattttcaataatgtacctacccaagcttgagctccagtgatacgaccacttttttgtaaattttttaaatcatcaacaattaagtatgcaccaatatgttgtcttatttcagttagttcattaataatatcatcaggtttatatcccttttgtaccaattgagcagcgtaaattgcaaagctaccttcaatcatcgcagcaagacggctatcaaacgtatgtacttgaatatcttcaaccatttcaccagcttgtgttgctgaaggatagcttccgcttataccacttgataagttaatcacgatgacatcagtgtatccttgttctcttaatctctcaaaattttcaatccaatcgccaatagcaggttggcttgttgttggtatagttttagatgaagccatttttttataaaaatcatctacagaaaaatcatcactctcagtgaaattcactccatcatcgaaagttacacttagtgaagcgactggtatgttatattgttctattatatgttgtggtaaataacttgtagaatcggtcataactgcaatcttcatcttaatacttatcctcctcaattatactcatagttatgatacaataattttttaaaaaagaaaatatcatcgtaataatttagaacctatcttgttacgtgtataataatgttagaaaactgaattgtaggtggcaaaaataagatggataaatccataattactattaaacaagcacattcaattgaaaatgtgataagtaaatcacgctttatagcatatattaagcctgtttcgactgaaaatgaagcaaaagcttttatagatgaaattaaaacaaaacataaagatgcaactcataattgttcagcctatactgtcggaccagagatgaatattcaaaaggcaaacgacgatggcgaaccaagtggaacagctggcatcccaatgcttgaaatactgaaaaaacaagagatacacaatgtttgtgtcgtcgtgacacgctacttcggtggtatcaagttaggtgcaggcggtcttattagagcatatagcggcgccgtgcgtgatgtgatatatgatataggtagagtcgaactaagagaagctattccagtaaccgttacgttagattatgatcagacaggtaaatttgaatatgaacttgcctctactacattcttattaagagaacaattttataccgataaagtaagttatcaaattgacgtagtaaaaaatgaatatgatgcttttatagactttttaaatcgaattacttctggaaattatgatttgaaacaagaagaccttaaactattaccttttgatattgaaaccaattaaataaaaaacactatgcaagttaaagcaacgcgtgcttatgacctacatagtgtttttttattatgaacggtgatgctcatcataatgatgttgcttaccatttcctttttttgtaattaaatttaatattggtcgataattatcatctattaatccagtaaattcaacgatcaactcaatcgtaaagacaatgagaatgaacatcataagtgcacccaacggttgggataaatagaggataacactagataaactaaacataatcgctattgaataaataagtaaaacggtttgtctatgcgtatatcctaaagcaagtaatttatgatgtaaatgtgacttgtccgcttgcattatatgttgcccttttttcattcgacgaatcattgcaaataatgtatcaataaatggcaccgctaatataactataggaaagaataatgcaataaatgtgatattcttaaagccgagtaaggataagaaaccgataataaatcctatcattaatgcaccactatcacctaggaaaattttcgctgggtgaaagttatagaataagaaaccaagtaaagaccctaaaagtacacagcaaatcatgataataaatatgttcgcttgtaaaatagcgatgaatccaatagtcattaatgccaatgctgagacgcctgaggcaagtccatcaagtccgtcgataagattaatagcattggtaattgctacaatccatattactgtaataggaatgctgaatatgccaaaatgaatcgttggaccaattggcaatgaaataaagtctattgtaattccataaaacgtaacaattaaagctgcaacaatttgacctgctaactttaaataaggtcttagatcgtaaatatcatcaatcaatccaaccatatacattgtaattgcacctaatataagcggtttaacctcacgttcaatagggtgtccgagccaaatccctattaagaaagaaaataaaatgaccgttcctcccatcactgagataggtttcgtatgtacttttctgaaattaggacgatctactaaatctaatttttttgatattacaataataatgggtgtaattattaaactgactatcatagtaaaagctataagtaatagtgtatacatcagttcaccttcattgaataagttgtacctcacgctatgtaaaatttgttatctatcgtttttaatgcaatatttatcaaccataaatgtagttttcattgaactaaaattatatgattaatgtttaaattataaatatccatgttacat

SEQ ID NO: 3666 - DNA, 3616 bp, Artificial Sequence
  Description of Artificial Sequence: synthetic nucleic acid sequence
ttgaacatcatgacgggtataccatgatcccttagattaataccaagatggaacgaaaattcactttctccgacaatgattacgcctggtggctccgtacttgctacaccgaacagtttacttaaaggtgtaaaaccaaatccataaatgactacagtgataaatacaagaccaaaagttactggtgtaatatattgagccataggaattttatcgtccataaataaacttgagaagaattgtgccactgttaaaaccacaatacctctaggcgccattagtgctactactgcacgttcctttttagttatttcagtacctaatgttgaaagaaacactgaaattggtcttactaatacaatcataaccaaactaaagagtatgagctgccaagataacacattgagcaacacatctttagtgagagaagacgtaattaaaataaatacagtactcacaagtatagatgatgcattatctataaagtggtctgattctttaaagatgagatcgtgacgttttttacgcgccatcattaacccaaaaattgttacagctagtaaacctgattctgataatatctcatcgcagatactaaatgttaaaagaataaatacaaactgaatgggtggcattaaactttgaggaattttatcttgacctataagccaattaaatagaaaggctgcaccaaaacctattaaaattgcagctaagagcttcaagataaagagaataataacgacaaagcctatcccttcctcaaaaatctggaatacataaaatgcagtgagtgcaataataggtccaataggatctaagataatactttcccatcttaatactgaatcgacatttctttttactttcgcttgcttcagcaagggttgaatcacggttggaccagtgattaggaatagccctccgataacaaatgaaatagacagagggaaattcatagtgacatgtaaagcgattgctcctaaaatccatgcaattcccgctcctattgtaataattcttataacagctttagaaatgccttttaattctctaaaatctagattactactaccttcaaataatataattgctacagcaagagatacaattgaactaaatgcctcaggtccaagtgcctcttttggatttgctaatccaaaaataggtcctacaagtaaacctacgatggccatgacaacaatcgatggccattttattctactcgctaaccattgactaaaaatgcctagtgctaagaacaacacaatcgttagcatcacgggcaattccaatgacatattaaacaccttctttatttcgaattcgatttatatacttaatattgacctatactaccaaaaatgctttgcaattgcattatgatttgcttaaagataatgtaaacatttaaatgaaatatatgaatttaagttagatggcacttgactatacgcacttatctgccatcttatttaatcataccacacttaaacgtgcaccctatttatacaatagtacatatgtggcgaactttactgtttattttttcggtaaaatcatctaaaatagattaatgtaatttttaaaatttttgtcagaaaaattaatctaacttggagagcacctgaagggatttgtttattaaatgagcaatgttaaagaatccatcattgttgccttcgcctttgtaggcgttgtagttggagcaggatttgcgacaggtcaggaaatttttcaattcttcactagtcatggtatttacagtattggcggtatttttattactggacttatcataactcttggaggaatattcgtattaaatactggctttcgtcttagatctcaaaaccactctgaatctattcgttattatttacatccaacaatagctaaattatttgatattatacttacagtatttttattttctctagcaattattatgacagccggcggagcatcgactataaatgaaagttttggcttacctttttggttaagttctctcattttagtgatacttattttgttaacattatttctaaagttcgatcgacttatcgctgttttaggaggggtaacaccatttcttgtggcagtcgtagtaatgattgcagtgtattactttattaccggtgatttaaactttagtgacgtcagtcaatattcaaatcaaaataagtcgatttcacctggttggtggtttgacgcaattaattatgctagcttacaaattgctgctgcatttagctttttaactgtaatgggcggtaagctacgatatcaatcgtccacaatttatggtggacttatcggtggtattattgtgactttactattacttttgattaattttggtcttgttacagaatttaatcaaattaaagaggtagcattaccatcattgctacttgctaagcagatttctccatccattggtattatcatgtctgtcattatggttttagtcatatacaatacagtagtaggtttaatgtacgcctttgcatcacgctttagtcgaccgtttacgaaacgctattatattcttatagttatgatggcaataataacatttgcttgtacttttgtgggattcatttctctcattggtaaagtgttccctattatgggactttttggttttatcttattgattcctgtgatatacaaaggaattttacgaaaataataatcttagcctaggacaaattgtcttaggcttttatattgtcaataaggtaaagagttaaacacatactaaacaaattttaattctattaacacttcctgtgtgagttaacgaatctatttaaacactattccaccttcttaatggttgctcattttcttgaagttcaggagaattttaatataaaataatgcaatttaaatttaaaactgatctttcagggaatacttctaatggaggtgtttaacatgacaaatcaattatttattaacaatgaatttatagaaagtcagtctaaagagacaatggatgtcattaatccagctactggcgaggcatttgatactatcactcttgcaactgaagaggaagtaaacgacgccattgaaaaatcgcaacaagcacaacttgaatgggagcgcgtgcctcaacctacacgtgcggaacatgttaaattacttatacctttattagaaaaaaatcgcgatgaaatagctcaattatacgtaaaagaacaaggtaaaactttagcgcaagcttatggagaaattgacaaatcaatctcatttatcgattatatgacaagtctgagtatgtcagataaaggacgtgttctacaaaatagtattgcaaatgaaacgattcaaattatcaacaaacctatcggagttactgctggtattgtgccatggaacgcaccgatacttgtccttatgcgaaaagtcattccagctatagtaactggttgttcagtagtgattaaacctagtgaagagacaacgttactcactcttcgattagctgaattattcagagcatcaactataccagcaggattgtttcaaattgttcctggcactggagaaacagtaggtacacaattagcttcgcataaagacattcaacttatttctttaa

SEQ ID NO: 3667 - DNA, 3729 bp, Artificial Sequence
  Description of Artificial Sequence: synthetic nucleic acid sequence
ggtcaatcatttgattagcatctagttttgctttaggtaattcatctgcatgtatgtgttcaattgcagattgcccttcatcttttgcttgattaactaaatcatttgatgttgcgtgattaatattagaaaacgcttttctagcttcctcatttaccatttgttttgcttgagctttagaatttgatgttgcattagcgtgttcaatttcatcaagttgacgtttgagcgtatctttaatgtcattatgtgcttttgtttgagcatctttaagtctttcaattccatttagaagtgctctagcatcatccatgttttgaatcattccaattatgatattagcgtctttatttgtaccgttttctttgtcaagaacattattcgctaagttgatagcgtaatcatattgtattttaaggtcttcatcagcatttaaatattcaatgttgtcttttgtagttgctgttaattgagctacatgttcttttaaaccttgcatagcatcatttaattctattgcattatcaacgatttgattaattattttaatgtctttagacgctctaatctgattaattattgcagctttttgagcattattaagtatatctaattctttaataataaatacttcagatttttgttgatgttcttttagacgtcgttcaccatttaattggtctttagcattatctatttgtgttaaaagatgttgaatgtcattgatattgacatttgtaccgctatttttatttaatacgcctttagcttcttttaaagctttgttaaattgacgttttaaattataatcagcgtttctataatttaaacttgctttaacaggatttactaaggttttaagcttatctctcaataatttcattttatcgtttaattttaacgttgattgagtgagctgagataactctgttaaagtatttgctgaatttaccttgtttgtgacatcttcaagttgtgctttatttaaatcttttaatccttttattaattttaaatctttgctcttctcagttgcaagacgttgttcaccattcaatgcattttttgtatcgtaaatggcttgactaagacctaatacttcttcaatcgttgctggattttctgaagttttagaacttgttgcacttgcttgttgtagcgcctcatcaaattcaatttgtaaattcttatcagcattaatataattcacactatttggaacagaagttgaattactttctagagtatctcgtaagtctttcattgcattatctaaatcactagctttagataatgtatttgctaaagatgataaatcatcagagttgtgaatattactttcagcaatatgacgctgtgcatcattgatataagataaagattgtacgtattgaattgctttagctttagcttttgataaacgttggataccatttaaagcatctttagtatcctcaatcacttgtttgagtccctcaatttgtatttcatctaaatttttaccattttcttttgcaagtacttttcgagcattacttaaagcatggtcaaattgttgttttaaatcttcatctgaatttatataatttgagcttgcttggacaggaaaagcttgattattaagttcatctcttaaagatttcattgcatcatttaaatcaaatgcttgattcacgattctagacaattgtgcaatagaattagtattcataatttcatcatttgcatgtgtgaattgagctttattaataaattttaaactatcaattagtttttctgcttttgattttgcagctgttaaacgttcaataccgttaagtgcatctttagttttgaatatatcatctttaaatgtatcaattgcattgaaatctaagttctgaccttgagttttgttgagtgcatcacgtgcattgttgatagcttgagtaaagttatctttgcgtaggttatcggcgttaatataatttatacttgctttggttggagcatagttattaacgattgcgttagctaattcacccataatgtcattgaggtttgtgccctcgttgacaagatgttctaattctaataaatcatgcgattgcgttactttatcctctaaagcagacttttgagcattgtttattttttctagtgatttaatatattctaaagctcgtggtctagcatgatttaatctttcgaaaccatttaacgatgtttctgcatttattaattgttgtaacgcttgttttgcttcattttgggttgcgttagatttttgtatatcttgtccatgttctagtgcatcatcataagcgataattttgtcgtcgtcggcttgtctataattatcactattttcaatagaatcagcatgattaatgaattgttctaatttacccattactttgtttaatgccagagcattgttactagcagtagcgatttcttctagttttgttgcgtttttaacactttctttcgcagtttgttgttgtaatgaattaagatgtgttaattggtcaattgtttgattagcatgaactttagcttcttcaactcgctgatcaccatcgaggttttctgatgcttgagttaattgttctagtgcttgtcgtacttgatctaaacttacatttgagccatttattttatcaatgattgcttgagcatgtgatacagtttggtctactttttcctttttatcctctgaagcttcagtgtaattaggcaaagtagtatctgtaatcactacttgagttttatcttcaagtgatttcatagcttcatcaagggttttagcttgttgcagaagttgtttaacttcagttcttaatgctgcgtgagaaatcatatcttttatagattgcttttgtgcattattaagataattcatatgtttaatttcatcatttgcatttgatttgtcatatgatagtttttctgcgccaaatagtattttttcgttagctaggacattatccttaacaatatcgactttataaggttctaatgttggatttgttgtctgattaagtagttgttcggcatcagcaataactcgatcgtattgttgttgatattttgaatcttcatttaaatatttactatcgttcaatatattatttttatgagcaactacttgttgtagtgtttccatagctttatcaagagcttgagcattatctaagttctttgcaactttttcgcgtgttgtagcatttgtattcgtatttatcattacctcgcgttgagcaacattaagatgaattagaccattaattacattagcggcatcttgttttgcatgagcaagtttctgatcaccatgtaagttattttgagctgtttcgagttcatgagttatgctattgattactgttggatccatttcaggatttgtttgtctatgaatgattgaatcaacatgatttatagcttgttgatacgcctctttttcaggttgatcttcgttaatgaatcgactactatctaacactttatctgcatttttatatattttgttaagtgctttcattgcatgatttaatgattttgctttttcaattgcttgggcaacttctgttctcgttttagcagtatatatttgattagatattgaactgctttgttgtgatgttaaatcatccaatttacttaattctttatcagctaaatcgatagtttgataaagtttttgtttacctctgagttgttttttcgcttgattaacttcgttga

SEQ ID NO: 3668 - DNA, 3157 bp, Artificial Sequence
  Description of Artificial Sequence: synthetic nucleic acid sequence
acaatttgatgattacccttagaaaagtcttgctttttcaatgcctctaattgctcgtcaacaatcatttcaagaccaactttatcctctttggcgagtttaaatatatgttctctctgtatttggcgacctaataataaatacaatatgaatcctactaaaggtagaaaaactaaaaccaataaccacgcccatatagaatttgctgtacgcctctccatgaaaataataatgaatgcaaaaactaaatttaataaaaaggcactaactaataaaatattaattataatattagattgatgaagtgccatagtaaagacttctatcataggttacctcctttatgattgtttattctcactcagttttcatttcagtgatttttaaatataattatagcatgaagaaatacgattatcatggttagataatatttaattacctgaatcattgacgagtgaatttatgaataatacgatataatatgaacagaggtgactttatggcagacatggagagtgcacatcactcagagcaaataaaaacaaatttaaaatcaagattaaatagaatagaaggtcaagtaagagcaataaatcgtatgattgatgatgacgtttactgtgatgatgtactaactcaaattagagcaacacgttcagcattgaatagtgtagctactaaattactagaccatcacatgaaaggttgtattatggaaaaaataaacgacggtgcgcaagaagaagcaatggatgaattgctcgtgacattccaaaaattaataaaagattaagagggtatgaaattgaaaaaaggattgataaatgtttcaggtattaaaacaactgaacaagctaaacagctcaaagatcatttatctaagatgataggcatcaatagtgtggatatcgattaccaaatgaatgagattcgagtagaatttgacactcctgcaaatttaaataacattgaaaaagaaatttacgattacggatttcgtattttataattaaataattgcgcttaattcatttttcgtttgaattattatagcttttagaaatatttaaaaatatttttagaatgatgtagtaaagtagaagtaattagggtattattgaaataaagctatttctaacgaggtgataattgtgaagaatcaggataagattcaaaatgtagtcaaattattatcatcattgggtgtgaatattaagaaaactaagtctcgtttagatattattaatactttgcctacatctaatcaagtaagtcatgaattaaaataatttgcatgataatataatattttatgtattgattatctaaattaatatataaagagagacactgttcatcgtgaatagtgtctcttattttatacaggttaaattgtattagattttttagataatgtggttatttcatatctttggggttcatgataataaattgaaagaactactcctataccagtcattaaactccataaagaacttccaccgtaactaataaacggaagtggtatacctgtaatcggtaataattgaaccgtcatgccgatattttgtaacacgtgaaaaacaatcaacgatacatatcctatgataaatactttgttaaactgactatcaattttactagctaaccgtataaggtgaaatattaagaataagaaaagtaatatcaataatactgaacctataaagcccatttcttctccaatcactgaaaaaataaagtcggtatgattctcaggaatataaacttcgccatggttataacctttacctaataattgacctgaaccaatagcttttaaagattctgttaagtgatatccatctccactactgtatgaatagggatctaaccaagaattgatacgtcccatttgatacatttttattcctaataggttttctattaaggatggtttataaatgatagctaatataatactagaaccacttacaaatgcaacaataaaaagaggggctaatatcctccatgttattccacttactaacatgacgccagctataattgcacataacaccaaagtagtacctaggtcattttgcaatagaattaatgccataggtataatggatacacctaaaattttaaaaaataacattaaatcagactgaaaagacttattaaatgtaaattggttatgtttagatatcgttttagccaaagcaagtataagtataattttcatgaattcggaaggttggatgcttataggaccgaaactgtaccaacttttagcaccattaataattggggtgattgaagtttcaggtaaaataagtaaccctattaatagaacgcaaaatatactgtataaaatataagtattatttttaatttttttcggtgaaattatcataattaaaaatgcaataatagctccgaaaatataataaataatttgtctaatactgaaatttgcactatattgtccgccacccatagcggaactgattaaaataacacttgttagtgctaatagtgatataactagtacgagtatccagtctactttacgtaaccagttacgtttaggttgttgacgagaagaataattcattgcttactcctttatgtatatggatcacttttcaaaatttctgtagatacttttacaatattttaatcatctgtattcattcatattttctaatcaaatatatattaattttacatgacttcttttaaatttgctagaatatcacagaatgatagcaccttattaacttttaatatgtaatagtcataataaaaatatgtatattggcgcaaattgtcattaaaatttagttctatatttagattatcaaatgcaattgaatttaaaaatatgataatattaagtttcggaagccgttatgtacttaaagtagtaaataaaaagatcaattaaacaattacgttaaagaaaaaggctaaaagaactgtaattgcaatattgctagtccggggatatctcctttcttcattgctgtctcaaccattttatcaatatgtttttgagaagcatgtgtcaatatcgtctcattcttactatgtgcgatttctcgtgttgttattgaaattatcgataaaatagtcatcaaaaaaatgacaacaatgacaaacagtttta

SEQ ID NO: 3669 - DNA, 4248 bp, Artificial Sequence
  Description of Artificial Sequence: synthetic nucleic acid sequence
tttttacatgtgagcatgtatttcaagaaaataaattttaaattattgattaaatacaataagaaagcccaaaatgaatttcattttgggcttatttttgtgaagttataagatttcaaataaagaaatttcactaactttttaaaggtaatttgataaagcagatttctatatttaatgtttggtttttaataaaattgaacaagtttcgtaaattcatattcattacatttttatgtcatagaatatttttctcattataagcacagtgattgtattgaatcttaaagtataaaatgataacaatattaataaggtataaatcaatcatttgagttcaatttaatttttagtcataatatataaaatacaaagtgttggatagtgtagtatagtatttattcacattactgattgaattcattaggctttaataataaaagcattaatataataattttatctaaatctattgaatttttgtatagatacaattcataatcaaacgtcttggacaaaaatatttaatttttaataaaatataggcatatgttttttaataaacgttgttactaaatttagatagcatttagattttcatttatctttattatgtgagtgaaaaaaagagaaagattaaaagaagaaacaagtatatattttttattactgcgcttaaaaagataaacatacactttcaacaaagtaatcatttaattatttaaaagaaaagtaatcattgaaaggaaaataagatgtttcataacaaaaatgcaaattttgtaaatggtgtaactatcaatattaaagataaagaaacaattaaaacattttatgagaatgttttaggatttaatcttatcaatgaatctgaaactgctgtacaatttgaagttggcgattcaaatcaatttattacttttattgaaatacagaatggacgagaaccgttaatgtctgaagcaggtcttttccatattggtatattgttgcctactttgactacattagctgatttactcgtacatttaagtgatttagaagtaccagtgaacggtggacaacaaagtgttgcaacatgtttatttattgaggatccagagggcaatgctataaagttttatgtcgatcgtgagacagaatcatggattgatgagaaagaaggcagaattagaatggatattgctccaattaatgtacctcgattactgcaaaacgtctctcatactcaatggcagggcataccagatgaaactaaattaggttcattacatattaagtccattcgaatttctgatgttaaatcatattatttaaattattttggactagaagaatcagcatatatggacgattattctctatttttatcttcaaacgagtattataatcatttggctgttaatcagtggttatctgcgacaaaacgagtagataatgaacatacctatggtttagctatgatagattttcactatccaaaaacaacacataaaaatcttaaaggacctgatggtatttattttagatttaatagaataaaagaagtgtgatgatatgaaaaaagcaatcatagtcatgtttgttgttactgttatcttgacaatagcagcactcattgacgagtttatgattcaagatgcgaaacatggtcaaagtcgttttacgtcacatcatcctatgaaaatcaatacatataaaaaggggcagtgtacatattacgtctttgaacgtgttaaaaatgatggaaataagataaacaatacttggagcgacgccaagcattgggataaaaaagcaattgatgatggatacattgttgaccgtaaccctaaaaaaggatcaatattacaatcttctaaagggaaatacggtcatgttgcatatatagaaacaataaatgaagatggttctatgcaagtttcagaaatgaactatacacaaccttatgaaatcacaaaacgcacaattcatacctatgatattaaaaattattattatattcatccgcaaaagataaaaacataatagacaagatatctttttcaaaattacgttctaggatataatgttaagtgttgctttagatgacattaaaaagaatggaggcacttctttgaaaaagaaatactatattagcatctctttacttatgacaatcattgtattagttttcgatcaagtttctaaatggcttattacaatctcaatgaaggttggagattcatatgaaattatccctaactttttaaatattacatcccatagaaacaacggtgcagcatgggggattttgagtggtaaaatgctatttttctatattattactatcattattttaatcgttttagttattttttatattaaagaagcacaatttaatttgtttatgcaagttgcaataagcctattatttgctggagctttaggaaattttattgatcgcgtattacatggcgaagttgtggattttattgatacaaatatattcggatacgattttcctatctttaatattgcggattcaagcttaacaattggagttatattcgtaatcatcgcactcattaaagatgcaatcataaataagaaggaggtctagttttggaaaattataattttaatattatcgaacaatcacaagttggacaacgtatagataaacttgtttcagatttaaataaagattggtcacgtagtcaacttcaagattggattaaagaaggtttagtcaaggtaaatggtaaagtaattaaatcgaactataaggtcaagttaaatgacaaaattgttgtaaccgagaaagaagtcgtagaggcagatataaaacctgaaaacttaaatttagatatttattatgaagacgaagacgttgctgttgtatataaaccaaaaggtatggttgtacatccatctccaggccattatagtggaacattagtaaatggattaatgtatcaaattaaagatttatcaggaatcaatggcgaaatacgtcccggcatagttcatagaatagataaagatacgtctggtttattaatggttgctaaaaatgatgttgctcatcgtcatttagttgaacaacttatgtctaaaactgttaaacgaaaatacacggcgttagttcatggtaatatccctcatgattatggcactattgacgcaccaattggtcgaaataaaaacgatagacaatcgatggctgtggttgatgacggtaaagaagctgtgacacactttaatgtattagagcattttaaagattatacattgatagaatgtcaattagaaacagggcgtacacatcaaattcgtgtacatatgaaatatattggttatcctcttgtaggggatccgaagtatggacctaaaaaaacgttagatatcgatggacaagctttacatgctggtataattggtttcgaacatcctgtaacacatgaatacattgagaagcatgcaacattacctaacgattttgaaaagttactagatgatataagacgtagagatgcataaacgaatgaggcatcgatttttaattataaatactaactttgccattgacttatactattaaaagttttaaactaataacagtttaaatataaaaacgtcatctttaattgagggtccagagaggctccgaagatatgaataattaggataataatattttgatgattaagttactaatacttttgctgtgtttataacttaagaatgtgaatataatagagaatatagattattctctttaactttttgtctcatatctttattaaagatatgagtttttttatattaaaagaggtgaaacaatgtctgaacgaattattttagatgaggcagcgatacaacgtacaattacacgaattgctcatgaaattctagaatataacaagggaactaaagatttagttctattaggcattaaaacaagaggtgcttttttagcacatcgtatacaagataaaataaattcaattgaacaacaattagtaccaacaggtactatcgatatcacgcattttcgagatgacgttgataaggtagtgcaacaagctgatcaatacgcttttgatattaatgtagatattaataacaaagtggttgttatcattgacgatgttttgtataccggacgtacagtaagagcctcattagatgcgattttattacatacaagacctattaaaatagggcttgcagcacttgtggatcgtggtcatcgtgaactcccta

SEQ ID NO: 3670 - DNA, 3794 bp, Artificial Sequence
  Description of Artificial Sequence: synthetic nucleic acid sequence
aattatctaaaatggataatgaatcagatcaaattacgaaagaaattatcgacttcaatatgtttatcaacaaaattattaaccgtcatgaaatgacagcgaaagatacgacattcgtacgcgaaattccgcaacaaaccatctttgctgaaatcgatccagacaagatgacacaagtatttgataatgtcattaccaatgcaatgaaatattcacgtggcgagaaacgtgttgagtttcatgtgaaacaaaatgcactttacaatagaatgacgattcgtattaaagataatggtattggaataccgattaacaaggtagataaaatatttgatagattctatcgtgtagataaagcacgtacacgtaagatgggtggtacaggactaggtctagctatttccaaagagattgtcgaagcacataacggtcgaatttgggctaacagtgtggaaggacaaggtacgtcaatctttattacacttccttgcgaaatcattgaagacggtgattgggatgaataacaaagaacatactaaatcaattattttagtcctactcgtcttgatgagtatcgttttgacatacatggtctggaacttttctccagacctttcaaatattgataacacggataatagtaaaagtgataagcctaaaccacttactaaaccaatgactgcagaaatggaaggaacgattacaccatttcaaatcgtgcattctagagatgaaaaatctcaaggaacagtggcatcaggtgcagtcttagacaagatgattcaacctttaaaaaatcaagaagttaaatctgtatcacatctgaaaagggaacataaccttgttatacctgaactaagcaacgactttatcgtcctagatttcacttatgatttgccactttcaacatacttaagtcaagtactcgatatcgatgcgaaagtgccgaataactttaattttgatcgcctccttatcgatcaagatcataataaccacgtcgtactatatgcgattagcaaagaccgtcatgaagtagttaaacttaagacaacgatgaaagggaataacgttgacaaagcttttaaaagtatcgaacctgacatgcaaccctatacggaaatcatcacgaataaagatacaatcgacaaagcaacacacgtgtttgcaccaagcaaaccgaaagacttaaagacgtatcgcatggtcttcaatacgatcagtgttgaacgcatgaactcaatactatttgatgattcaacgattgttcgtagctctcaaagtggtacgacaacatacaacaacaatactggtgtcgccaactataacgataaagatgaaatgtatcattataagaatttatctgaagacgcgaaaagttcaagcaacatgcaagaaaccatcccaggcacatacgagtttataaatagtcatggtggcttcttaaatgaagattatcgcctatttaagacagataatagaacggggaaactcacatatcaaagattcctcaacggtcacccaacgtttaataaacataacttcaatgaaatccaagtcacatggggggataaaggcgtttacgattatcaacgttcgctacttaagacggacgtcacactgaacagtgaagaatctaaatccgtccctaccgttgagtccgtgcgttctgcattagccaaccatcctgatattgattttgaaaaggtaacgaacattgcgattggttatgatatggacgacaaggcaaataacgaagatattgaagttcaacgtaactgtgaattaataccacgttggtttgtagaatacgatggcaattggtatgcctataaagatgggaggcttgaataaatgaactggaaactcacgaaaacacttttcattttcgtttttattcttgtgaacatctttttagtcatcgtttatattgataaagtgaataaatcacaagttaatgactcggaaaaggtaaacgaggtcaattttcaacaagaagaaattgacgtgcccaaggatgtcttgaatcaaaatgttaaagatactgaacttgaacaaattactgcccgttcaaagaatttctcaagttatgcgaaagatcattcaagcatgcaaacgtctgattccgacaaaacacttgaaggagatattgataaaggcgttcaagtgagtgataagaacttacaagatatcaaagagtacattgcaaagaaaatctttaacggtaaagagtatcagttaagtgatttaactaaagataaagtcacttacgaacaaacgtataaagattatccgattatgaataatagtaaagcgcgcctaacgtttaatttgagcgatggcaaggcgacaagctataaacagacagcgatggatgatatacaagtagctaaaggttcaaatagcacgaagaaacaagtcatcacgccgcgtaaagctattgaagccctttattacaatagatatttaaaacaaaatgatcaagttcttgatgcacgcctaggctattattcagttgtaaaggaaacaaacgttcaattactccaacctaactgggaaattaaagtaaaacataaaggcaaggatgaagttcaaacctattatgtagaagctacaaatcataatccgaaagtgattgattattagaggttattgatgcgtggcgtatcgtttgaatgaaaccgtcaagcgatagcatagaaggttacgttaatttgtactgtctagagcaaactttggcgtacttgtgttggaagtcatttatcgaaccaacgacatgtgatgggttacggattgattatgaagctatataagataatataaactaagcctgagacaccgatgagtaatctcaggcttttttacgtattgaaagtgattgagtaattaaatagggtggatatcaaaaatgatgttggtcgatatgttaggttctttaagagaatgcaatgccaggctcaatatcgacgtagttatgaagcggtgtgtattttaaatggccgttagtatcatgtataaacggactattggaactcaacttttaaaattgatatagtataatataaaggaaatttagaggacgtgacgtttcgatatttgaataactgtattaaggaatatcgaaactttaaaatatctacgcaatttaggataaaaaatcaacattgagtgaaagccaacttagtcgaagcatctcaataaagcgtaagacactcgagttcccccacacccctataaacaaaataactatggtacatatgagaaaggatgagtcgcttgatacgtatgagtgtattagcaagtggtagtacaggtaacgccacttacgtagaaagtgagaaaggtagcctactcgtcgatgtaggtttaactggcaagaagatggaagaacttttcagccaaatcgacagaaacattaaggatttaaacggaattttagtgacacatgaacacatcgaccatattaaaggtcttggtgttttagcacgtaaatataaacttccgatttacgcgaatgagaatacatggaaagcgatagagaagaaagatagccgcattccaatggatcagaaatttatctttaatccatatgaaacgaaatctcttgcaggatttgatatagaatcatttaacgtgtcacatgacgcgattgatccacaattctacatcttccacaataactataagaaatttacgatgataactgacactggttacgtttcagatcgtatgaaaggtatgattcaaggtagtgatgtctttatgtttgaaagtaatcacgatgtcgatatgtt

SEQ ID NO: 3671 - DNA, 3566 bp, Artificial Sequence
  Description of Artificial Sequence: synthetic nucleic acid sequence
tatattatccggtattagctccggtttcccgaagttatcccagtcttataggtaggttatccacgtgttactcacccgtccgccgctaacgtcagagaagcaagctcctcgtctgttcgctcgacttgcatgtattaggcacgccgccagcgttcatcctgagccaggatcaaactctccataaaaattatgatgtttgattagctcataaatactaaatagtttgtaacgtttcgttactgtttattggaattaacgttgacatattgtcattcagttttcaatgttcattttcttaccgacaagaattaattatactcttcatggttgtttaagtcaacaactttttgaaattaattttagtcgtttgtttaatgattcgttaagttgtttcgctcaacaaataaacactatacagacttattctcgttttaacaacagtaaaaattacactatcaaaaacaattcaaattactccggaggaaaaaccgaactttttttgtatgaaatttaattataaacgtgttatacagaaaaatggttgctaaaataaaacttaaacgcctatacaaaccctattcacaaactttatttttgttgttcattttaaaatatttttactattttactataatccttgttttttattccaaatactttacatcatccttgggtaaagaaggattgattcttatcctcattaataataaatgtaattataaaagcctttccgtgaactcaataagtctgaattctaaaaagcgaaacagaaatcttatcatattcttctttgtttcaatccattaccgaaccccaacttgctttgtctgttgaatttctcagtgaaattctctatgttgggaagattcatatataagcgtgttcaatcttcttctatttaaatgtaaataaagtctagaatatagacttatatcccagactttaaaatagtagatattattacatttccgttctacctgcaattgctttagataaagtcacttcatcagcatattctaaatcgccgcctacagataaaccttgtgccagtcttgtgactttaatcccaattggtttaaccaacctagatatatacattgcagtagactcgccttctaggttaggattcatagctaatataagctctttcacctcatcgtttttgaggcgttcaactaatgcaggtatattgatgtcttcaggcccaataccatccattggtgaaatcgaaccatgaagcacgtgatataaacctttatattcacgcattttttccattgctatgacatccttgtcatcttcaactacacatatgacagaacgatctcgctgtttatcttcacatatataacaaggatcattttctgtaatatgcccacaaacactacaataggtaagttctcttttaacatcaactagtgctttagcaaacttaacaacatcgtcttctttcatatctaaagtatgaaaagccagacgttgagccgtctttggtccaatgcctggcagtttcataaaactatcgataagctttgatataggttctggataatgcatatttcatcacattccagggatgtttaagccttgagtatgcttacctaaacgttgttgtgttaactcatctgctttattcatcgcttcatttgtagccgccaatactaaatcttgaagcatctcaatatcttctggatcaacagcttcttctttaatttctacatccacaacttctttatgacctgttacagtaacagtcaccatacctccgcctgctgttccagcaacgcgttcttcttttaatttctcttgttcttgagccattttcttttgcattttctgcatttgtttcatcatttgttgcatatttccgccaccgcgcataatttcatttcctccttaatagtaaacaatttctataaaaatttagcttttattacattatacataccaagatatcgcttgtcatgtatcagtcttcatcaactaagtgtacagtttcctcaccaaataagtctttagctttttgagcaatatctatttgttgagactgttgtgtgctttgtttttcgctttgatgtgtttcattggtgttacgattttgtaagtactctgctctcactctcagccattggtcagccggcactccaactactttgacagttttattaactatattacaaactacactttcaatattgtttctcttttcatcatctttatttactatttcacaatgaatttcttcatcaaatttaactaacacatgatcttcactagctgctactggttctgaattcagtagcaaacttactaaagactttttatcattactttttgcatgatcaatcacttcttgccaatggttcttcaacaatttgatatcatctttgtttgctttgtctaatactttcgctatttgttgcatagaaaacgtatttttagatcgttgaatcgtacgtgttggtttcttaggttgttgactaactttattagttttgatcccttgttcttttaaggttttaagctcattttcaagttgttctaaacgttgtaataacatctcattatctggttcattagctaccgatgctgttgctacattttgtacagtttgaggctgtgtcttaatcatttctgcaagtttaactagcaacacttcaaaatgaacactttgatttacactgaacctaatggatactagtgtatcattgatgatatctatcatcctgtataacatatctaagtcgaaatgaataagtgattcaaaatgaacggattcgttagacgttttattcataattgtatctctaacaaagtaaatcatatcattaatgagtctgttgacttctttaccttctgaaataaaatgatgatatctattaaatgcggctttaacatcactttttacaatgtcattaaataactcatttaatgccgcttcatcaacactacctgtaacatttaaagcatcttgtaaagtaagtcgttcgtctccaaacgctattgcttgatccataatgcttaatgcatctcgcataccaccttctgatgctttagcaataaattctaatgctgcgtcatcgtaatccaaagattgagaattagctacatacttaagtctatctataatttggtcactgctaattgctttaaagtcaaatcgttgcgctctcgaaataatagtgggtggaattttatgtggttctgttgttgccaagataaatatagcatgcgctggtggttcttctaatgttttaagcaaagcattgaaagcaccagtagttaacatatgaacctcatcaataatatatactttatacttagattcactaggtgcgtacttaactttatctctaatattccttatttcatctacaccgttattacttgcagcatcaatttcaattacatcgttattcgtaccttgtgtgattcctttacaaatcgcacattcattacaaggttcaccatcgtcactattaagacaattaatagctttggcaaaaacctttgcaatactagttttacccgtacctctcggaccactaaaaatatatgcatgggat

SEQ ID NO: 3672 - DNA, 3230 bp, Artificial Sequence
  Description of Artificial Sequence: synthetic nucleic acid sequence
aaatattttaattgtagaagatgagcaaaatcttgctagatttatagagcttgagttaactcatgaaaattatactgttgatatagagaatgatggaaaggtgggtttggataaagcattatctaagccctatgatttatatattttagacttaatgcttccaaacataaatggtctagaaatttgtagacaaattcgtcaaaaaacaactactccaattatcatcattactgcaaaaagcgagacatatgataaagtagctgggttggactatggggcagatgactacattgtaaaaccctttgatatagaagaattgctcgcaagaataagagcggtattgcgcagacagccagataaagatgttttagatatcaatggtattatcattgataaagatgcctttaaagttactgttaatggccatcaattagaattaactaaaacagaatacgatttattatatgttttagctgaaaatcgtaaccacgtcatgcagcgtgaacaaattctcgatcacgtatgggggtataatagtgaagtagaaacgaatgtcgttgatgtttacattcgttatttacgtaataaactcaaaccttttaataaagaaaaatccatagaaacagtacgtggcgtagggtatgtgattcgatgattaagcgccaaaaattaaaatataaatggatgcttattacgacgctcattaccttcacgacaatattacttttctgcttaattattattttctttttaaaagatactttacgaagtagtgaaattgacgaagctgaaagaagttcaaatgatatcgccaatctgttccattctaaatctttaagtgatatatctgcattggatttaaatgcatccttagaaaattttcaagaaatactgatctatgatgataacggtagaaagttaattcaaacatcaaatgataatacacttgcttatgataacaaaattgatttcaaacatcctgaacgtatacatattcaaagaagccacggtattaattacttagtaataactgaacctatacgttcgaaagatttttctggatacagtgtattagtccattctcttcaaaattatgataatctcgttaaatcactttatatcgttgcacttgcttttggattaattgcaaccattattactgccggcgtgagttatatcttttcttcgcaaattactaaaccgatagttacaatgtccaataaaatgaatcaaattagaagagatggttttcaaaataaacttgaattaactacaaattatgaagaaacagataatttaattgatacttttaatgaaatgatgtatcaaatagaagaatcttttaatcagcaacgtcaatttgtcgaggatgcttcacacgaattaagaacgccactgcagattattcaaggtcatctaaatttaatccaacgttgggggaaaaaagatccagcagttttggaagaatctttgaatatttcaattgaagaagtgaatcgaataacaaaacttgtcgaagaactacttttacttaccaaagatagagtcaatcataatgttttggaatgtgaaaatgtagacgtaaatagcgagattcaatcacgtgtgaagtcactgcaacacctacatccagattatacttttgaaacacatcttgctactaagcctatccaattaaaaattaaccgtcatcagtttgaacaactcttactcatatttattgataatgcaatgaaatacgacactgaacataagcacattaaaattgttactcaactaaaaaataaaatgattatgattgatattactgatcatggtatgggtataccaaaagctgacttagaatttatctttgatagattttatcgtgtagataaatcacgtgctcgtagtcaaggaggcaatggattaggactatcaatagcagaaaaaattgtgcaacttaacggtggtatgattcaagtagaaagtgaactacaaaagtacacgactttcaaaatcagttttccagtactaaactaaatgaatagtattttttaagtaacgaatgattacgattaaacaagttacaaataaattattacagggcttaaatattaacaatccttaaactagtactataaatgattaaatccattgacacctatcattataaataaagattccagtcactacactaagatgctgacttgaatagctatatcatgtcatactaatgagaggagaccttcttcacaaaggttctcttactatagaatcgacgagctaaacttgatagacggagatagcaattatacgggagcgagactatgaatttggagtaaattctgtcttgctcctattttgtataataataggtaaatgtactttaacaatatatgaaataatgctatgataaccatgtaagcgtttcatcatttttgtggaggtcagatatagtcacattactcatatcttagggttacttgagttctgccacagtgacaccaaatccaccttcactaggcatacctcctctaaattgtctaacgcttttatgttttttcaaatgttgttgaacacctttttgaagtgctcccgtacctttaccatgaataatataaacttgttcgtaattgcttaaaaccgcctgatcaagatattgatctaattcatttaaagcttcttcgtaacgatatcctcttaaatcaagttctgttttaatagtttgtctattttgtcttgttaccatttttgtaggtttttcttttttctttttcgttttttctaaatcttcaataggtaatttcattttaataattcccatttgtacaactgcttcttcgttacctacaagttcaagcacttcacctttttgaccgtaagatagaactttcacttcatctccagcatgaatcgtatcatattttttcttttgaacatgttgcttaattgattttgcctcatattgatcatcaagttgtttctttttatcaattaattcatgttcctttacttcagcgcccttataatctcttagatttctaagttctttaagaatttcgtccgcttctttagtcgcagatttcacacgctgattggctttttctttagcttcctccatcaaagatttctcataattttgatactgttgatattgtttagacaaggcatcgtgagtttcctgtgcttctctcacaagtctatctaattctattcgttgttggtcaacacgttttgaattgtgtttc

SEQ ID NO: 3673 - DNA, 3181 bp, Artificial Sequence
  Description of Artificial Sequence: synthetic nucleic acid sequence
cagtatttcctttaaatactataagacaaatgataacaggtatcactgctaaagaccgagtgataagacgacgtaaccaatttggaatggataatttaagaaatccttccatcacaatttggcctgctaacgttcccgttatagttgaattttgaccagaagctaaaagggcaacagcaaataaagtactcataataccgccaagcgttgcacctaaagcaggttctgtttttagagccaaataaagatcataaaaaccacccaaatcttcagttttagttccaaaaaatagcgctgcaccaagtgtaagtaataagcaattgactacaaaagcgatggatagctgtatattagagtcgatagtagcatacttaatcgcttgtgctttttcatgaatactgtgtctatcatattttcgagattgtacaatagaagaatgtaaatataagttatgtggcataatagtagcacctatgatacctagtgcaatataaagtatcccttggtttgtaataatttctttatgaggcacaaaaccattaagcatatctgttatttgtggagaagaaatataaacttcaaatacaaaaatggccaatacggtaaagattaacgttcccacgatagcttcaatctttctaaagccaaatttcatgatgaataataataaaaatacatcaaatacagtgattaatgcgcctacaattaatggtatgccgaagattaaatctaatgcgatagcgctacctataacttctgcaatatcagtagcgataattgctaattctgcaataatccagaacataattgctacaggcttatttaaaaaatgacgtgtcatttgtgctaaatccataccagttgctattcctaatctcacagtcatactttgtaacagcatagcagataagctagagattaagattatgaataacaaggtatagccatattgtgctcctccttgcatggatgtaatccaatttccaggatccatgtaaccaactgcaacaagcaatcccggtcctaaaaaagccagaaatttttgacttgcactatcattatgattgaagtttatggtgttattgatttcatctaaacttcgttgttgttcatgattgttattattggaattcaataaaatcacccccattaatatatgagaatatattaacctaaataaaatattaggtcaacctaaaaatattaagacgacaaaaatgcttgaatgacttttcataattcaaatcactcaagcattttatatttattgataaaattttaaaaattcatcaaaagtttcctcaacaaattttagaaaagacttatcagattttaatcttttatcggttggtgataatgttctggcaacaaaaaattcaccttttttaacatttttaactctatcgatagcagcatgcaactcttcattactcatatccttgatatagtgcttttcagttttcatatgatctagagaaacactataatcacttggtaaagatgtcagtttatcaaaatgtttatcaaatattttcactttttcttctttatttctaccttcgtgcatgataccgaacataatgaaaagctgatttctaaacaatccgatttgaaagtgtggtaacattttataaccacgtttattaggagcaaaagctacccacgtatcgataggtggattgacacttctacgtgcgtgtttagctacgtgagcataaaaagtttcacctgtttgtgtagtgaaatattcttcaaaataagatcctaattgatgaagttgaggtctgacatagtcattaagtgcttccattctttggtctaaaccttcgacttcaaaagctttaaaatctttaggtgaaaaagtatattgggtcataatatgcctccttttaatatgattatggatattgtagcataaacttttaaagtttatctaaaataaggatggttattctcttgttttacgaagtctttttaaaggtaaaatagtgtgaattcatataaatttacatagttcttcatgtataatatgtagtaataggagatgatacgatggctttatatgattttgcaaaagggttgatactagaagcaggaaataaagtaaggttgatgatgcaagaagagttagacattaaaactaaatcgaacccaaatgatttagttacaaatgtggataaggcgacagagaattatctatatgaaacgattcttcataattatccagatcatcaggttattggcgaagagggacatggtcataatctcgagtatttaaagggggttatttgggttattgatccaattgatggaacacttaattttgttcaccaaaaagaaaattttgccatctctattggtatttatcatgatgggaagccttatgcaggttttgtttatgatgtcatgaaagatgttttatatcatgcaaaggttggacagggtgcatttgaaaatacacataaacttgaaatgattcaaaatactgaacttaaaagaagtattataggtattaatcccaattggctgacgaaaccaatactcagtgatatttttagttcaatagtgaatgaggcaagaagtgcacgagcatatggtagtgcagcattagaaattataagtgtagcgaagggtcaattggcggcttacctaacacctagactacaaccgtgggattttgcaggtggattgttgattttgaacgaagtaggtgggataggaaccaacttattaggcgataaattagacttcaatcaaccgaattcaatattaatagcaaatcctagccttcatcgtgaaatattaaatcatcatttaaatcagcaaagagatacgcttattacacttcatgaaaaaaggtttggaaagagatagaaagatggaatcaatagagttaaagatttcaaatttctttgttcttcaaaccttaatttgaagaacgtcttataaggagtttagaatcactaaaagtttggatctgaaatcaaaattcactaattatttatctatatttatctcgaatgtagtacataccttttaatcctactttaattaatcatattttttaaaaagtcgaacaatggatggataagccaagccacaccacctcctccaacaaatatacctgtagcttttaaaataaactctttattttctttacctttctcttttgcttcttgtt

SEQ ID NO: 3674 - DNA, 3058 bp, Artificial Sequence
  Description of Artificial Sequence: synthetic nucleic acid sequence
atttctaggtacacggataccagcatatcttgaaattaagtcagatgttttcttagtttcttcaaggttaatttgagattcaagaccatagtggtccttccttacatataaagccaaagcgacttcttcaagtgaggcatttcctgctctttcaccaataccgttcacggtaccttcaatacgtctagctccaccttcaatagctgctaaactattagcaactgccattccgagatcatcatgacaatgtgcactaaagataattttagaatttgacttaacggcctgtgttaattgtttaaaaatttcgccatactctgtaggataactaaatccaactgtatcagggatgttgataattgtggctcctgcgttaatcgcagtttgaacacattcaattaaaaatggaatttcagttcttgttgcatcctctggagagaattgtacgacttcaaaaaattgttttgcataagaaacgtgttcttttattgatgttaaaacttcatcttgagtcatttttaatttatgttctaaatgaataggggaggttgcaatgaatacatgtacttgaggttttacagcttctttagtggcttcatatacagcatcaatatcagattttttacatctagctaaaccacacactgctgttgtagtcaaagttttagctatagcttctactgatttaaagctaccagtactagaagcaggaaaacctgcttctagtacatctactccccatttttctagttgcttggcaatttttaatctttcatcaaaagtaaaattgactcctggcgtttgttcaccatctctaagtgttgtatcaaaaatttgaatatgttcttccattaaaaacacccctctactgttgttatttttcaatacttttagatttaatgaatggcatcatttctcttaattcacgtccaacttgttcaatttgatgaccatgttgatcttcacgtaattgatagaattctttaaagccatttttgttatcttcaacaaatctacggctaaagttaccattttgaatatcttcaagtacttttttcatattttctttaacattaggtgtaattactcttggtccagaaacatagtcgccaaattcagcagtgttagagatagaataacggacattttccattccgccttcatacattaaatcaacaattaatttcatttcgtgtaagacttcaaaataagctaattcaggttggtaacctgcttccacaagtgtttcgaatccactctgaatcatctctgatatcagctgcacgttctttcatgtattcattatccattgactcaaaaatagaaataaattgtgtcgttacttcatccaaaccagttgcagcattgactttgtcatttctaattttgtcttgaatgggttgtattaattctggatcatctaaaacaagtaaatgtgcatcaaaaatcgctgctttatcagcacctaattgagcttcggcattatttcttattttagttaattcgatttttgaagcttcgatagcgtcattaaacttttcaacttcactttctatgtcagtaactttttcgttactgtcataggataagtctggctctacaattaagtaagcttttgcgattgccacaccatctgatgcagcaatccctttaattaatttagacataattattcagctaaaccttcttttgataagacatcagtgatagattgaattgcgtcagtttcatcgctaccgtcagcataaatagttatttcagcatctttacctacacctaagctcattacacccatgattgattttaaattaactttcttcccgttatattctaattgaatatctgaatcaaattttgatgcagtttgtactagcattgtagcagggcgagcatgaatccctgtttcgtctgtgattacatatgatttttgttccatattaaactctcctttgtacagttagaatcttcaatattattacaatctaacaaaatatttacaacttaactttaccaaaacctatagctaaattcaattcgtttaaaatcgttttcaacatataaattttgcacctcgagacgattataacacttctataagttattgataactttttcacatttattaatatgatctttacctaatttgctcataaaataatagctaatggatgcagatacagcttgcccaacaaacgggaaccattttgtttgtttggcagctgctcgtttagctacatctttaatcacaactttaagcaacgcctcagataccttacgtccaataaattgacttccttgaattgccgctgcagacataattctttctttcacttgatcactcaatgaattaacttgatcgtgatctaaaccataaattttatttacatcctctataatatctctcattaatttaagatctactccaaaatcaagtcctggaatagggacaatactagcaccggaggaaagtagcgatttctttttaactagagtttcagctctttctctgcgttgtctaagttcttcctgtgtagttggcaaatcacctttctctttaatttcctctatgttcaataatgagttccctactttatttgtaatattattagttagtttacttctaattcccatataatgacatcctttcaaataaaacttcaacagtgatttatacccatttttatagaaaattaatgttttattgttacaaatactgcttttaaatattttgaaggtttgtagtgaggatgagttttaaaatctttaggtaaccccattacttcatttatttcatatacaatattattttgggctaatgttttctttattacgtttttaaatgccttaagagaaaatgcacttgaattcgtacataatagtaatgtacctcctggcgataaaatgttaagggctccttcaattaataaattataatctttttgaacagagaatgtttttttcttatttctcgcaaagctaggtggatcaataacaattgtatcgtattgatgtccatgtcgtcctgcataattataaaaatcaaacgtatccataacat

SEQ ID NO: 3675 - DNA, 3729 bp, Artificial Sequence
  Description of Artificial Sequence: synthetic nucleic acid sequence
gtaccaagttctatcacaacactctgaccttttttagtataatcttggtacttttgattgattaaatctttaccctcaattaactgtcggccaacttttccatcaatattagcatttggtactttttcactaaagacttgaccgatatctaccattactgaatctcccagcaataatggagacgcttctttaggattaaaatgttgttgtgaagacttatcttgattattttcatctggctttttaggttttgctttctggttcgttttaaaagatttttgtttcgcagcttgttgtttatcatgctctttacccaaactatcataggcaccaaatactatgaatgcagaaggaacaagcaagattaacacaataatcgttcttgaaaatcttgttaaatttttcggtatcaccgtgaatgctttaaatccattttttctaataggtgtttcgataaatttataagatacttcagccatgacaaacataagtatcacttcacaaatatatacaaaccaaggaatctgaccttgtacgaaataactattcataaaaataatgataggatagtgccataaatataaactatacgatctcttacctatataaataaataacttgaaacttagtattttctttaaaacacttgatggatgcacaacgcttgcaatgacaaacagtgttaagaacgagatggcataaaatcctccactatatatccatttatcttgatcactaaccactacaaacaaataaatgagcactgccattccgactatgcctattgcacttatacttgctttagcacctttagatatatcctttctgaaagagaacggtggccaaataaatgctagtaagcatcctaataataacgtttgtaaacgtgtgtcagtcccgaaataaactctagaattgttacctgtatacatatgtatcgttatcattgcagttaatgataataaagagatgattaatagaataatcattgtagttctctttttgaaaaactttaataagcctaaaagtataaatggaaagaatagatagaattgttcttcaatagctaatgaccacaaatgctttaatggcgctacagcaaattgattaaaatagtctacgtcttgtatgatataccaccagttagaaacatagaaaagtgctgctatagcatcatgttttatactaataattaattcgggtttaaatagtaatgtatatattaaaacaaccgtgacaacaaacatcattgctggtattaatcgtttaaatcttctaagccaaaaattaactaaattaatagaattatttctataatactcacttaataataaactagttatgagataaccagaaatgacaaaaaaagtatctactccaaggaatccaccagataaccatttcgtatttaaatgataaatgattatcccaatgactgctatagctctcaaaccatctaaaccaggcaaatagtgcggtttataagttttgttgagacgtctataattgttctcgttcattcaattacactccgtttaatttttaaaatacttgctcttaatattatcacaattacatcctcaattgcattgacatgtcatctttttactttaatattatactttaacaaattaaataggtatacatttattagagcatcttcatataagttgtgtaggcaagcaatttaaatgtatctatatatgatattaaacacaccatttatataaccatatcttttaaataaatacaaacataatatcatttaattttattatattttttcagtctagatgttatattttcactttgttaacatcactttgttatataaatcattttaattagactttcaaataaaaaagagcctagaacacaaagcaatgtgtcctaggctttttaatgtattgcatcgataactaaaattaaaacttacttatatacaaggagtcaattttagtcctcgttgctgagagaacaacgaatgctgtctcactctttctaattatattattagatttggattacataccccaagcagataaaccttgtgctttatatgctttataagcggcattgatttgatcatttactgaaccagttgaaccccaacctggcatagtttggaataatccagcagcacctgaagcattacgtgcatgtaattgaccatttgattctctagcaatgatgtgttcccatgttgaagcagatacaccagtacgtgcagccatttgagcagcagcatatgaacctacagaaccagcagtattaccatttgataatcttactgaactactgtgagagctgtagttatggcttggtgctgagtatgaagtagttgatgtgctgtagctacgactttctgaagaagttggagctgaaacagcttgtacatttgtgttactagattgtgtatttgcacttacttcttggtttgatgatgattctgtgtaatcagcatctgaaccagctacagcgtagctccatgaccattcagaaccatttgaagtgaagttgtattggtatccattgtctacgaaatgaatatcgtaagcaccagcttgaactggtttagcatttaattcttcaggattatgttgtgctaaatctactaagtgtgctttatcaacgtttgtagtttctgaagcgtgtgcttcatgtcctgataaaccgtaacctgcaattcctaaagatactgctaatgtagaagcgataactgtttttttcatgatatataaatcctccagatataatttaaaatttgtttgttttgttatttaaatgttttaaattcgttgtgctatattgaaaatgttttttgttaacttttgacgctacccactataacataaaaatcgcctttgtatattacacgttccttacaaaaggttacaatatcaacattgttttgtaatcttaaaacagatatatttcagtttgtaacatataattccttaatattagtttcatattccaccttaatttaagtaattaccttgtgtttcaagctgaaatactattatattaagttatctgtaaaattacagattgcaatgttgttacataaatgaaataattctaactatttgattctaaatattatcattttttatgaaggtttgcttattttaatgatgttactttttaactcttattctttaataaacaaaatgtaactctatatatcaatttggaactcaaaatatcttttatattaaacgacgttaccattttctatataggtgagttatcattttagactatataatagaagaaacacatcgttctcattcataaacatttcattcattatattaaaaaagagagtgagaccaatgaataatgcttcatccatggtctcactcccgagatttttatttaaaattaatacgtcttaactccccatagtacttcttcacattttctaataattgttttaagtacttcaatccgactcgtttttttatgatctgccggaacaatataccaaggggcatatgaagtgtttgtagattcaatcatatcatgacttgcttctaaatattcatcccatttttctctattacgccaatcttcttcagtaatcttccattgtttatcaggattattttcacggtctttaaaacgcttaagctgctcatctttatctaaacataagaagaattttaatatgattgtaccttcatctgtccacatcttttcaaattgattgatttcatcagatgc

SEQ ID NO: 3676 - DNA, 3295 bp, Artificial Sequence
  Description of Artificial Sequence: synthetic nucleic acid sequence
tgtttgaatcgaatcaacaacaagtaagtcaggtctctcttcttttacagtttgatgtatcacttctaaatcagtttcagctaaaacattaagatgactagaatcttcttctaaacgatcagcgcgcaacttagtttgattaatagattcctcaccagtaatatataaaacattcttattttgtgacagcgcagcacaaatttgtagcaataaagtcgacttaccaatacctgggtctccacctattagtactaacgaaccacttacaatacctccacctaaaacacggttaaattcctttgattctgtaagtaatctaggggtagcttcatgcttaacactatttaacttttgtaccttacctgctgtttcttttgtttttacaccatgtttaggatgagcaaccttttctactatttcttccatttgattccacgcaccgcagttagggcacttgcccatccacttaggagattgatagccacatgccatacattcgaatattacttttttcttggccattgagacacctccgatttaatatgaacaaatctattttaaactgacaagttgaatctgacaaattaaaattaaataatgatgttgataacacttataagtctataaccctttcataatatttctataatgaacctataacattcatcatatgcttatctgtttaaacattctggcaattatactaatgatgattcagcaaaaatataagtaaaattttaaattgatttacctcattcattgtttattattatatatttaagtgattatcttagtatagaaaatgcctgagacaatgattgtcccaggcattttatttattggcaattgacaaccgagttgaacttgggctaatctcaattttcaactctagtcctcattaccaagtgagacagcgaattacttacgctttctatctcactcttcttaatttaatatttaacgttataattgtagtaactcaatatgcgaaattaaagttataataatttaattatgattctgttgtttcttttttagctgtaatttcataaatatcatacttaaattctttaccatcatgatcaattgttacttctttaccttcaattttatttccatctaaaatcaattcgcttaaattatcttcaaccgttttttgaattgctctaatgagtggtctagcaccatattcaggatcatatccttcttctgcaattttttctttcgctttatcagtaacaacaatattaatattttgctctgaaagacggtgagtaagtttatttaccatcattgtaacaatttcttttaattcatcttttgtaagtttgtggaagacaataatgtcatcaacacggtttaagaattctggtcggaatgaattttttaattctttcatcattgtttttctgacagtttcgtagtcactaccttctgaagcacctccaaaaccagcaaagcgttggtcctgtaattcttgagctcccacattagaagtcataataatcacagtattacggaagtccacagtacgacctttagtatctgttaaatgaccatcatctaaaacttgtagaagaatattaaatacgtcaggatgtgctttctcaatttcatcaaataaaatcacagagtatggtttacgtctaactttttcagtcaattgaccgccgtcatcatgtcctacatatcctggaggtgcaccaactaatcgactgacagcatgtttctccataaattcactcatatctacgcgaatcattgcatcgtcttcaccaaacatagattcagctaaagcacgagccaattcagttttacccacacctgtaggtcctaagaaaataaaactaccgattggacgttttggatctttaagaccagcacgagctcttctaacagctttactaattgaattgacagcatcgttttgtccaatgacacgtttatgaagtgtatcttcaagattcaataaacgatctgattcagtttcattaattttagttaaaggaatacctgtccaaccagctattacttcagcgatattttcttcagataaggcagtatctaaaccaccttgtgcatttttccattcatttttagcatcttcatattgcttttcaagtttagattgcttatctcttaaattagcggcattttcaaattcttgagcatgaactgcagcatctttttcattttttactttatcaatttcttgttcaatctcttttaaattacttggcgttgtatgacttttaagtctaacttttgaacttgcctcatcaattaagtcaatggctttatctggcaagaaacgatctgaaacatagcgatcactcaatttagcagccgcttctaaagcttcatctgagatattaattctgtgatgagcctcataacggtcacgtaatccttttaagatttcaatcgtgtcttcaactgtaggttcatccacttgaattggttgaaaacgacgttctaatgcagcgtctttttctatatttttacgatattcatctaatgttgtggcacctatacattgcaattctccacgagctaaagcaggttttaaaatattagatgcatcaattgctccttctgcgccaccagcgccaactaaagtatgaagttcatcgataaatagaataacattaccagcttgatggatttcctccataacttttttcaatctttcttcaaattcaccacgatatttagtgccagctacgactgtacccatatctaatgacattacacgtttgtcttttaaagtttctggtacttcatttttaacaattgcttgcgcaagcccttcagcaattgctgttttaccaacaccgggttcaccaattagcacaggattatttttagtacgacgacttaaaacttcaattacacgagtaatttctttatctcgtcctacgactggatctaacgttccatctttagcaataacagttaaatctctagctaatccatctaaagtaggcgtgttattagacttattagcttgcgcatttttattactcatttctggacttcctaaagcttttacaacttgggcacgtgctttagtaatatttaaatctaggtttgcaaatacacgtgctgcaacaccttcattttctctaattaaacctaatagtatatgctctgttcctacaaagttatgatgtagctttcgagcttcatccatagacagttcaattactttttttgctctcggtgtataatgtagtgtgcccatttgctcttgaccgtgaccgataagtttttcaacttcttcgatgactttatc

SEQ ID NO: 3677 - DNA, 1492 bp, Artificial Sequence
  Description of Artificial Sequence: synthetic nucleic acid sequence
agtattctaatggattccctttattatcaaacatgacagtcatactataccgcttcttatccggtagtatctgtaaccatttataattgtcatctgcaactattatgttttgtccaactaccgtcacctctaaaggctcacgaacctttttcatcgtgaccaagcctataatacctttaaatctattattattaactttaacctctgtatattctctctctaccaggcgacgccagtgacgtttgtctatatattttactttcacagtcaccaactccttgcttttattatattaaactaggatgtcaatgtcatcttaagtctcagataaatactgtttacataaatgttcttattaaatcattaagactattttactataaattgatttattttacttaaaatagatagaaatactaggttttaacacataaatattgaaatttaaaaatgtgaacataaaaataagcaacgagtgacagagtcataaacactgttgctcgttgcttgataaaataccaattttattaatggtaaaacaatcattaaaattctattgcgcttgatgttgttttttcttaatagttaaatactttaatcctaatgcaaataaaccataacctaaaatgccttgcattaatgttttgcataaagatttattcgttgttaagcgattagaaataaatgtgcttactaaatatagaaaaaacactttaacatatcttggattcattttcattatattaccttctttaaaactatacttgaacacttaaacgaggaataaatgtttcaaaatgaacatgattcatatcataatttaattctttaagagaatttataattgaatgtaagaatttcgtaccaccacaaatataaatttcaggctgttcacttaaatattgttctaattctttagcttctaaataaccttctttatctttcacgtgtaaatgtagctgtgcttgctcataattatctgtaatgctatcaagtttttgagcaaatggtcgttcatcttctgtcacaaccgcttgaatcatttgagttggaacgtttaatgatgcagcttttttaaacattgaaactaatggtgtcatacctacgccagaaccaataaacaattgcggtctttcagtattttctattgaaaagccacctacaggagcagataaattaatcatgtcaccttctgatatttcatcatgtaaaattgttgaaacttcaccttcatgttcagtagtcacatcacgtttgacaccaaatactaagtgattttcatctccatctatgattgaataatgacgtttagctctatatggtaacttttcactagaaacatctacggtaatgtattgacctggttcgaattgacttaaatcatattcttcagattcaactgtgaaagatttgatgtcacttgtttcttgtgtaatgtttgtgattttaaatggtttaaaacctttccataacatatggttgtaaatttctt

SEQ ID NO: 3678 - DNA, 3683 bp, Artificial Sequence
  Description of Artificial Sequence: synthetic nucleic acid sequence
gatatcactattcattacagtaatactaggattcttcattgcacgaacgattactaagccgataaccgatatgcgtaaccaaaccgttgagatgtctaaaggtaactacacgcaacgagtgaagatatacggtaacgatgaaatcggtgagctcgcacttgccttcaataacttatcgaaacgtgtccaagaagcacaagcgaatacagaaagtgagaaacgtcgcctagattctgttatcacacatatgagcgatggtattcttgcgacagatcgccgtggacgtgtacgtattgcaaacgacatggcgctgaaaatgctcggtctcgcgaaagaagatgtcatcggctactacatgcttggtgtccttaacttagaaaatgaattctcattagaagaaattcaagaaaatagtgattccttcttgttagatattaacgaagaagaaggcattattgcacgtgtaaactttagtacgattgtacaagaaacaggtttcgtgacaggttacattgccgtactacatgatgtcacagaacaacaacaagtcgaacgtgaacgtcgcgaattcgttgcgaatgtttcacatgaattacgtacaccactgacatcgatgaatagctatatcgaagcacttgaagaaggtgcttggcaagataaagaactggcaccatcattcctatctgtcacacgcgaagagactgaacgtatgattcgtttagtgaatgatttacttcaattatctaaaatggataatgaatcagatcaaattacgaaagaaattatcgacttcaatatgtttatcaacaaaattattaaccgtcatgaaatgacagcgaaagatacgacattcgtacgcgaaattccgcaacaaaccatctttgctgaaatcgatccagacaagatgacacaagtatttgataatgtcattaccaatgcaatgaaatattcacgtggcgagaaacgtgttgagtttcatgtgaaacaaaatgcactttacaatagaatgacgattcgtattaaagataatggtattggaataccgattaacaaggtagataaaatatttgatagattctatcgtgtagataaagcacgtacacgtaagatgggtggtacaggactaggtctagctatttccaaagagattgtcgaagcacataacggtcgaatttgggctaacagtgtggaaggacaaggtacgtcaatctttattacacttccttgcgaaatcattgaagacggtgattgggatgaataacaaagaacatactaaatcaattattttagtcctactcgtcttgatgagtatcgttttgacatacatggtctggaacttttctccagacctttcaaatattgataacacggataatagtaaaagtgataagcctaaaccacttactaaaccaatgactgcagaaatggaaggaacgattacaccatttcaaatcgtgcattctagagatgaaaaatctcaaggaacagtggcatcaggtgcagtcttagacaagatgattcaacctttaaaaaatcaagaagttaaatctgtatcacatctgaaaagggaacataaccttgttatacctgaactaagcaacgactttatcgtcctagatttcacttatgatttgccactttcaacatacttaagtcaagtactcgatatcgatgcgaaagtgccgaataactttaattttgatcgcctccttatcgatcaagatcataataaccacgtcgtactatatgcgattagcaaagaccgtcatgaagtagttaaacttaagacaacgatgaaagggaataacgttgacaaagcttttaaaagtatcgaacctgacatgcaaccctatacggaaatcatcacgaataaagatacaatcgacaaagcaacacacgtgtttgcaccaagcaaaccgaaagacttaaagacgtatcgcatggtcttcaatacgatcagtgttgaacgcatgaactcaatactatttgatgattcaacgattgttcgtagctctcaaagtggtacgacaacatacaacaacaatactggtgtcgccaactataacgataaagatgaaatgtatcattataagaatttatctgaagacgcgaaaagttcaagcaacatgcaagaaaccatcccaggcacatacgagtttataaatagtcatggtggcttcttaaatgaagattatcgcctatttaagacagataatagaacggggaaactcacatatcaaagattcctcaacggtcacccaacgtttaataaacataacttcaatgaaatccaagtcacatggggggataaaggcgtttacgattatcaacgttcgctacttaagacggacgtcacactgaacagtgaagaatctaaatccgtccctaccgttgagtccgtgcgttctgcattagccaaccatcctgatattgattttgaaaaggtaacgaacattgcgattggttatgatatggacgacaaggcaaataacgaagatattgaagttcaacgtaactgtgaattaataccacgttggtttgtagaatacgatggcaattggtatgcctataaagatgggaggcttgaataaatgaactggaaactcacgaaaacacttttcattttcgtttttattcttgtgaacatctttttagtcatcgtttatattgataaagtgaataaatcacaagttaatgactcggaaaaggtaaacgaggtcaattttcaacaagaagaaattgacgtgcccaaggatgtcttgaatcaaaatgttaaagatactgaacttgaacaaattactgcccgttcaaagaatttctcaagttatgcgaaagatcattcaagcatgcaaacgtctgattccgacaaaacacttgaaggagatattgataaaggcgttcaagtgagtgataagaacttacaagatatcaaagagtacattgcaaagaaaatctttaacggtaaagagtatcagttaagtgatttaactaaagataaagtcacttacgaacaaacgtataaagattatccgattatgaataatagtaaagcgcgcctaacgtttaatttgagcgatggcaaggcgacaagctataaacagacagcgatggatgatatacaagtagctaaaggttcaaatagcacgaagaaacaagtcatcacgccgcgtaaagctattgaagccctttattacaatagatatttaaaacaaaatgatcaagttcttgatgcacgcctaggctattattcagttgtaaaggaaacaaacgttcaattactccaacctaactgggaaattaaagtaaaacataaaggcaaggatgaagttcaaacctattatgtagaagctacaaatcataatccgaaagtgattgattattagaggttattgatgcgtggcgtatcgtttgaatgaaaccgtcaagcgatagcatagaaggttacgttaatttgtactgtctagagcaaactttggcgtacttgtgttggaagtcatttatcgaaccaacgacatgtgatgggttacggattgattatgaagctatataagataatataaactaagcctgagacaccgatgagtaatctcaggcttttttacgtattgaaagtgattgagtaattaaatagggtggatatcaaaaatgatgttggtcgatatgttaggttctttaagagaatg

SEQ ID NO: 3679 - DNA, 3043 bp, Artificial Sequence
  Description of Artificial Sequence: synthetic nucleic acid sequence
aaacaattaaaattccactgattcacccggtttaagaatttgtacttcccctacctgaactgcatccttaaattgctctggatcttgttcaattaacgggaatgtattgtaatgaataggaacactgattgtaggcttaataaattcattaatagcgtaactagcatcttctattcccatagtaaagttatctccaataggaacaaaacatacatcaactgggtgtctatctgctatcagtttcatatcactaaataatcctgtatccccagtatgatagatagtcttgccttcagcttcgacaataattcccataggcatacctaaatatacaggcacaccattgtcatgtgtaaagctagaactatggaatgcttgaacaaatttgactgttccaaaatcaaatttagccttcccaccaatgttcatgccatgaacattttcgactccgtgataagtagataaatatccttgtaattctgccgaaccaatcacagttgcatgattacgattagccaattcaactacatcaccaaaatggtcagcgtgaccatgtgttaagataatgtaatctacctctaacgtttgttcatctaggtcacatttatcgttgccagagataaatggatcaactataactttcttgccgttaccttcaaaataaattgttgattgaccatgaaatgaaagtttcataagagttaccctcctaaaagtaatatcttttaatagtataccctaccagtcacatttataacactagtgagctatttagcttgttaagttcaatcaataacccttactttttgaaaactatatcttattagcatagaattaatatatcatcacatgatggaggttcattatatgactaaaataaaagaaatcaaaaaagttttacaacaagaagatgctgatgcagcatggattacgacacccttaaacatcttttactttactgggtatcgaagtgagccacatgaaagactcttcgctttgcttattccatcaaatgaagagcctgttttattttgtccaaaaatggaagttgaagaagtaaaacaatcaccgtttaaaggtaaaatcatcggttatttagatactgaaaacccattcgacaaatactctaaaactttctctaaaatgctcattgaaagtgaacatcttacagttaaacgtcaaagagaactaacaaaagcctttaatatagaacactatcaagatgttgatcaatcaatcaaggacttacgcaatatcaaatcagaagatgaaattatcaatataaaaaaagcagctgcgttagctgataaatgtattgaaattggtaaatcctttcttaaagaaggtgttgaagaaagagaagttgtcaaccatatcgaaaacgaaataaaaaaatatggtgttaatgaaatgagtttcgacacgatggtactcttcggtgaccatgctgcttcaccacatggaacacccggtgacagaaaattacagcaaaatgagtttgtactatttgatttaggtgttgtataccatcattattgcagtgatatgacacgcacaattcattttggcacacctaataaggaagcacaaaatatatataacattgttttaaaagcagaaacagaagcaattaaatctattaaaccaggagttaccatcaaagatattgataaaattgctagagatatcatcgaagaagcaggttatggtgattacttcccacatagactaggtcatggattaggtcttgaagaacacgaatatcaagatatatcaagtgtaaataataatcaacttgaagcaggcatggtgattactatagagcctggcatatatgtccctcatgtggctggtgttagaattgaagatgatattttagtaactgaaaatggttatgaaatattaactcaatacgaaaaataacaaaacaacaaaaaaccccaagctccattcacatgaatgaagtcttggggtaaatttcacgcattatttcaatgcatcttcaattgaagtgtattcaaaattaaatgtatcagctacattcttattagtcacatgtccattaaatgtattcagacctagagataatggatgatttactttaaatgcttcacgataacctttattagccaataattgcgcataaggtaatgttgcattgttcaatccaattgtagatgtacgtggaacggcacctggcatattagctacagcataatgcacgacaccatgtttagtgtaagtcggattatcatgagtagtaatcttatcagttgtttcaaaaattccaccttgatctatcgcaatatctacaatcactgatccatctttcatttcttttatcatatcttcagtcactaagtttggagctttagcacctggaataaggactgctccaatcactaaatcgctttctttcacatacatttctatatttaatggattagacataattgttcttactctgccatcaaataagtcctctaattcttctaaacgtttaggattaacatctagtattgtcacttcagctcccaatcctaaagctatcttagctgcatttgtacctgcttgaccaccaccaatgatagtgactttgcctttaggtactccaggtatgccacctagtaagatacccatacctccattaaatctttgtaaaaattcagctcccacttgtgtagacattctaccagccacttcactcattggtgttaataacggtaaagaaccgtctggtaattgtacagtttcataggcaatagatataaccttgttgtccacaagtgcctgagttaatttctgttcattcgcaaggtgtaaataagtaaataagattaactcttctttaaagaatttgtattccgattcaagtggttctttaactttgatgaccatatcaacatcccaagcttttgactgctcatcaacaattttggcaccggcttcttgataatcaccatcttcaaagtaagatcctagaccagcatttgtttctactaaaacttcatgtccttggtctacaagtgcatgtacaccactt

SEQ ID NO: 3680 - DNA, 3014 bp, Artificial Sequence
  Description of Artificial Sequence: synthetic nucleic acid sequence
atggaaaagatgcaagatgctattacagctgtagctggttcaaatagtacttctaatcatccaatgcttaaatctagagatattaaaagaagtggttacttagtaatcactagtgataaaggcttagccggtgcctatagtacaaatgttttaaaaagcttagtaaacgatatcaattctaaacccaacgacagtagtgaatatagtctaatcgttttaggtcagcaaggtgtagatttcttcaaacatagaggatatgaaattgaaagttctttagttgaagttccagatcaaccttcatttaaatctattcaatctatagctaaacatgctattgatttatttagcgaggaaaacatagatgaattgactatttattacagtcattatgttagtgtcttagaaaataaacctgcaactaaacaagttttaccattatctcaagaagattcaggtcaaggacatggtcaaatgtcttcatacgaatttgaaccagataaagaatctattttaagcgttattttgccacaatacgttgaaagcttaatctacggtacaatcttagatgcaaaagctagtgaacatgcttcacgtatgacagcaatgagaaatgcttcagataatgcgacagaactaatcgatgatttatcattagaatacaatagagcgagacaagctgcgattactcaacaaattactgaaattgttggtggatcatcagctcttgagtaataataaaaggaggaaatcaacatgggaattggccgtgtaactcaagttatgggtccagtaatagatgttcgttttgaacataacgaagtacctgagataaataatgcattacacatcgaagttcctaaagaagatggagcgcttcaattaacattagaagttgcacttcaactaggtgacgatgtagttcgtacaattgcaatggactcaactgacggcgttcaaagaggaatggaagttaaagatacaggtagagacataagtgtacctgtcggtgacgtaactctaggaagagtgtttaacgtactaggagaaactattgacttagatgaaaaaattgatgattcagtacgacgtgaccctatccatagacaagctccaggattcgacgaattatcaacaaaagtagaaatcttagaaactggtattaaagtagtagacttattagcaccttacataaaaggtggtaaaattggattatttggtggtgccggtgtaggtaaaaccgtactaatccaagaacttattaataacatcgctcaagaacacggtggtatctcagtattcgctggtgttggtgaacgtacacgtgaaggtaatgatctttactatgaaatgagtgacagtggtgttatcaagaaaactgcaatggtctttggtcaaatgaatgagccacctggtgcacgtatgcgtgtagcattatccggattaacaatggccgaatatttccgagatgaagaaggccaagatgtgttattattcattgataacattttcagattcactcaagctggttcagaagtttctgcgttattaggtcgtatgccatcagctgttggttatcaacctacacttgctacagaaatgggtcaattacaagaacgtataagttcaacaaataaaggttcagttacatcaattcaagctgttttcgtaccagccgatgactatactgaccctgcgccagcaacaacgttcgcacacttagattcaacaacaaacttagagcgtaaattaacagaaatgggtatttatccagctgtagacccgcttgcttctacatctagagctttggaaccttcagtagtaggtcaagagcattatgatgtggcacgtgaagttcaatctactttacaaaaatatagagagttacaagatattattgcgattcttggtatggatgaattatcagatgaagataaacaaactgtggaacgagcacgtagaattcaattcttcttatcacaaaacttccacgttgcagaacaatttactggacaaaaaggttcatatgtacctgttaaaacaacagttgcagacttcagagatattttagatggtaagtatgaccatattcctgaagacgcattccgtttagtaggtagcatggaagacgtaattgagaaagcaaaagatatgggtgttgaagtctaataattaggaggtatggataatgaatacacttagactaaatattgtcactcctaatggttctgtctatgaacgtgaagacgttgagatggctgtcttacaaacaacagctggtgaaatggggattatgtatggtcacattccaactgttgctgcattaaaaacaggtcatgtgaaagttaattttcacaacggaaatgaatttattgcagtaagtgatggctttattgaagcaagacaacatcaattatcaattatcgtccaaacggccgaacctgctagtgaaatcgatgttgaaagagctaaattagctaagtcgagagcagaatcacatttagaagaagatgatgataatacagacataaatagagctaaaagagcacttgaacgagcaaataatcgtttacgtgttgcagaattacaataattaaaaaaggttcgatagtatattttaatgactatcgaacctttttttaaattttaaaatgttaaaaagtaatatccatttttataagtatctttattgcctcttttcgtgtacaatgttatacagtaatcttacgaaggagcttaatatggattatcttggtcagttcgcaattgttcatttaatcttacatgttgtttgtatttgcgtagcttattgggctttaaattccataaaattagaccaattttttaaaaagggctacccattacaagttcaagtttgtatgatttttatttctattttactgggtacggcagtcagtaactttatagttgatttattgcaatattcaactcaagtgaaatacttgataaaataactatgtaattgttatttaatttataagttaaatatgatcata

SEQ ID NO: 3681 - DNA, 2989 bp, Artificial Sequence
  Description of Artificial Sequence: synthetic nucleic acid sequence
aaaagaatggcaaatgcctgcttcacatttaatggcatttggagatgcaaataacgataaagatatgttggagcttgccgaacatagttatgttatggctaatagtgaagatcaatcattatttaatatagcgagtcatgtggcaccttccaatgatgaacaaggcgtactatcaacaatcgaaaatgttgttctcggttattccaataaataataaaatggttaaatgtctgaaacgttaacatgtacagacacttaaccatttttttagaaaagtaaagtcttttttattttattcgcaacaataccaagtgatattgtgatgtaatgatataggttaagtaaatcgaaataatgataaataatatcttgattacagtgattactgactttattcgtattagtttaatcgcgtatcacatgtgccagtattaattactgataatgctgcattcaaaccaccctctactaaattttgtactgcttcatcggagaaaaaggcaatatgaggtgtaactaaaatattttcatttctaattaggtctaataatattgggtcgtcaatcgtttgatttgaacaatcaaatgtgaaataattagcttcattttcatatgtgtcaatggcagcacctgataatgtaccattatttactgcttcaattaaatcaggcgtgtttatcacagctcctcttgcggcattgactaaaacggcaccttttttaacatttttaaacatattgttatcaaataaatggaaactatctttattagcgggtacatgtaatgagataatatcagcatctttaattgcatcctctactgtttctttatattctaagaaagataaagaatgattaggatatgcatcataaccaactactctcgcaccaaaaccagcatagattttaccagttgcagcaccaatacgccctgtaccgatgattgctacagtcatattttttactggacgagacataataggggacgcccatgtgaaattatgtgcttgcacacgtttttcaattgttgggaattttcgtacgagttgcagagcgatagataccgaatattcagcaattgtttcaggtgaataactaggtatattcgagataataatttcatgtttttttgcaagttctaagtcatacatatcaaatccagccgtacgttgtgcaatttgtttaataccataggactctaatttagggtaaacttcaggttctaatttaccgaactgcattgttgtaacaccgtcataatcttttaattgatcgacagtatctacacttaaaagttctgttgatgtagtgacatcgatattatttttctttccccaacgtaatgccatgtccttctcatatgctcttgtgccgaaaaacataatttttgtcattaaaaattaccccatttctaaaatttgtaattaataaatagtaaaaacattcacaagtcagtacttatgattttttaattatatgtgatttaattcactaaacaagttacttcataggtcttttaaatttctaaattatactaactatataagtgagctgaagagattagaaatcaattactttagttactttttgaagtcgtatataatttgtatcaacagaagtaaagagaggaaggtatgattatgaatcagatgaatcaaacgattattgatgcattccattttagacatgcgacaaaagaatttgaccctacgaaaaaaattagtgatgaagattttaatacgattttagaaacaggtagattatctccaagttcactaggtttagaaccttggcactttgtagtggttcaaaataaagaattgagagaaaaattgaaagcctatagttggggagcacaaaagcaacttgatacagcaagtcactttgtattaatttttgctcgtaagaatgtgacggctcatacagattacgtgcaacatttacttcgtggcgtcaaaaaatatgaagaaagtacaattccagcagttgaaaataaatttgatgatttccaagaaagtttccatattgccgataatgaacgaacattatatgactgggcgagtaaacaaacatatattgcattagcaaacatgatgacaagtgctgcattactaggtatcgactcatgtccaattgaaggatttgatttagataaagtgactgaaattctttcagatgagggtgttttagatacggaacaatttggtatttcagttatggtaggctttggttacagagcacaagaacctaaacatggcaaagttagacaaaacgaagacgacatcattagttggattgaataaagaaattctatgaaacccagggtataacatggatttatgttaaatatcatagttaactcacgatagtgagaactttaatctagtacgattatacgaatgtaagattaagtgagttatcaataattaatatatataagcaacctgagacttttacttgaagtctcaggttgttttgttgaatataatagaatttttatacgttgaataataaaattcaaagcgggtacaacatacaatagtcgcttttaatgatgatgcaaacagataattttgcattatttacaaaagaggttaaaataggtattacattaagtaaacgcttacattttattagggataagcgattacttcaaatatcactaaaaaaggatgggttttaatgacaaatattaacgtaagaaattatatagatgaaagttacggcttgtttattaacaatgaattccaagctagtgatagtggggaaacattaactgtttctaatccagctaatggtgaagatttagctaaagttgcacgcgctggtaaaaaagatgtagataaagctgttcaagcagctcatgatgcatttgatagttggagtaagatttctaaagaagaacgtgcagattatttattagaaattagtcgacgtattcatgagaaaactgaacatttagcgacggttgaatcactgcaaaatggtaa

SEQ ID NO: 3682 - DNA, 3102 bp, Artificial Sequence
  Description of Artificial Sequence: synthetic nucleic acid sequence
tatcaagaatggtatttaggaaaagctttatttaatcaagttgaatataaaaaagatattcaagattttaagaaaggtttcatttatgatgaggtcattcttaaacctatagaagaaattcaattattacttcaaaatctaatagaagcgggatatcaaattgcgatagcaactggtagacctcgaactgaaacaattattccatttcaatcattgggattaaaatcttattttaaagatgaacatatcgtaacggcaagtgaggtgttgctagcagagaaacaatttcctcaatatcaacctttaggaaaacctaacccgtttagttacatcgctacgttaaatggaaattataatgaccaatatgaacgatatgcgacaaagcaagaagatatcgtaaataaagatgaggtttacatagtaggcgactctttagctgatttattaagtgcgaagaagataggggctacgttcattggtactttaactggtttaaaaggtaaagctgctcactctgaattagttgcaaatggagcagatcatgtagtagaggatataactaagattcgaaaaattctattatagacaaaaaatgacttcagattgtatattaatttcaatctgaggtatttttgttggtttataaaaagacgaaagtagttaatcaaattgttaacttagtgctaataattttgttgaatccgcttgtttcatttaaaatttttataacttcctcacttgcttgttgatcaatagaaagaatcattaaagcatctccaccagcatcgttacgtcctaaagtcattgacgcaatattaattccgtgacttcccaataggttgcctgtttgtcctactataccaggtttatctttatgacatgttactaattgatattggttaggtttaaaatcaagtgagtaatcattaatacgtactattcttgggccaaaacctgcgaataccgttgcgccaattttgattttatcttgatcattaactagttctagctcaatgtaactactaaagccagaatgtttcttttgtttttctatattatacgtgacaccttgttggttaagtattgctaatgcattaataatattgacttcattacctaaatcttctttcaagatgttcgttataattgttcttgtaattaaactagtgtcattttgcgctaagtcaccagcatatttaactttaatttcactcggagcaccatcgagaagctgaatagcaaactcaccaatagttgtacttaaacctataaagctttgagttgttttatcaactttgcttaaatccatttttggagcattcacagcatgctcaacattccctttagttagaatttcaattatttcttcagatacagagactgcaaccttctcttgcgcttctacagtagaggcgccaagatgtggtgtgacaataattttatcatgttgaatgagaggggaatcagtaggaggttcatgttcaaatacgtcaatagctgcacgatctattaagttattatctaatgcttcaataagtgcagtttcatctataataccccctctggcaacatttatgatttgtaagttttgtttagctttgttaaagaaagatgaaccaacaattcctcgagttttaggtgttaatggtgtgtgaactgttacaaagtcggatttttcggcaatttcatcaacagttgcaatttgaatatctaatgacttcgctttatcttctgttaaataaggatcgaacgctaaaattttcataccgaaactctgcgcacgtttagcgacgcccaaaccaatcctaccagcaccgataacacctaaggttttgccataaagttcaacccctctaaatgctttacgattccattctttgttacgtaaagattggtgtgcttgaggaatatttcgtgccattgcaagcaacatagctactgaatgttctgtagcagaaattgtattaccatcaggagcattaattactaaaataccttttaaagtcgctgcttctatattaatattatccacacctacaccagctcttgcaatgaccttcaaatttgttgcagcattaataattcgctctgttacttgggtttgacttcgtacgataagagcatcataagttgaaatcatatttactaaatcattttcagataaatctgtttgtatatctacgtcaaattctggatgttttaaaatactttgtaaaccatcctcagaaattgggtctgatactaatatcttatgactcatgtctaataacctccataaattgagttatccctgttccaatataattgacatttctattagaagttaaaataatttccaatgcagacacgactgctaaaatatcaaaaggagatattttccccatgtgaccaattctcaaaatttgtccttttaagtgtccttgtcccccagcaatagttatattgaattgagatttaagttgatttttaatgatattaagttcttcttgattttttggaacaaatgaggtcacagtaggtgaggcatgagcatcatcttttactaataattctaattcaagtgcctttagtgctgctcttaaggcattacgtattttaaaatggcgtgaaataacgtgatttaatccttctttttttacaagttctacataagcatttattcctctaaatagaccaacattaggggtgaagggcgttgaattttgctcttgtgattttatgtatttatttaaatctaaatagaatctcggtgtttttacatcagcaaatcgtttttttgctctatcgctataagcaacaaatgctagacctggtggtagcatgatagctttttgacttcccgaaactaatacatcgattttatcttttgttaaatcaacatccactgcaccgatacagcttacaccatcaacaataaaatataaggaattatcaaaagctttaagtgcatgacctaattggtgaactggatgtatgacaccagtagatgtttcacaaaattgagtgaatactgcagtgactggaacgtttaattgctttaaataagtgataaagtcatcaactattacagcttcaccccagttaacatcatatacatgtaca

SEQ ID NO: 3683 - DNA, 3012 bp, Artificial Sequence
  Description of Artificial Sequence: synthetic nucleic acid sequence
acgaatcatctggaaagatgaatcaaagaaggtaataatcctgtagtcgaaaacatactctctcttgagtggatcctgagtacgacggagcacgtgaaattccgtcggaatctgggaggaccatctcctaaggctaaatactctctagtgaccgatagtgaaccagtaccgtgagggaaaggtgaaaagtaccccggaaggggagtgaaagagaacttgaaaccgtgtgcttacaagtagtcagagcccgttaatgggtgatggcgtgccttttgtagaatgaaccggcgagttacgatctgatgcaaggttaagcagcaaatgtggagccgcagcgaaagcgagtctgaatagggcgttgagtatttggtcgtagacccgaaaccaggtgatctacccttggtcaggttgaagttcaggtaacactgaatggaggaccgaaccgacttacgttgaaaagtgagcggatgaactgagggtagcggagaaattccaatcgaacttggagatagctggttctctccgaaatagctttagggctagcctcaagtgatgattattggaggtagagcactgtttggacgaggggcccctctcgggttaccgaattcagacaaactccgaatgccaattaatttaacttgggagtcagaacatgggtgataaggtccgtgttcgaaagggaaacagcccagaccaccagctaaggtcccaaaatatatgttaagtggaaaaggatgtggcgttgcccagacaactaggatgttggcttagaagcagccatcatttaaagagtgcgtaatagctcactagtcgagtgacactgcgccgaaaatgtaccggggctaaacatattaccgaagctgtggattgtcctttggacaatggtaggagagcgttctaagggcgtcgaagcatgatcgcaaggacatgtggagcgcttagaagtgagaatgccggtgtgagtagcgaaagacgggtgagaatcccgtccaccgattgactaaggtttccagaggaaggctcgtccgctctgggttagtcgggtcctaagctgaggccgacaggcgtaggcgatggataacaggttgatattcctgtaccacctagtatcgttttaatcgatggggggacgcagtaggataggcgaagcgtgctgttggagtgcacgtccaagcagtaaggctgagtgttaggcaaatccggcactcataaggctgagctgtgatggggagaggaaattgtttcctcgagtcgttgatttcacactgccgagaaaagcctctagatagataacaggtgcccgtaccgcaaaccgacacaggtagtcaagatgagaattctaaggtgagcgagcgaactctcgttaaggaactcggcaaaatgaccccgtaacttcgggagaaggggtgctctttagggttcacgcccagaagagccgcagtgaataggcccaagcgactgtttatcaaaaacacaggtctctgctaaaccgtaaggtgatgtataggggctgacgcctgcccggtgctggaaggttaagaggagtggttagcttctgcgaagctacgaatcgaagccccagtaaacggcggccgtaactataacggtcctaaggtagcgaaattccttgtcgggtaagttccgacccgcacgaaaggcgtaacgatttgggcactgtctcaacgagagactcggtgaaatcatagtacctgtgaagatgcaggttacccgcgacaggacggaaagaccccgtggagctttactgtagcctgatattgaaattcggcacagcttgtacaggataggtaggagcctttgaaacgtgagcgctagcttacgtggaggcgttggtgggatactaccctagctgtgttggctttctaacccgcaccacttatcgtggtgggagacagtgtcaggcgggcagtttgactggggcggtcgcctcctaaaaggtaacggaggcgctcaaaggttccctcagaatggttggaaatcattcatagagtgtaaaggcataagggagcttgactgcgagacctacaagtcgagcagggtcgaaagacggacttagtgatccggtggttccgcatggaagggccatcgctcaacggataaaagctaccccggggataacaggcttatctcccccaagagttcacatcgacggggaggtttggcacctcgatgtcggctcatcgcatcctggggctgtagtcggtcccaagggttgggctgttcgcccattaaagcggtacgcgagctgggttcagaacgtcgtgagacagttcggtccctatccgtcgtgggcgtaggaaatttgagaggagctgtccttagtacgagaggaccgggatggacatacctctggtgtaccagttgtcgtgccaacggcatagctgggtagctatgtatggacgggataagtgctgaaagcatctaagcatgaagcccccctcaagatgagatttcccaacttcggttataagatctctcgaagatgacgaggttaataggttcgaggtggaagcgtggtgacacgtggagctgacgaatactaatcgatcgaagacttaatcaatttttaaaaaacgttttgcgacgcaaaatcttacttactatctagttttgaatgtataatcattcatttgtctggtgacaatggcaaggaggtcacacctgttcccatgccgaacacagaagttaagctccttagcgccgatggtagtcggactgacgttccgctagagtaggacgttgccaggcaaatatcgtataagatgcgatgagcctaatcgagaccgaaaggtctcttttttttatgcaaaaatagttctaaaaaagaaagtattaataaataaattcgctacttaacaacttttataagaggtaatttcatatgtggcttataaaggttaagtaacatatccaaccttaaatgctttaattactgttgtgtatcgtaacaataattaaaacattttaaagtttcttaaaatctagtattta

SEQ ID NO: 3684 - DNA, 4106 bp, Artificial Sequence
  Description of Artificial Sequence: synthetic nucleic acid sequence
tgctctaaacccatttaataatgtatatactattgcaggacaaggcactttagctaaggaaatattaaatcaagctgaaaaagaggataaaacatttgattatgtatttgctgctataggtggtggcggtcttatttcaggagtgagcacatattttaaagcacattccccccatactaaaattattggtgttgaaccaaccggtgccagtagtatgtatcaatcagtcgttatcaaccatagtatagttactttagaaaatattgataagtttgttgatggagcttcagtagcaagagttggtgatattacctttgatattgcgaaagataaagtggatgattatgttcaagttgacgaaggagctgtttgctccacaattctggatatgtactctaaacaagcgattgttgctgaaccagctggtgctttaagtgtaagtgccttagaacaatataaaaagcagattgaaaataaaactattgtatgcatagtaagtggaggcaacaatgatattaatcgaatgaaagaaattgaggagcgttcccttctatttgaagaaatgaaacattactttattttaaatttcccacaaagacctggtgctttaagagaatttgtcaatgatgtcctcggacctcaagacgatattacaaaatttgaatatttaaagaaaacatcacaaaacactggaactgttattataggtatacagctgaaacatcatgatgatctcattcagttaaaagatcgcgtatgtcaatttgatccttctaatatttatatcaatgaaaataaaatgttatattcattacttatttaagttaattttataaccaaatccgaagacgacgaatatattattaattcgtcgtcttcattttagtatcttattttagaatgtcagtttgttccctcggctaagaaactttcttcacttgagataagcgctcgccctcttgtgtttcattttcgtctcttgttgaaccttgtagctcgactaatttcattactctcgctcccaaattcataagttacaagcgctttctattcctcgatatgtttactttttcatatcaaacactttcttttttaaaactaattttgtataaaaaaagagacctttcggtctcgattaggctcatcgcatccatacgatatttgcctggcaacgtcctactctagcggaacgtcagtccgactaccatcggcgctaaggagcttaacttctgtgttcggcatgggaacaggtgtgacctccttgccattgtcaccagacaaatgaatgattatacattcaaaactagatagtaagtaagattttgcgtcgcaaaacgttttttaaaaattgattaagtcttcgatcgattagtattcgtcagctccacgtgtcaccacgcttccacctcgaacctattaacctcgtcatcttcgagggatcttataaccgaagttgggaaatctcatcttgaggggggcttcatgcttagatgctttcagcacttatcccgtccatacatagctacccagctatgccgttggcacgacaactggtacaccagaggtatgtccatcccggtcctctcgtactaaggacagctcctctcaaatttcctacgcccacgacggatagggaccgaactgtctcacgacgttctgaacccagctcgcgtaccgctttaatgggcgaacagcccaacccttgggaccgactacagccccaggatgcgatgagccgacatcgaggtgccaaacctccccgtcgatgtgaactcttgggggagataagcctgttatccccggggtagcttttatccgttgagcgatggcccttccatgcggaaccaccggatcactaagtccgtctttcgaccctgctcgacttgtaggtctcgcagtcaagctcccttatgcctttacactctatgaatgatttccaaccattctgagggaacctttgagcgcctccgttaccttttaggaggcgaccgccccagtcaaactgcccgcctgacactgtctcccaccacgataagtggtgcgggttagaaagccaacacagctagggtagtatcccaccaacgcctccacgtaagctagcgctcacgtttcaaaggctcctacctatcctgtacaagctgtgccgaatttcaatatcaggctacagtaaagctccacggggtctttccgtcctgtcgcgggtaacctgcatcttcacaggtactatgatttcaccgagtctctcgttgagacagtgcccaaatcgttacgcctttcgtgcgggtcggaacttacccgacaaggaatttcgctaccttaggaccgttatagttacggccgccgtttactggggcttcgattcgtagcttcgcagaagctaaccactcctcttaaccttccagcaccgggcaggcgtcagcccctatacatcaccttacggtttagcagagacctgtgtttttgataaacagtcgcttgggcctattcactgcggctcttctgggcgtgaaccctaaagagcaccccttctcccgaagttacggggtcattttgccgagttccttaacgagagttcgctcgctcaccttagaattctcatcttgactacctgtgtcggtttgcggtacgggcacctgttatctatctagaggcttttctcggcagtgtgaaatcagcgactcgaggaaacaatttcctctccccatcacagctcagccttatgagtgccggatttgcctaacactcagccttactgcttggacgtgcactccaacagcacgcttcgcctatcctactgcgtccccccatcgattaaaacgatactaggtggtacaggaatatcaacctgttatccatcgcctacgcctgtcggcctcagcttaggacccgactaacccagagcggacgagccttcctctggaaaccttagtcaatcggtggacgggattctcacccgtctttcgctactcacaccggcattctcacttctaagcgctccacatgtccttgcgatcatgcttcgacgcccttagaacgctctcctaccattgtccaaaggacaatccacagcttcggtaatatgtttagccccggtacattttcggcgcagtgtcactcgactagtgagctattacgcactctttaaatgatggctgcttctaagccaacatcctagttgtctgggcaacgccacatccttttccacttaacatatattgaacgaaaatcataaaattgtaagagaagtagttagtaaagaaaaagcaaaagacttcttcaaggatgacccttataaattagaacttattgatgcaattcctgaagatgagagtgtaacactttatactcaaggtgaatttactgatttatgtcgaggtgtacacgtaccttctacttctaaaattaaagagttcaaactattatctacagctggtgcttattggcgtggaaatagtgataataaaatgttacaacgaatttatggtacagcattctttgacaaaaaagatttgaaagcacatctaaaaatgttggaagaacgtcgtgagcgtgatcatcgtaaaattggtaaagatttagaattgtttacaaacaatcaactcgttggtgctggtttaccattatggttaccaaatggtgctacaatacgtagggaaatagaacgttatattgtcgataaagaagtaagtatgggatacgatcatgtttacacaccagtattagccaatgttgatttatataaaacatctggtcactgggatcattatcaagaagatatgttcccagcaatgaagttagatgaagacgaagcaatggtcttaagaccaatgaactgtccacatcatatgatgatttataaaaacaaacctcattcttatcgcgaattacctatacgtattgctgaattgggtactatgcatcgttacgaagcaagtggtgcagtatcaggtttacaacgtgttcgaggaatgacattgaatgattcccatattttcgttagacctgatcaaattaaagaagaatttaaacgtgtagttaatatgattcaagatgtgtacaaagattttggttttgaagattatcgcttcagattgagttatagagat

SEQ ID NO: 3685 - DNA, 3483 bp, Artificial Sequence
  Description of Artificial Sequence: synthetic nucleic acid sequence
gatcagcgtcataatcaacacttaacatatagtctgtgaaatattgtccaaatcctaagtttgctgtatcaggtttttcttttaaagactctcttttttcgaattttactttttctgacatgactgttgcctcctaatataattccaattaaatagatacactaaattatatcaatcgtgattctactattcaatgaattttctaaatattcaaaatagatattaattttattatgtatacagtataagtaaaacactacctttattaagttacaagttatgttattatcatcacctattttttccgtaattaaatttgtgttctcatcgaaaattagcttctttaaaagtagacttggaactaaaatagacttttctttaccctatatattatcattcaatttgaccatatgagccaaaaaacatctgtatgagatgatatataaatcagacaatttgtgtaatgtagttacgcgaaaaactgcttctaacttcacttgtcatccaattttttgatgcagtatcttttattaaagttttaaaagatagctatatactttaaaaaatcggtatgggctcagcattctttttgttttttctcaattgcctctaacatcactttagtcatagttggtaaatcatatttaggatcaaatccccactcttcctgagcacagctcgtatctatactatctggccaacttaatgcaatatcttgacgctctaaatcaatgtcataatctaaggtgaaatctggatagtatacttgtatagcttgttttagcatttcaggttcaatactcatcgcacttaagttatagccatttcttgtttttaatttaacactgtcttcttccattaatttgataatcgcatcaatagcatcttccatgtacatcatatccatataagtgtaacgattaatataacttgtataatgtccttttctaactgccttaaaatacatatcaactgcataatctgttatgccaccgccaggttctttaacatgtgaaattaaaccaggaaatctaacgctacgtgtatctactccaaatttgacataataatactgacataataattccccagttactttgtttataccatacatagtcgttggttgttgtattgttaattgaggtgtatttactttaggtgtcgaaataccaaaagctcctattgaacttggcgtaaaatattttaattgataccttcttgctgcttcgagtgtatttataagtccccccatattcaaatcccaggcaactagtggtttcttttccgctgtagcagaaagcagtgcagccatatgcataagtgtatcagcattgaaatatctcactgtttcaaataaacgatttctatctgtaacatctaagatttcaaaaggaccgtttttaactggagagtgtggttctggctttcttatatcagtagctaatacattttcagttccatatctttctctacacttaataactaattcagtaccaatttgaccaagtgctccagtgattattatttttttcataaactaatctccttatatttaaatataaaacgcaacttttgtagaatgaacaatcctcttacttaaaaaatataataatatgatggtaatttctttataaaatatgttctttatttgtaaagtcacgcgtacgttagtctaacgtttgtctgaaggcacagtgactgacgactaaaaaggtaggtttgctctttgttagtaaaatacgataaaatatatactaaaagtattgaattttaaaggggatttgtattgtagatgaaacgaagttcatacctacgtcgtcaatcaaatttaattatatctatgattattttcgttatttttttaattgtagatatcaatgtacttattaataaacatcaagttgtgcctgtgctattatcaagtatcagtttaattatttttatcatgctatttgtagttgcattgttcaaatgtataactaattataaacatcaatcttagttaaaagtaatttccctatcgtcagataaaaaataaatagagcagttacgggtctacctgctctatttttcctaacattgatttaacctaagattgtattaattttttataaaaatattgtgccacaatgatatctacaattgctagaccgaccgatttaaagactgtcacttcttcttcagtttcgcggccaactttttcaccagaaataatgtcgcctaattcactatgtagcatatttttagttaatattccttctgcttgaggaatttttaaatcacctgtttcttctaaagctgcttccatagattcaacaacaattttattagcaacaagcattgtttctgaaggtatttcttgcatatctggtttaaaggatccgactgcatttaaatgcacgcctggatgtaaagaatgagtataaacgggctgatttgcatttgttgctgtaactacaatatctgcactgtctatcgcttcatctgccgatctaaatacactcactttaatattaaatcgatttcgtatattttgagcaaatttttctgctttttcgaacgttctacttgcgatgtgaattttttcaatatctctaacagcaagtatcgcttcaattaaaccttcagcttgtacacctgcccctattacactaagtgttttagcgttttcttttgctagatatttagtagctacacctgaaattgcaccagttcttactttagtaagaaaaccaccatctaatatagacaatgtttctcctgtttcatagtcacttaaaataactgatccagtaatagtcgctttccctttttttgaattttcaggtgcaaatgagactgttttaagtccaacgatatttaattcatctgataatgctggcatcactaaataacgattttgctcattaaatggcaaaacatatcttaatggcgttatcgtcttattctctgaaaaagcttgcaaagctttttctacttctaaaatgacttcattcatgtctaataattgagcttgtgtttgctcatctatatatttcattattatgaatcccccccacgcgtttaatgtattatataggattatttagatggttaagtttttcacaaagtttaatataacaagatgtgttaaatcgtaagtctccattaaaattcttttgcttaaataaacttaaaagtctaagctcctatctcaaataatattgactttaaaaagctcttttcttctaatcattttaaaaataaaaatcatatatttgctttatcacaatatattcttaataatcatgattattttgtattaggtatatgatatcgatgaacaggtttaccattttttttaatataggattcaatttgatatccaccacatttcttcatcactgtttgagaagcaaaattaagtggattacaagtcataagtacgacctctacatttaatgtcttaagttcatctaaagccttttctagaaggatagtagc

SEQ ID NO: 3686 - DNA, 4136 bp, Artificial Sequence
  Description of Artificial Sequence: synthetic nucleic acid sequence
tggacaaacgcctcacgtgcactttgaaattgtaccaattacagaagatggacgattaagtgctaaagatgttgtaggtaataaaaaagcattagcaagctttcaagataaatttaatgagtatgtaaatgaacgtggttatgaattagaacaaggaacttcaagagaattaacaaatagacaacacgatcaagttaatagttataaacaaaaaacagaatatacctcgttaaatctcgtgaaacaaaacgttgatttgacggggttttgttatatcttattaactttcgttaaacctcgtaagtcaaactaaacgttcccgtaacattcctctatattgttaaattgataaaaacgtccccgcaaaattaaattacgttcccgttcatattttccaatacattcactgttttttctctttctgtctgctctacttcatctaatagatgcgaaatatgcatccatagtagttttaatatttttgtaacctaatctctttgaagtgtaatagatagatacgtcattgagtagtaaataagaacaatgcgtgtgtcttatactatgcaaagtatatttacctattttattttctaaacaaaatttttgtaacactttagatacagcattgtgtgtaatcaatcctacacctgtactgaataattgatttgataaactcactggcattttagataatgtttttcttaacatattcatatctgcagcaggtatatctacagttctatctgaagtttctgttttcgttcctggtaagtgtattgtattatttttataatctaaatcacttctacttagtttttgaacttctccaaagcgacctccagtgacgattaaaatataaacaaatacatatgattgaatagggggatcagatacatacttctttaaatttacaaaattttctatgctcataaacttttcatcttctttttgtgcaggtgtctaggtaagatggttggtaaattagaggtgtgacacctagaaacgatttgttaaatgctaatattaccggacaacttaatttaaattatagattaatttagttaggtttcatcactagtaaaaaagacatggactatataactaagaacatcaacagttttactaagagacttgcagaggctatcaatggtagacaaataaacgcactaaaaagcaacccatctagcaaaaagataacttggaactggggaggtactttctaccctaacgcacctaaaagtggtattagagttagaaggtcgctaggtatcaatggcgctattgttgaaagtggctcgtgattatacagaaagacagattgggttaaattcgaccaagttattaaaaaagatggatattggtggcaccactttaaatatcaagcaccaggttcaagtaataaacatttctattgagccgttagtaaaattataaacaaacaacaaaaaataaaaaatgagtaatattggggtaaaatagactggaaatgatataattaaattaccaggtcattgtacaagggtagtcgctatggctaccttatttttttatacaaaaaaagcgactaaaaagtcgcttttaaaagtgttatttctttttattaaaatacattaaagtgattataattgaatacgtgaaaagaaatatcattataaacattgccatgtaatcaccttttccttatttacaaatatagttggttgcaccagtacagcctagagagcttatcagaccacaaattgtagctaatgaaaagcctccccaaccagtagtaatacctaaagctgtagcagttgcccaacaacctgcagctccaccggtaccacataaagctcctactgcccattcacaccaaccacgctctttaggtggtaagtttttagcagaatctttttcgatttcatctttagaggtatgtttaaagtttttatcgtagtaatgacctttctgatctatattaaattcataataaggtttgccatttaaaatgcctttcatattaatatattctttattattatatttaacaaattttgaatacatcatatgattgtagaaaacttcattgtttgcttcgttatattttaattcaatcattgcaaggttatcattcattttagctaattttttaccaaatacatagttaatagaatatacattggtgtttttacctttatccaaatgaacaataatatcgtcatcttttattgagtcaatagaagttgaattagcgtgctttttataagcattagatttttttatttttttaataatattttgtttagttttactatccacattactttgaggtttgctcacctcattatttgcagcattaacgttttgaaaccctgttgcaacacaaaaacttgaaattattataatagataaaattgatagaaataattttctcattagaattcctccttattgtgttctatactcatactatcattttaactaattaatataacgataattcctatgtgtttattatcatttcgtagatgtcgatatcaaaattttaaccattttactaaaaggtatgttttttattttggcagaaatctgtaatagtctgtttaaaacattttgtatatgtttcatatcttttatagcaattgaaatgattttattagctgattttgtcatagtacttcttaaatgaatagtactattgatttaatctatatcgttatattgtaattttatacctctccaaaaggtcgacctgcagctataagtataaaaattgctaaatatgataattcatttttacaagttgagaattattttaatttcctgtattcagttaaagacatgaatttatcttcttctttttttgtaggtttcctttcatagatagggtcgttccaagtttgatcacgttcaattatttcctcatttaacgcatctttaaaagcttgtgaaaagcaattatttaatttttgaacacttgctttcgtatgtcttttttatgtccaccaataatgtgaccttctgcatactcttttaacatttcgctatatttgagttgtgaaaaatttttaatagctgtattgccaaacttttcatcaaagatatttaatgcattataataacagtttaaagttgattgtgatattttgttctttttattaatttttatacaatcttgaaagttttctagaaacggtgtttcagacgaaatgagttggttcttatttatttcattgtatttaagttgcattgtcttatacgctactttttagttttattaacctcttttacgatagctcttattttacatctaaaatcataagaccatgttatattaattttttcacattcattctcgttgttcttctcttgatgctaaaaaataggacgagaaagtaactcgtccgtaaacttaattatccaaatgctcaatagcatattttgcttctgattctgtaaatttttcaccgtagttagacaccaaaagatcgtaaattgagtcattagacatatgcatatctttggcatatgattttgctttctcaagtgcattcttttcataatcagcctctagatgatctatagcatattgtgcatcttctttatcaaatttttctccatattcagatgttaaaatatcataaattcctagtttagacatgtgaaaatcatcataatatgactttgccttttcaagcgcagagttctccaatcgtgttgcagattcattttcttttccaggttctttagtattttctttggtggagtcataattagtttttgtttcttctactgcagttttatgatttcgctcgtctttatcatttacattattctctgtagtttctttagtttcgttatttgaatttgatgttgctggtacaatcatttgtagattaccataataggtaatgcttgctaatacgataactgaaattgcaacagtaatgattgttcttgcaatagatggccacttgctaaatttccacatgagaaataaacctagtggaaaaatgaataaaagtgataaaactataaaccattcttgtttgtaccatgatgtcgtttcttgttgcataaaacgtcctcctgtgtatctatttgatgaaaagtagcaggtttaatttttaatatattgaaaaaagcaaatttgtata

SEQ ID NO: 3687 - DNA, 3805 bp, Artificial Sequence
  Description of Artificial Sequence: synthetic nucleic acid sequence
ctggacttggtactattatctccatactaattgcatttggtggtctcgcatttaacataggtaatattgctggtgcaggtttaggtttaaatgcaatgtttggtcttgatgtaaaatggggtgctgcaataacagctatttttgcgatacttatctttgttagtagaagtggtcagaaaataatggatgttattagtatgattctaggtatcgtaatgattttagtagtcgcttatgtcatggttgtttcaaatcccccttatggagatgcattagtacatacatttgcacctgaacatcctttcaaacttatattacctataattacattagttggtggtacagtagggggttatattacttttgcaggtgcacatagaattctagattctggtataaaaggtaagtcataccttcctttcgtaaatcgatctgctgtagcaggtattttaacaactggtgtcatgcgcaccttattgtttttagctgtactaggtgttgttgtaactggcgttacgcttagttcagaaaatccaccagcatcagttttccaacatgcattaggtcctataggtaaaaatatttttggcgtagtaatatttgcagcagcaatgtcctcagtaattggttctgcatatacaagcgcaacatttttaaaaacactacacaaatcgttactcaataaaaataatcttatcgttattacatttattgtaatttcaacttttgttttcttatttattggtaaaccggtgagtttacttataatagctggtgcgattaatggttggattctaccaatcacattaggtgcaattctcattgcaagtaggaaaaaatctatcgttggtaattaccaacacccaacatggatgcttgtttttggtattatagccgtaattgtcacaataatgactggtatcttttcattacaagatttagcaagtctttggaaaggttaattgtataataaagttctatgactacccgcaactgtctttaaatcaattgcagggtagtttttaattataaataagaagagatattatttaatcatagtgatttaagcattgatactttaaaactagctatcgtggagatatttaaaatgtgataaaatacttatgctaatgctttataaatgaggtgtaaaaagatatatgataggaattattggagcaatggaagaagaagtgacgattttaaagcgtaaattgaatgatatgaatgaaataaatattgcgcatgttaaattttatgttggcaagctaaaccacaaagaggtggttttaacacaaagtggtataggtaaagttaatgcttctatctcaacgactttgttaatagaaaaatttaatccagaagtcgtcattaatactggatcagcaggtgcactagatcaaacactatctattggagatatattagtgagtaatcatgtattatatcatgatgctaatgctacagcgtttggttatgaatatggacaaatacctcaaatgcctaaaacttatactactgatcctactttgttgaaaaaaacaatgcatgtattagaacaacaacaactgaatggtaaagtaggtatgattgttagtggtgatagttttataggtagctcagaacagcgacaaaaaattaagcaacaatttccagaagctatggctgtcgaaatggaggcaactgcaattgcgcaaacatgttatcaatttaaagtaccatttatcgtaactagagctgtttctgatttagcaaacggtaaagccgatatttcttttgaagaatttttagataaagcagctttatcatctagtgagacagtttcattattagtagaatcattataaaggtaaaggtgaaaagatagtgggaatcataaaaaaattatttatgccaaatgcatatgtgaaatcaatatttgaaattgatatagaaaaacttgccgatagtggtgttaaaggtatcataactgatttagataatacacttgttggttgggatgttaaagaacctactaagggtgttaaatcatggtttgctaaggctaaagatttaggaataactgtcacaattgtgtcaaataataataaaagtcgagtatcaagtttctcaagtaatttaggtgtagattatatattcaaagcacgtaaaccgatggggaaagcctttaagatggctattaaaaaaatgaaaattcaaccgagagaaaccgttgttgtaggagatcaaatgcttactgatgtgtttggtggcaattgtaatggtttatatacaattatggtagtacctgttaaacggactgatggattaattacaaagtttaatcgattaattgaaagacgattattaaatcattttagaaaaaaaggttatattaaatgggaggaaaattgattgaatgaaatactaaaatgtattggatgtggtgcacccctacagtcagaaaataaagacgcacccggctatgttccagaacataatatgtttcgagaagatgtcatctgtagaagatgttttagattgaaaaattataatgaagttcaagatgtgggtatggaaagtgaagattttttaaatctacttactggactatctgaaaaaaaaggaattattgtcaatgtagtagatgtgtttgattttgaagggtcattcatcaatgcaatacaacggattgttggtaataaaaaaattatattagtggcaaataaaatagatttattacctaaacaaattaatcatcgacgtgtaaaagaatggttgagaaaatctgctcgtaaatatggattagaagcagaagatgtcgttcttatttctgcaaataaaggttgggggattgatgaattattgcaatctataaaccatgtaagaaataaagatgacgtatacattgtaggtacaacgaatgttggaaaatctacattaattaataaattaattgaacagagtgtgggagaaaaagatgtagtaactacatcacgctttccaggaacaactttagatatgatagatattccattagacgaaaaatcatttatgtttgatacaccaggtatcattcaatcacatcaaatgacaaattatgtatatgaaaatgagttgaaaatcattatacctaaaaatgaaataaagcaacgtgtgtatcaacttaatgaaaaacagacattatttttcggaggattggcacgcattgattatgtatctggtggtaaaagaccacttgtttgtttcttttcaaatgatttaaatattcatagaactaaaaccgagaaagctaatgatttatggaaatcccaattaggcgcattgctttcaccgcctcaagatgcacaacaatttaatcttaatgatgtaaaagcagtaagactggaaactggtaaaactaaacgtgacatcatgatatctggtttaggattcataactattgatgctggtgcaaaagtgatagttcgtgttccaaaacatgtagatgttattttaagaaattcaattctttaaaaagaggtgataaaagtgaaatttgcagtaattggaaaccccatttctcattcattatcgccattgatgcatcatgctaattttcaatctttaaatttggaaaacacgtatgaagcgataaatgtaccagttaatcaatttcaagacattaaaaaaataatttcagaaaagagtattgatggattcaatgttactattccacataaagaacgtattattccgtacctagatgatattaatgaacaagcgaaatctgttggggcggtaaatacagttttagttaaagatggtaagtggattggttataata

SEQ ID NO: 3688 - DNA, 3227 bp, Artificial Sequence
  Description of Artificial Sequence: synthetic nucleic acid sequence
cagtgttattttgctccatagattgtagttttaatctttcagctatagatttatcaattggtgcacaaatcagaccacgaccctctttagccataaaattaatggtattatcatccatccattccgtaacagctacaagatctccttcattttctctatcttcatcgtcaactacaataatgctctctccatttcttaaagcctctatagccaactcaattgtatcgaattgcatgtgatattcctcctaaaaaccaaatgctctaagcttttcttctgttaactgcgattgattttgattcatgatgttttcaacatatttgaatagtacgtcagactccaagtgcactttgtcgcccacttttttagatgaaagaatagtagatcgacgtgtttctggtataagatgtatatcaaaagtataatcatgtaaatcaaatacagtaagactaactccgtctacagttatagaaccttgctttaccatttgattcaaaatatttttagttgttttaatagaaataatttttgagttagcagtttcattgattttagaaattgttccaagctcatcaacatgacctaacacgaaatgtccaccaaatctcccacttccactcatggctctttcgagattaacttctgtattacgttgaacacttccaagatatgttttgttttcagtccctttgatgacttgaactgaaaaacttgagtcagtgaaatctatcacagttaaacatgcaccgttaacacttattgaatcaccaatatgcatatcaactaaaatgttttgtgctttaatttcaagcgttcttactgattgttcagagcgaacttgttgtacagtacctatttcttcaatgatacctgtaaacatagacattcacttctttcgtaatttcaattttaaattttgattaattaacttggaatcaacaatttcaaattgagttgcttcaggcaaatcaatgacctcgtcagtcttataaaattgatgtttgccagaaccaccaattaatttcggggctatatataaaatgagttcatttagatgtttggattggagaaattgagatgtaatatttgggcctgcctcgactagcagtttcccaatacctctttgatataagtcttgtaatattgtcgttgtatcacaattactaatatttattattttaataaaacttttatttgtttttaatttttcattttcagtgtaaatccatatctccgatgcagtatctttaaatatttgttgattaaaatcgagttgacctttcttagaaagaataactcgaatcggatgctttccatcaggaaccctggttgtatacaatggattgtctgcttcaatggttctacgcccagtaataactgcatcatgctcatgtcttaattgataaacatcttctttaacttctttgtttgttatccacttactttcattaaagtctgttgcttgtttaccatctagactagatgagacctttacagttacttctggaacttcgtttcttttagcagtaaaaaagtcacggtataatgcagctgcattttcattatattgaaattcaacctctataccagcttctctcagaatctcgtcacccttacttactaaagtagtatctttaacagcatagatgaccttagatatgcccgcttcaatgattttatgcacacaaggtggtgttgaaccatggtgtgtgcaaggttctaatgaaacgtatatggtagcaccttgggtatttaaacctgccatttcaatagcttgtacttcggcatgtttatctcccttttttaaatgtgcacctaaacctacaatcctaccgtttttaacaacaacggatcctactggtggattaacacctgtttgtccatttaccatttttgctagttgaatagcatcatccataaatctactcaattgatcacctcaaaaaaaaccttatacctatattgtaggcataaggagatatctatatctttaaataagcctattagcatacttaaaattgcacataagtatacaatacgcttatcataactacacgaatttgtgtaagtcgataattcaacttctttctcccatccagactctaactgtcggctctagattcacactagatcagccactaacatcaaaaacaatattagtgggtcgcaggctcaatttactgccggttgggaatttcaccctgccccgaaagaaatatatgaaattgttatgattaattgagtccagtagttcttcactacattgtaaatcttactatatttaaatttaaaatacaattttatagcttactttattaaaagattttatgagaatatattaaactcacaaacacgcttaatgcatattacttatttctattttcctgtgttatatataattgagatactgtatcaacaacttgattaacaatcatctttacgccatttctaagtttattgacaccgttggtcatttgtccaattgcaatcacattttttaaggttccatatctggggcttatgacttgatttgtttctgggataatttgaatgccacccataggatgacgttgaacaatttgtctattttctaagtttaaaattaattgatcatcctcatctaattgagaaagatgtgttttagagcccgttgcattaataacgatgtcaaacaactcataattttgcgtagtgtcgttatacttcaacataaattgattatttttatggactatgtcttctagcccttttttaatgacaagttcattattctgtattaacttgataagtaaacgagctgttctaggaggcattggattagaatttaactgaataattttagtgtatttacgattaaaagtttcttgatctttaacgctcaaactattccaaatccagtttaaattttcttttaaatgttcaatgatactttggaatatccccatttcttcttcatgatttaaatcatactccaagtctttgacatggtttccggttctacgataaataagttttttaaaatctattccataatcttcacattcttttaaaaataatgaaactactttttctaatggtacattaccaaagtgatttttcataattccattaaatcgtgatttagttaaatgcgtaaactgaattttagtcattttccctctaacacttggcaatgctgcagaacgacttgtcatagtaatgggtaaagatggatgatgtgcagctac

SEQ ID NO: 3689 - DNA, 4041 bp, Artificial Sequence
  Description of Artificial Sequence: synthetic nucleic acid sequence
tcctctacttttgtatctagtgatcttaaattcattaatttattatttatataattagaatctagtgattgattgtcagattgtaccttagcaagtgctttttcaatcttatcactaccttgtagtgaacgtgtaattgcttgtatatcttgtttttcatctgtgacatgttgatcttttgaatccctaatttgatcagtatctgatgctatacgttctaatgttgagcgacgaccatcattacttttatcgtctttactatcactatcggattgatttgttgtcgtactagattcttctttgttattttcgtttttattagatggtgatgcttgctgatcgctttgttcagaaagcttattattagagtcagacttaaaatcttgttggattttatctaatttatcaataaccgactcttcagaatcatcagtagttgcattgcgtgtactagcatttgtatcgtgtactttattatttgaatcatctttttcatcggttgttgagtcactaggtttagaagcactattttcaccttgttgacggttatcaacatttttagcaattgaatctaaatccgacagtattttatctaagtctttagtcatatcatcattatctttttcagatgtatcgtcatcttcagtttttgatgatgtggcactagagtctgtcgattttaaatgattatttttatcttttgcatcatttataatacggtcaatacttgattgattatcgactttatctaaacgttcttcaaaacttttgatatctgcgtcagaaagttctttcaaatctttaatatcatctttagcttgttggattttgtcagcgatggagttactattagaagtattttcaacatttgatgatgtactttctgaatctgcaaaagcatcttttgtgaagccataaccaaccagcgaaccactaagtaacaacgcagaacatgacagcttgaggtagacaccaattttatctgttctcttcatttacacatactcctttaataaagttacctgtattattctttaaatagatttatatgatttaatcaaaaatatacatatcacattataatacataatttcatagatttgtagataatgaacctaaaataacaaatttaaaaaacaaatttcttgtaattattagtaatttggtattacacttctttacacacttaattatttaattaatatattaagttaagtgtaattcaaaaacaaggagtttttataatggcaaattctatttactcaactacaatgatttcaaatggtggacgtgatggtcgcgtttttagtccagataatacatttgttcaaaaccttgcaacacctaaggaaatgggtggtcaaggaggcaacgatactaatcctgaacaattatttgctgctggatatagtgcatgctttaatagcgcgctatcattaatcttatctcaaaataaaataagtgatgccaacccagaagttgaaatcactattgaattacttaaagatgatactgacaatggttttaaacttggcgcagatattaaagtcacacttgaaaatatgtcccaacaagatgctgagaaatttgtggagcaagcacatcaattctgtccatactcaaaagcgacacgtggtaacattgacgttcagttagatgttacagcgcaataaaacttgtaatcgtacaactaattcttagcaaatgtttctatacaagattaaagagtagaataatgaattcaaattgaattctgttctactctttttatatactttcatacttccacagtctctgtttttcatttccaatctctcattcaatttacttttcataaacaaaatatctttttttaaataaatttcatactttttaaaaaatttcactttaaaataactataaaaaggttaaaatgggaatagtataagtaagtagattttttcttcataaaatgtaaagttgctcatcaccgaaggaggactatttatgtttaccatatcaatcatcgctatgattattggtgttgtgcttattgttttaagtcaaattatctatcattcaaaaccgatagatgctaaggaaaaaatgtttatacccggtgtatgcctttttttagtaggactcttaagtttaatcggtcactttgttaatggctacgtataatcttttttcaaaactgtaaaacataccaacatctctataacaaaacatagtatttaaaaattttgtaattattaaaagagtggctgggacagaaagttccaggataagtaaataaagacaatttctattgaaataatgtagaaattgtcttttttacaatttttttgatgattttcagctcgttgagcttttactttattatattaagcaacgataatgtctgaatttatcgaattcagtctcgggaattgtttctgcaataacatttacatgtcgtgaaatatcatttgtggggataagaactgaagtttccattagtagagtatgtttagtcattttataatttttatacataagacacctcgttaatttagtttattggtatttattaaattatacgaaaggtccttatttttcaaagtattttaatataaaattacatatatgcacaaagtattttggcgagactcttgagggaacaggacaagctgaagactacaggctgaagctgtccgataagaaagcgagccaacaatacgaagtgttataaataaaaagccagtaaatgaatttataaaaaactcatttactggctattttgctaggaattatgtctcagcctcttagctattggctttggatagctaaatttaaaatacgcttatattaagtttttaaatttttagttctcattaatgaatctgaacgacgaatttaatatgaatatgatttcattctttttgatgtatcatgattcattattagtgttgtcaaaatttcgaccttcaagtccagccaattcttctttcgaagctgcaggtgctttcatttcaaatatttcatcgacaaccgtgtaatcataataaccgagacgtgctataggtctgattgacttaatgtctaattttccgttgtccataattactttatcgtcaatatgcacttgtgctacacgaccgatgactatatccacagttgaaacagggtctccagtgggaattcttactgtttgaacatattcacattcaaaatgaacaggtgattcctttaccctacttccaggagcttcgatacacgattctttcgtcacaccagcaaagtcaaattcatcatcttctggaggtaatgctttggatgataaattcactgcttcacgcaaatcatatgttgccatattccatacaaaccaaccagtttcttccgcattttaactgtatcttttctttcatgatcgccaagcactgactgattagccgcaaacattaccattgggggtcccatgtaagattttgatattgactgtacggcgccaagttatctttaccttctttagatactgtagaaatccaacctataggtctaggtactgtgctacttttgaacggatcatgtggcaatccatgacttttaacaccttgttttggtgaataattcattttatatccactcctatcgttaatcgttctatcaacttaaggttacatgacttgacttagcattgtctaatatttatcaatcatttcaatatagttaaaagttataaatagtattttaaacttttaacaaccaatattgcttttatcatttgaagctattttcaagaacgttggtcacctggcataaatattgatacaactaaagcaatcagtccgacaatagcaatcattaaaaactgtaagaaaaagttagacagttcgcctacaaataacattaaaataggtgcaatcgctgttcctaagaataatacaaatgtattaacagataaaaagaaaccttgattgtttttaacaactacacctatttttgaaataacagtaggaatcgcaaatgcgatacctgcaacaaacaacacactaaatgttgtaataagtataatat

SEQ ID NO: 3690 - DNA, 3019 bp, Artificial Sequence
  Description of Artificial Sequence: synthetic nucleic acid sequence
tggtatcatcattgcacgatttggtaaattatcaggtgttattatcactattgcgaatattattcaaactgttccggttattgctatgttagcgatattaatgcttagtatgggactatatcaaatttggaagaaaaagcataaaaagctaattacaaatggcgtattgatgagacgtacatcaaaataaaaggaaaatggagctatttatatcgtgccattgatgcagagggatatacattagatatttggttgcgtaagcaacgagataatcattcagcatatgcgtttatcaaacgtctcattaaacaatttggtaaacctcaaaaggtaattacagatcaggcaccttcaacgaaggtagcaatggctaaagtaattaaagcttttaaacttaaacctgactgttattgtacatcgaaatatctgaataacctcattgagcaagatcactgtcatattaaaataagaaagacaaggtatcaaaatatcaatacagcaaagaatactttaaaaggtattgaatgtatttacgctctatataaaaagaaccgcaggtctcttcagatctacggattttcgccatgccacgaaattagcatcatgctagcaagttaagcgaacactgacatgataaattagtggttagctatatttttttactttgcaacagaacctataaaaaacatgggcttaaagggttaatttatatagtattactgcaaacattgatttgggtcaaaaattaggggtattaaaaaaatgaatgaatcataattttatcaagctgattggagaggttaaaatgcattatataaaatttattgagtcaaaagataatacaaaactttatatgaaagtgaatgatattcaagatgcaaaagcgaatatcattatagctcatggtgtggcagaacatttagatcgttatgatgagataacagcatatttaaatgaagcgggttttagtgttattagatatgatcaaagagggcatggtcgttctgaaggcaagcgtgccttttatagcaatagtaatgaaattgtcgaagatttagatgcgataataaattatgtgaagtcaaactttgaaggtaaagtttacttaatcggtcatagtatgggtggttatacagtcactttatatggaacgaaacatccaaatacagtgaatggtattataacttctggagcattaacacgttataataataaactatttggcaatcctgatagaaacatatcacctgatacttatatagaaaacaatttaagtgagggggtatgttctgatttagaggtaatggaaaaatataaacttgatgatttgaatgcgaaacaaatctctatggggctcgtcttttcaataatggatggtgttaggtatttgaaagacaatgctcaacaatttacagataatattttgatattgcatggcaaggaagatgggctagtaagctatgtagattctttacagctttatcaagaaataggatcagcacataaatcattacacatctatgatcgtttggagcatgaaatatttaatgaaagttcttataatagaactatttttaacgaagttattgaatggcttgaaacggaattaacttataactaaaacagtatagttccgtgtatttgattataagaaattatgaggatattaaacatactaagattagctatgaagaaatctatgacgatagattttttcatagctattttttatagttatagagaggagtagactgtccagactctaggattttaaatccgtaaaaaaaacaagtcagctttactctcaccttttgaaattcgtttgtagtatgttgggttcctgaaaccgtgtataggaaaatgaaatgagaaaggttaagtaaagtttttagcttctcaactattcaaaggaggtttttttatcgattacttaggtgttgatattagtaaaaggagtagtgtagttgcacattataaaaatggaaaattccaaaaagagtttttcatccaaaataataaaaatggctacaattatttactcaagtatttgaatgacttagaccacccacaactcatttttgaatctacaggtatctattcaagaggtatggaacgattttgttgtgtaaatcaaattaactatattcaaatgaatccgttagaagccaaatttaaaacgagcgctctaagatcatggaaaactgatcaggcagatgctcataagcttgcttgtttaggaccgacgctcaaacaaacaggcagcttacctatacatgagttaatattctttgaattaagagaacgtgcccgttttcatctagaaatcgagaatgaacaaaatcgacttaaatttcagattcttgaattactccatcaaacattccctggtttagaaagattatttagtagtcgatattcaatcattgcactcaacatcgcagaaatttttactcatccagacgtggttcttgatatcgacaaggatgtacttattacacatatattcaattctacagataagggaatgtcaatggataaagctacaaaatatgcacttcaattaagagtgattgctcaagaaagctatcctaatgtcgatagacattcctttctagtcgaaaaattacgcttacttattcaacaattaaaacaatctattcatcatctcaaacaattagatgatgccatgattcaattagcacaacaactcgattattttgaaaatattcattcgatacctggtattggtaagctaagcacagctatgattattggggagattggtgatattaagcgatttaaatcaaataaacaactcaacgcttttgtaggcattgatatcaaacgatatcaatcaggtcatacacactgtagagataccatcaacaagcgtggtaataaaaaagcgagaaaacttttattttgggtgattatgaatataataagagggcagcatcattatgacaatcatgtcgtcgattattactacaaactaagaaagcagcctaatgagaaacct

SEQ ID NO: 3691 - DNA, 3215 bp, Artificial Sequence
  Description of Artificial Sequence: synthetic nucleic acid sequence
gctaaaacgagggatatttgggtcgaaagtatgtgttaaatcgacccactgagcctcttttaaagtatttaattgattccaaagtggatactgtgacatttgcctcacctctagctcgtattatgctgttgttgattcagattcttgacgtttctttttaactgcattgactaacactgttaatgcatctttcacttcattttctttacgtgtttttagaccacagtctgggttaacccagaatagagaacgatcaatttgttgtaatgaacgattaattgcagtagtaatctcttcttcggttggaatacgtggactgtgaatatcgtaaacacctaatccaattcctaaatcataattaatatcttcgaaatcttgaattaagtctccgtgactacgagaagtttcaatagaaataacatctgcatctaaatcatggatagcatgaatgatttgtccaaattgagaatagcacatatgtgtatgaatttgtgtttcatcatgcacagatgatgtcgctaatttaaatgaatgtacagcatcttctaaatattgttcgtgatattcagagcgtagaggtaagccttcacgcaacgttggttcgtcaacttgaatgactttgatacctgcttcttctaaagctaacacttcttcatcaatggctaaggcaatttgatcttgaacaacctttctaggtacgtctacgcgttcaaatgaccagtttaaaatagtaactggacctgtaagcataccttttactggtttgtcagttaagctttgcgcgtatactgtttcttttacagtaagtggggcagtccacttcacatctccatatataactggtggtttaactgcacgagaaccgtaagactgtacccaaccgaattttgttactaggaaaccttgaagtttttccccaaaaaattcaaccatgtcgttacgctcaaactcaccgtgtacaagtacgtctaaaccaatatcttcttggattttaatccaacgagcgatttcattttgtaaaaattcttgatactcagcatctgtaatgcgattatttttccaatctgctctaaatttacggacttcacgagtttgagggaatgaaccaatcgtagtcgtaggtaaatctggtaaatttagacgttggttttgtaattgcttgcgtttagcaaatggtgatttacgatgtgtcggtacactttcaaaatcgtattcaagatttttaaatgattggctttggaagcgttcataacgtgctttgtaatgttcatattttgacaggtcattatcattgaataagcgacgcaatgcatctaattcgtctaacttttcagtagcaaaacttaatccttctgcaatagattcatcaagtgtttcatcatctagtgatactggaacatgtagaagtgatgatgaaggttgaatgactaactgttgtgtgtgttgttgtaatgtttcgattaattgtttttttgcttcaatatcagccgcccatacatttctgccatcaatgattcctgcataaagtgctttactttgatcgaaattaccatcttcaatttgttttaagttatagccgttatcgtgtaccaaatctaatcctaaaccgcccactggtaatgaacttaagaattttaagtgaacacgttcaaagtaagtttgaatgacgagatattttcctaaaccttcatttgcgaaatagtcgtatgcttttctagtaatgtcttcataactttcgctgtcatcagtcactagaataggctcgtcaatttgaatatactcagcacctgcatctacaagtgactgtaaaacttctttatataaaggaagtaatgtttcaactttttcctcgaacgattgatgaccaccttttgataattttacaaatgtgataggaccaacaattacaggatgcgcatttacattaattgattgtgcatatttaaaacgttctaataacgtatttttttcaactttaggttctacgttgtcccattcaggtacaatgtagtgatagttggtgttaaaccatttaataagtgcacttgcaacatgctctttgttaccacgagcaatatcaaataataaatcatcattgacttcgcgtccttggaaacgttcagggataatattgaacaataaagacgtatctaaaatatgatcatataaagagaaatccccaactggaatgctatcaagatgataatttttctgaagtaaaagattttctttgtgtaaatcagtcagtgtttgatctaattctgctttgtcaattttatgtgcccaataattttcgattgcttttttccattctctttttctacctaatcttgggaatcctaagtttgaagttttaattgttgtcataatattgcctccttgttggcagtgattgatttagagtatgctgcgagttccaatgaataatctaccttttggaaaggtgtaataatgtacagaccgttgaagtattcatgtactgtatcaatgagttctttggaaagtcttaaacttaattctttagtcttttctttatcatctttaacagctttgaattggttaagtacatcgtctgacattttgatgccaggcacttcattatgtaagaaaagtgcgttgttataacttgcgattggcatgatacctatgaagaaaggtgtatttaaatgttttgtttcttcatatacttgaataattttttctttactataaacgggttgagttatgaaataactcatgccacttgctactttcttttcaagtcgtttaatggctccatctaattttcgtacgttaggatcaaacgcaccagcgatgttaaagttagtatgttttttcagcgcatcgccgtcagtgttaatacctttgttaaatcttagtgcaagttctgtaaggccttttgagttcacgtcatagacatttgtagctccaggtaaatggcctactttagaaggatctccggtaatagctagtatttcattgacaccaatgagtgataaacctaggagatgagactgtaatcctattaaattacggtcacgacatgtcacatgtacaagaggctcaatatcgtagtgttgtttaattaaacttgccgctgcgatgttacttactcttacggtagctaatgaattatccgccaatgtaacagcatctatgccagcttcatctaatttgcctacattatcgaaaaatgtatcagtatccaaatgttt

SEQ ID NO: 3692 - DNA, 3269 bp, Artificial Sequence
  Description of Artificial Sequence: synthetic nucleic acid sequence
tctatcagtaagcgagcaaattgatgataaaaaaatttatgttattagtcttaatgacaacgcggcagatggtcgagatatttcatggatatacgatgcagactttgaaaagctagctacccaagatatcgaagctatcattgtaagtggtacacgtgctgaggaactacaattacgtctcaaacttgctgaagttgaagtgcctattaaggttgaaaaggatatctacaaagcgactgcattaactatgaaatacagttcatttacggtagcaattccaaactatacatcattaacaccaatgcttgaacaacttaatcgctcatttgaaggagggcaatcgtaagatgaatgaactaacggtttatcatttcatgtcagataagcttaatttatacagtgatattggtaatatcatggcattaaaacaaagagctaaaaaaagaaatattaagataaatgttaaagaaatcaatgagactgagggagtcacatttgatgattgtgatattttcttcattggtggtgggagtgatagggaacaagcgcttgccacgaaagaattaagtaaaattaaaacttctttaaaaaatgcaattgaagatggtatgcctgggttaactatatgcggtggttatcaatttttaggtcataagtatattactcctgatggtaccgagttagaaggattgggtgttcttgacttctataccgagtctaaaaaagaacgcttaactggagatatcattatagagagtgatacttttggcacgattgttggatttgaaaatcatggtggtagaacatatcatccgtatggaacattaggccgagtaacgtatggttatggtaataatgataacgatcgaaaagaaggtatacactataaaaatctattaggttcttatcttcacggtccaattttaccaaaaaatcatgaaataactgattatctacttgagaaagcatgtgaaagaaaagggatactatttgagcctaagaagatcgataacacagaggaagaagctgctaagcaagttctgattaaacgtgcaaaagaaaataaaaaataactcaatataacttaatttttaataattattgttaatcatgacgataattagttatttgtataaagacttattatattaatgcctctagaacattaatgcatgttctaggggcattttaacgtattagcagttaatgactgaattgtaaataatttatgccaatggttaattaacaaaaggtcaggaacaaagtgatgagcatttcgttctaaaatgctaaagaaaatgtggaaagtgggatgtgttgagatgaaaaaacaatgtcttctatatttatacgtagcaccttttgatatacatttaggaaacgttaatgttcattaatcttgaaacatagacactcaggtgctaatttctattacctatgaaaaaaacactttgaaacatatacttattgttaaactgtaattgaaccatacaataaatataggagtgaaaatatgaagatttttaaattgacgtcattgacactagctgctttaacgttagcctttccgttttcacatgtcgcacaagcacatacttacttagaaaagcatcaccaaacaaacgaaaccaaacaatctcatagcttttctttagaaggtgaggctggtgaaaatccaacatttttaactcaaccccaatttattaattctctagataatggtcatttaaatattaatggttatcagattcaacaagatgatactaatgatattgaatacaaaaaggtttatgatcaagaaattagagctacaagcaatcatacagcgataagtatacgtttcagtattaataatcaatcactatcacttgaaagtatgaaagatgcatacccaaatgagagattgaatcatattccacatacaagcaatgattcacaatatccagaagacggtatatatgtctatcatggtaaaatgattaaattacaatacaaagtgacacatggatttgttacgagcgtgacgataggtgaaggtgtagacgaatagttagccaaacattcaaattcaatgtattaaagagatttatgcgtctatttctatgtatcaaaagagccgtagataaactttgttctacggctttttatcataagaaataatttttttataggtgataaagtaattagttttgacgtcatattattttgcataacgtgaatctaaaattttgtatatgagtagaatttcatatatgagtgtacttttcatttgattttggtcaaactcatccatctgtttaacagaagactttagtgttgcaatagattttttttgacgtgcaaagcttcctttttgaatgatgtcattaatactattactaatattaatcaatgctatcttctcattagcatcaaaagcaatagacgtatgtttgggtaaataaataatgttagataaatgtgaaataaataaacggttgttataagcgcgatttgtaaggcgatttaataatttccaattatcttcatttttatgataatgaagttcatctctttggtaactcattaatgtttcaactttttgagcaataatatttaattttgataattctttactagtcttttccgagctgaattttcctaataataactcattacagcgttcataaaataaacgatacatttttttctcactaagggctaattgctcttcaagttgatgataatacttaggtggtaagatgataaaattgactaatccagctgtaacaagtcctataagagctgtaagtaaccgtgaaaagaaattgaacacatatgcttcatgtatacctggaatcattgcaacggaagttaatactgcgacagttgttcctacctgtaaattaagtttagtgcatatcagaatggtaaatgtagcacttaaagcataacttaacggtgattgatcaccgaagacatatgtaaagacaacagcaaataacgcaccgataactgttgctggcagccttttataccccttttttaatgatgctttagcagtaggttcaattgtaacaattgcagtaagtatggcaaaaattggagtgaggtttaacaacatacaaaataaagacgtaaaaaaagtagccaaaccagttttaatagttcgcgctccaattatatgtctataccatttatcattcatatcatactgactcctcttaagaaaaggaaattcgaaaagactttactttagacaaattctctttctttgaaaattaatttaa

SEQ ID NO: 3693 - DNA, 3859 bp, Artificial Sequence
  Description of Artificial Sequence: synthetic nucleic acid sequence
tagtgtcgatacctaaaacaagatattcacttaaagcacgaatgcctgtcataattgattcttcacgtgtaggttcgtgaactataagttttgccaccatggagtcatagtaaggtggtatcgtataattagtataacatgctgattcaattctcactccaaaaccgcctggagcaagatattgggtaatcttgcctggtgatggcataaagtttttgtaaggattttcagcattgattcgaaattcaatagcgtgaccgttaatggaaatatcttcttgtttaaaaggtaacgcctcacccatagcaactttgagttgtaattttactaaatctactcctgttaccatttcagttactgggtgttcaacttgaatacgtgtattcatttccatgaaataaaattggttatcatctaaatcatatataaattcaattgtacctgcgttttcataatttacagcttttgcggctctaattgcagcattacccatttcttggcgtttatcttcacttaaaactggtgagggtgcttcttcaacgagcttttgcattcttctttgaattgtacaatcacgttcacctaaatgtataacgtttccataagtatcgccaataatttgaatctctatatgtctaaagttttctataaatttttctaagtataaaccaccatttccgaacgcggtttcagcttcttgttgtgtcatacggtaaccagtttcaagttctttctcatcacgagcaacccgaataccttttccaccaccacctgctgtggctttgatgataactggatagccgatttttttagctatttttttagcgtcatctatactttgaataagtccttcacttcctggtactacaggtacattggctttaatcatttcagctttagcaatatcttttattcccattttctgaattgattgatagcttggcccaataaattttaattggcatgcttcacacaattcagcaaaatcaccattttcagccaaaaagccgtatccaggatgaacaccatcacatcctgtagaagtagcgatagataaaatatttggtatatttaaataagaatcttttgataaagtaggaccgacgcagtatgcttcatcagcaatttgagtatgtaatgcatctttgtcaccttctgagtatatagctactgtttgaatacctaaatcgtgtgccgctcttattattcttactgcgatttcaccacgattagcgattaaaatctttttcattatttcaccttaaataacggctggccatactctaccatttgtccgtcttctactaaaatttctatgatttcacctgttgtttcggcttgaatctcattaaataatttcatagcttctaatatacaaacagtactttcattcgtaactttatctccaacttgaacgtatgcttcttcatctggtgaaggtgatttataaaatgtaccaaccattggtgcattaatggtattgtattcattatcactactttgttcatctttagagctatgtgatggcttttgttgtgtttcattatgcgtatgatttatcggttgagttggttgttgagtaacttgcggtgtaactatttcagtctctttttctttttttaaattaactacgctacctttattatcttcaatatttatttcagttaaactagattgatcaagaatttcgattaattcttttatttctttaaagttcatttcttactgactccttaggtttgttttcatctacccatctattttacttgagtaaaagattcaattcaagcatgttcattaaacatcaaaacgtcggtatttatttaaatattttagagattgactaaaagcataaaaaagacactcgtttcgttttattttttgtattttaacgaaacggtgttttaaaagttactttgctgaattgtacactctgtatatcaactcgatattttagataagttaccatttataaatcaaatgatttcagttaatatttctatacctttttctaattgttttttagtgatggtcaatggcggtaataacctaatcacatttttaccagctgttaaaatgattaaccccatacgtttagcttctcgcactacttgactaggatcattagtgacctctattcctaccattaaacctacaccacgtacttcaattacatttcttttatttactaaactttttcttaagttttcaataagaaattgcccctttgattgaacatcattcagcaaatcagcatcattaatgatagaaagcgtttggtttgcagcagccaatgataatctatttccaccgaatgttgtaccatgagaaccgtagccaaatgcatgacctaaattttttttgcctaacattgctccaataggaaggccattacctaatcctttagctaatgtgatgatatctggagacaattgataatgttcatgagcatataacttaccggttctacctatgcccgtttgaacctcgtctacaattataaggatatctttttgtttacaatactcatttaattgcttcataaataaagaatcagcaggtagtactcctgattcaccttgaattatttctataattacagcagcagtattatttgaagttaatgatttaaatgaattaaaatcattaaaaatagcaaatttgaatccaggaacaaccggaccaaattgatctgtaattttcttctgtcctgttgcagacattgcgccgtacgttctgccgtgaaaagactttttaaaagcaataatttccgacttaccagtagctttacgtgcgagtttgatagctgcctcattcgcttctgttccgctattacaaaagaaagctaaataatctcgttgaccaattaatttttgagccacttcctcttggatactacttaggtataaattgggtgaatgccatattaaattcagttgattataaactgcttggtaaatttccatattaaaacccagatttgtcacacctatacctgacgaaaaatctaggtagacattattatctttatcaattaattcattttgattagcatcaacaaactctatattgtcacgcttgtaattattaaaaagataactcatcattaatcaccccttatgattgttcctttttgtaaattatttgcaattaaaatcgattcaacaccagattctaatgtttggattgcactctcaattttaggtatcattccgcctgtaattattttattttcaatttttgtttttgcttcattaattgtaagagtagcaagcgttttatctttttcaattacaccagggacatcagtcatatatactaatttttcgacttttagtttcttagcaattgcggtggcgagatgatcagcattaacattaagatactccccttgctcatttacacccaaactagtgataattggtattatgtcgcgtgataacattttttctaatagcatcgtgttgatttctttaactttaccaacgtaaccatagatatttttatttaaaaattcggcgcttacaagttcttttatcttttctttaaattgaaaaaattctaaattagattctttaagtctttctaaaagttgatggccaactatgttaattaaagcatcatatatgataggtaaatcatttttagcagttactctcatgccatcaattttaatagttgaatgattgtttttagttaataaattactgatgacttggccgccaccgtgaacaataattatttttttgttttcaaggtgccaagcattaatttgttgtataaatgcgtcgtttaaattttctatagctataccaccgagcttaattacgatgatgtttttcatatgttcctcctaagt

SEQ ID NO: 3694 - DNA, 3189 bp, Artificial Sequence
  Description of Artificial Sequence: synthetic nucleic acid sequence
gctttaagtacacaggaatcatcattttagcagcacctatgagtaataccacgttaactccaagagaattaactcttaaagatccaaataaaaaggttacacaagctgcaactattcccatatttgcagcaccacttcctaaaccagtaaggttaattgctgttgctatagcaactaacgagattggagttaccattaataaagaaaatgttacacaaattaatatagacattaataatggatttaattctgtaaacctgtttactaattttcctagtgactgcgtaataacttgaacgtaaggtaatgttaataaccctattaatccactaattacaggaactaaaacgggtaaaataatcatttctaaggaacctaatttcccctctaaaaacatataaatgaaacacgctaatataactactaaaattacatttataatatctccaattccttttaattcaattgtttgtccattatagtgtacagctccagaacctagcattgctgaaataccaataattgcagcacctgtacctttaaatttaaattggtgcgcagcaagaacccctataataaaagccataaaagattgtatgattgttactagctgaaaaatcgtttctagtacatgattaccttctttgaagaattttaataattcacctaataaggcattaggtaacagtgcaataactacccctgctcctactgcattcaaaatgttgttaaaaaatcgctttccatttatttgcgaatgactcatgttaaacctccatttaaaacattaaattaatcgtattatagaaacgaaatataaacaatcatttaatatcaaatttcatgtcaataattaaagaaatttgagcatttatacttaatagggataatatttagcatttacttatttgataaaaaaacatccaaggttaaattatatatttaaccttggacgcatatgttatatatattttataaaaactaaatttaattactgaatatttatatcaggtatattgtttcttaggaattgttgaacgaaatcattaatataaacactgctattgtatttattatctacgccaccataatgtattccaataacttgatttttaccattaaatactggagatccagagtttccacctacagtacttaggtcatatcttaattcctcgccaccaatatagacaactttacctacactttcccacattgtggctaatggtttgtcaccagggtaaccagtaacagtgatgttttcattaattctagtgtctgtattgctacttatagttgcaggtttaactacttgaccaatatgttgattatgttcgtttggtgacactcttaagattgctaaatcactattaccaggatacggtatgatttcttgacccacaaatttgccattaggataatcattttcatttttagctgaaggatggacactaatatttcttggattacccttagctccattaacaacgtgtttattagttaatatttcattttcacctacaacaacacctgaaccactcatatatccaccatctattggtatataaataaaactaacagcatcataatgaccttgtgtagtattaaaaatttgatgtctattattattaggtaatattacacttgggtaacttttattttgacttggtttgatattatgactcgaactattaatatctaaaacatttttgttttctgtgccaagtgaggaatgattatggctttctgtatcggtttttgcataagaagtatttaccattgtagtagttgctaacgctgcaattgtcattgtacatatagataaaaatctctttttcatatgataacctccaaaaattataaaatttatttttttaataacagctgttacaattaaattatatatataaactgataaaatatgtaattaaatgcctaaatgttaaaataaaaaccctatctgtttacattatattaaatattatatttattttttaaaatattttttataagaatttggacacaattattagtaacttactcattaataaaatttttgagactatcaaatgataaataacaattagcgcttaaataaataaaaaaagagtgaaaacattaaatttacaatggtttcactctaaaaatataaatgtataccggtggtcgggatcgaaccgacactccaataaaggaacgggattttgagtcccgcgcgtctgccaattccgccacaccggctcaatatataaacaaaaaacttcccaatggaagtgaataatggagcggaagataggatttacacctatatctcattccgggaaggaatgtgttctgagagttgaactactcccgcatatttaaaattggagcggaagataggatttgcacctatatctcattccgggaaggaatgtgttctgagagttgaactactcccgcataatattaaaatttggagcggaagataggatttacacctatatctcattccgggaaggaatgtgttctaagagttgaactactcccgcataataacctggaggcggcaaccggatttgaaccggtgataaaggttttgcagacctctgccttaccacttggctatgccgccaataactgggctagctggattcgaaccagcgcatgacggagtcaaagtccgttgccttaccgcttggctatagcccattaatataaagggcggttgaagggaatcgaaccctcgagtgtcggaaccacaatccgatgcgttaaccacttcgccacaaccgccatggcaggggcagtaggaatcgaacccacatcaaaggttttggagacctctattctaccgttgaactatgcccctatataagatggtggaggggggcagattcgaactgccgaacccgaaggagcggatttacagtccgccgcgtttagccacttcgctacccctccaaaatggtgccggccagaggacttgaacccccaacctactgattacaagtcagttgctctaccaattgagctaggccggctataggtatggttcaggacagaatcgaactgccgacacatggagcttcaatccattgctctaccaactgagctactgaaccaaaataagaaatcgtaatgacacctctttgaaaactgagtcatgtatgttctaaaaaacaatatgcatatcaactgtttcatcac

SEQ ID NO: 3695 - DNA, 3571 bp, Artificial Sequence
  Description of Artificial Sequence: synthetic nucleic acid sequence
ggatataatcatttgtcccacttattagtatattacgcacagcaccaggtgttactgttacatcaccagttttagactgagttatggttggttgattaggtttagcatttgtaactataaatttagctgattgtgatgtttgccaaacaccccagttgctaggattaacgacatcataagtaccagttttaacaaaaggagttctagtatatgctaatgattgccattgatcactagtagttcctgtactttgctggttccaataaaatttccaaccatctattggtaattcctctccattttcaagatgtttgtaatagcctgcccatgttcctttagggaatgtatctcctacttgaattttgtagataggttgagtgaaatcaaaattatatacccacactttaacaggaacttctaatggtgtagatatgccaggataattaacaagtgcaattaaattttgtacaccggctatgtttttatcaggttgacgattgtctttccaagaagctgttcctccaagacggttattattttcaaaaataatataattataaacgtcagtaccattggttaagtttcgtcctttttgatctcttactggattcttagctgtaactgttggatagattgttattggaatatctacagttctcgtaccttgatgattaggtagagtaactgtaacagtttttgttgtagtaccgatgttgtttttccaactattaggctcctcgttccatgtaagagtagaatgggctggtatattacttatgaaactattgaagtcattaaaattatagtttgtacctttaattattttaataccatcatttttagcttgcatgccagcggtaacatttacttgatcactgttttctgaaaaaacacttatatcttcagttgtatttgaagcaattccactactattttgtttagtgtacgttacattatttgtcattgaggttttagcagtaatatttccggttggtagagtgccttgaattgttacagtagctataccattagaatctatagttgtatttgtattaggaataacagttccatttgattgatatagagtgacttgtgcattttgtggaacatttcgaactaaaatttgttgaccatttaattgtccttttgaaatcacactattactatcaataacaggtttatttggtttgactttgaatagtacattaacgttttcagtttggccgttttgataaactaccgtaactgttttagtaaatgaacctgcattacgagaacttggtgtgcctgatccttgggcccatctgaagtccatatgttctggccaatattgatttactgcttgaacaaaatttcctggaaatgcaataaaaactaggtaaggaaatatttataaaaacattaatcataatggtttgtattatatgttgtttcatatttcccattattattatgagtggacaaaataataaataatcattcttagagtaggctgggtgtcaaattcaataggcatccagtctattctcgttttgtttttataaaaagtaatcagttaaaatgatacttaagtaacttataccgatgatcacaccaacaaagaaaataaaagaaattgaggatgtccatatatctctaaacttacttttctgcacctctttaggatctttaccattaataaatgctaatatcctgtcgtatgtttcaatatcatttttgattttaattttttctaattttgtagaagcaatgatacctattaaaaatactaaatatgttattcctattcctaaccaatgaaagtaatgaatcataggacctatgagaacacttcctaataccattggaattatcatcatccatgtccaaaagtctaattcttttttaatatttttgatttgcacgtttttcaaatcatcctccactagttcgtctagagataccttgaagagttgacacataataagtaaattatgaatatccggataacttttatcattttcccaatttgaaatggtttgtcttgaaacaaacattttctcagccaaaaattcttgtgaatacccatctctttctctaaattttttgatttgattgctaacattcattacgttaaactccttaattatgatttgaaatcatttaatattattattaaatcaaatcaggttttctctataaaagctatcaaatagtttttgcgatgtcacctttatcattgtcaaaatgctttgacatagtatggttaaaggttttaatagactgaccttaggctaacctgttacatgaaaaacaaaaaacgctcctcgaaaggagcgtttttcatatcaatgatatatacgtaaaacttgattcaacatctttttaatgtaattttcatccagagtttcaggtttaattaatatattaaaatagatgggtgagaagattaaatcaataaacaaatcttgttcttcctcttgtatgtgcttacgaacaatctcttttaaaactttgcgattatgattaaagtaattagtcataaaagtttctctagcttccatttgttgatgactaattaatatttcaatcacagcactacctagttttgttttatagatatcttttatttttactaaaaactggaataaatcatcatataaattatcttgattatgaatcgcaatatattgagattgttcaataaacgcggacatgataattgaagatttatccttccaacgtctataaatagttgctttagaaataccagtattctcagaaatttgatctatagtaatatctctaaaatgagtcgtttccaataaacgttgaatctcagtataaatttttttattgattgttggatcttttggtcttccagccatgtttatcccttcttttatgtgctatgaattccacaatttcaaaaataatcaatgcacttacaaaccaagctacaaaaccaccaataatactcaatagccacatatgtgtagcttgtagtaatccccaggttgctagtatactacataaaactcctatcataccgaagactgcacctctgctcacatgcatagctacctcattgccaaattgcataccagtaatacacattgaaactaaaaacactgcgggaaaggttgcaaatatacctccaaattccttccatggaagcacgacagaaacaatataactaattaaaacagctaaaccaccaactgaaaatttaataattgctaacttcatttttaatcctccaatttaaatatgtctgactaagaaaatcgcaacagaaatcacaaaccagcaaagaattgcaaatactgttccacttctataatttttcttaccaataaaaattgaattaaagaacacagttacaatacatgagacaatcccaacaattgctcctgtacttaaatgaattgacatttgaataagttgctgtcctttatggtctatagctaacgctataatagctgcaaggtagactgccggcatagtggcaataataccacctaattttcctcctactttatcagccataattgatgcaagtgcaacagcaaatcctccgataacgaaatgt

SEQ ID NO: 3696 - DNA, 3612 bp, Artificial Sequence
  Description of Artificial Sequence: synthetic nucleic acid sequence
ctttatcatcgctgcattgttaatcattttcatgcaagcaaccattaaaaatcctactcaattagaacaaggacataaggaacctaaaagatatattttcgcctgggttctattaggattttgtattgtgatgatttaccaagtcatcatcagtataattttatttgccatcaatggcagtccgcaaagaagtccaaacactgaaaggttaatggctattgctaagcaaatgccgatatttatcgttttaatatccatagtaggtcccattttagaggaatacgtttttcgtaaagttatcttcggagaattgtataactttataaagggatcacgtgtggtaagctttatcattgcttctatagtaagttctctaatattcgctttagcacataatgacttcaaatttataccggtatattttggaatgggagtcattttctcacttgcttatgtttacacaaaacgaattgctgtacctataggcatacacatgcttatgaatggttcggttgtattaactcaagttgtgggtggagattctattaaaaaattgcaagaacaagcaacatttatattccatcttatattttaaaataaaagcatctcatcatgtataaattaattatcatacatggcgagatgcttattttattactcttttcttctaaagatatatagtccagtgactcctagaaaaattccaattattgcaatacttaacgataaaagacttcgatgtattttctttttcttatcataatctttggagtgtccatcattatttgttgttatctcatctgcactatggtttttgaagacgctatgatttttatcttctttatccgtaggttttttaagttctggcattgagccgatttctcctgtaattaaagctaaaacctgatcatctaaattttcatagtatttactagaattaagtggattaaaatattgaaatctgaaatagcttgtccctttttgtaatgaatttaaatattcatttcctctaaatgattgcttcctaaacaagctataaatgtcactatctgtcacctttccatctaattgattcaaattttttacttgattaatcaaaaacggattgtacttataagcacccgtggctaattgtctgaatctgctaattaatgaattggtattatcactactattcaatctatgttcggtattattttgagatttaaaaaagccatttttgttccatataaattgatttatattattttgatttctatgacctaagttagaattaataatattttgttgacgtttaaaaggcgcactatctccactagtacgtgtatgattaatattatggtttatatggtttatattgtttatattgttttgatttgtttgattgtatttaggcctttggggttgattcgtatgtctttgagaaggtctatttgtatttcctttagggttaccaggtttttttccggtatgtgaacccttacctgaacttgtaccagagtctgaatcactatctgaatctgagtcactatctgaatctgagtcactgtctgaatctgaatcactgtctgagtctgagtcactgtctgaatctgaatcactatctgaatctgaatcactatctgaatctgaatcactatctgaatctgaatcactgtctgagtctgagtcactgtctgaatctgaatcactatctgaatctgaatcactatctgagtctgaatcactgtctgaatctgagtcactatctgagtctgaatcactgtctgaatctgagtcactatctgaatctgagtcactatctgaatctgagtcactgtctgaatctgaatcactatctgaatctaagtcactatctgagtctgaatcactatctaaatatgtgtcattttctgagtcactatttgaaacgatatctgtatctaaatcattatccgaattcatactaattcctgtgcgactagtgtcattcactcgattgataatattgctcttagctgtatttctatcaatctgatctttagaaaaattaatgtcaataggatgattaccttcagcatgtgcttggtgactgaataatgatgtagttaccatgaaagcaaagcccgtaagcataaatgaatgtttaatgttaaactttttcataaattcaaccacctccccattacaatcttttgttagttcaagtatataaaaaaactaagcattttgcatttaaatatgattattgaaaattaatattaataaagttgaaacgtaaaagtaactatttgtaaacaacagaattcaagaatatttttattttaattattacttgataattaaatgtaagctaaagctttaccctaagcctaacaaaatttcaaaatttatgttagttcaatatagttgtatgtatagattaacatgattaaattttagatattttaaatgaaattttgcctttaactggcaattttagtatcttataactaaaacgataggcgggtgaatatattgaaaatccaaatacttcaattcaatgtagaacgtggaaatgttgataaaaatatgcaaaatatcaaaactaagtttaatcaatacttagataaagataccagtgtcgtcgtgcttccagaaatgtggaataacggttatgcattagaagaattagaacaaaaagctgataaaaatcttaaagacagctctctctttataaaagacttagcacatacatttaatgtagatatcattgcaggttcagtgtcaaatataagagaaaaccatatatataatactgcttttgcaattaataaaaacaaagaattgattaatgaatatgacaaagtacatctcgtgccaatgttacgtgagccagactttttatgtggtggaaatgtagtccctgaacctttttatttatctgatcaaacacttttgacgcaaatcatttgttatgacttgcgatttccagagatattgcgctatccagctagaaaaggtgctaaaattgctttttatgtagcgcagtggcctagctcaagactagatcattggttatcattactaaaagcgagagcaatcgaaaatgatatttttattgtagcttgtaatagttgtggtgatgatggtcacaccaattatgctggaaattcaattgtcattaatcctaatggtgaaattttagaccatttagatgataaagaaggtgtactaacaacacatatcgatgtagacttagtagatcaacaaagagaatatattccagttttcagaaatctaaaaccacatctttataaatagcatagttaaagccgtgagcttgggagagactcacggcttgataacttattattaagggaatgtttttacagttattttttcaatctattttttggggatgttattaattatgaaaaaattttagtgaatttatctatttaacatgataaattgaatgttgtttacgatagcttacatgctagaaataattacctatttaaggtagctaagaataatacgtaacactgagtccaaggaaactacagctactagcaaatgcttctcacttgcttagtttatattagtaaattattaagttgggatggctcaacaactcactaataatattaa

SEQ ID NO: 3697 - DNA, 3065 bp, Artificial Sequence
  Description of Artificial Sequence: synthetic nucleic acid sequence
tctctgcttcaatatccttaattgctttactgatagttggttgcgcaatatacaaggattttgaagcgtttgtcataccaccttgtttgacaacttcaacaaagtatttcatgtgttttatatccatgcatatccccctagttttgatataattcaatagtaagtttaattatacaacaaaattgacctttctagcgattaatatatttaaaaactataattcaaaacattttatttagtttttcaagtattttaaaaaacgaaaatatgttaaaataaaagtcggctcataaaatatattatgaggtgagatattgagcttttacgaatttatgcaaaatttcctaggtgatgacacgccattaggtgaattggttgattggattaatcaagatatcaatttccctaaagacgtgacgagccaaaaagaaatcttgacatattttcgaaatcatccatgtccggaaaacataccagtgacgagtatcaaacgggcactagctgttttcaaccaattcactaaagtataaattgatgttatgacatgactttaacatttacgcatacttatatacatggagttaatcatctcgtacctgagtgagattacattttatttgaatgtagtctcactctttttttactcaaacgattattacgataaaaatatgtatatttcattaatgttacatttactttgataattcatttcttatattgtatagcgcatttttaaatactattattattactgtcattaaataaatacattttttgggagaaagaaatgaaattcaaaaaattattatctcgtattattatcgctacaatgattacatttactggaacactctcatatcaagctattgaacaaacgcatatttcccatgctgcacataattattatggtaaaaaacaatgcacttggtgggcatttaaacgtcgtgctcaattaggtaaacctgtatcaaatcgatggggtaatgctaagaattggtatagcaatgcacgtcgatctggttatgcaactggacataagcctcgaaaatacgctgttatgcaatcaacgagaggctattatgggcacgtagcagtggttgaaaaagtatataagaatggaaaaatcaaaatttctgaatataattataatgtgccattaggctacggcacacgcattattagtaaatcgtctgcacgaaactataattatatttattaatcaaatcaaacaaaccgtcaaataagtatatccttgaagctatatatcaagatatacccgtttgacggctttttaattatgactttcttatattcatcaagatttcttgagctttggcagtattagcttgtgattcatatttgagcgcttcagctacttgcgcaatttcttcgccttttgcacctacaacaatcgctaatgatttatattgtaaactcatatgtccttgttgtatcccctcagacactagcgctctacatgcagagaaattttgtgctaatccaacagcagcaacaacttgccctagttcctgtgcattttcaacattaagcaaatttaatgaggctttagcaataggtaaaactttcgtacctccacctactgtcgctaaagtcataggaacttcaatagttccaaccaatttattacgtgagcgatcatattcccaagtagctatccctctataatgaccatctttgcttgcatatgcatgagcacttgcttcaactcctcttgtatcattgcctgtagccaatactacagcgtgtataccattcatcacacctttgttatgtgttgcagcacgatgtatatctacttgtgcaagaactgacgctcgttccatacgttgtgctacctcttcgccacttctctctcctctatgtaaatcttcaatatctatttccccttgtacttttactactgatgctgtcgcatgattagataaaatactcattaaaacattttgatttgaaaatttaacttttagatgtgcagtgattgcttctaatattgtatttaacatattagcacccatagcatctttagtatcaacaaaaaccttcaaagataataatcgatgaataaattaggtcgtcgacgtctagtaatgctcatcgctatagtatttattattggggcactgattcttgctgcatcaaccaatttagcattattaattattggacgtttaattattggtttagcagtgggtggttcgatgtctacggtacctgtttatttaagtgaaatggcaccgacagaatatcgtggctcactaggttcacttaatcaactaatgattacaattggtattttagcagcatatttagtcaactatgcatttgcggatattgagggttggcgttggatgctaggattagcagttgttccatcggttattttacttgtgggtatttattttatgcctgagagtccaagatggttacttgaaaatagaaacgaagaagccgctcgtcaagtgatgaagattacttatgacgatagcgaaattgataaagaacttaaagagatgaaagaaattaacgctatctctgaatctacatggacagtcattaaatcaccatggttaggtagaatattaattgtaggttgtatatttgctattttccagcaatttattggtatcaatgcagtcattttctattcatcttcaatctttgctaaggctggactgggtgaagcggcgtctatattaggttcagttggtataggaactattaatgttcttgtaacaatagttgccatttttgtagtagataagattgatcgtaaaaaattacttgttggtggtaatattggtatgattgcctcattattaattatggcaatcttaatttggacaattggaattgcttcatcagcgtggattattattgtttgtttatcattatttattgtattctttgggatttcttggggacctgttctatgggttatgctacctgaattattcccaatgcgcgcacgtggcgctgctacgggcatttcagcgcttgtgctaaatatcggaacgcttatcgtgtcattgttcttcccaatatta

SEQ ID NO: 3698 - DNA, 3150 bp, Artificial Sequence
  Description of Artificial Sequence: synthetic nucleic acid sequence
tgcagttgtatccattgcacgtaacgttgttaatgttgtttgaacatcttttttgtcaacaataattgtatatccaatacccatattaaatatgttatacatttcattcgttgaaatgttgccctgtttttgaagccaattaaagacttccaacgttgggaatgattgtgtatctatttttgctgataaacctttaggaagggcacgcggaatattttcatagaaacctccaccagtaatatggctcatcgctttgatatcaatatgtttctttaattcaagaataggctttacatacaattttgttggtgcaaggaaggtttctaaaaaggtttgaccattaaattgatcatgtaattgaactcctgattcttttatcatttttctaactagactatagccatttgaatgaataccacttgaagctaaaccaataattgcttgtccttcttcaacatttgaaccatcaatatagtcctctttctctaccgctcctactgcaaaaccagcaatatcatattcaccttcatgatacatttctcccatttcagcagtttcaccgcctataagtgccgtattggtttgttcgcaaccgtcacttatacctttaacgatttgctctatagtacttggcactactttattcgtggcaatatagtctaaaaagtataaaggttcagcacctgttgttaaaatatcatttacacacattgcgacagcatcaataccaattgtgtcatgctttccatagtcaattgctaattttaactttgtacccacaccgtcagtacctgataccagaactggcgctttcatttttaattgagacaaatcaaatgttgcaccaaatccacctaaaccacctaatacttctttgcgcaatgtacgttcaacatgacttgttattctttcgactgcttcatatcctgcttgaatatttacaccagattcctcatatgctttagacatgtaaatttccctcactatcaaaataatgtttattattagctatatatgatttttgacgttcacttaaatgctttttataatttttctcataatcgtaaagtcctgctggataatcacctgtaaaactttctacacacaagccatgatatggcgcatcataatcaagtcctatagactcgattaagccatcaacgcttaaataagcaagagaatctgcaccaatatgatttttaatttcctcaggagacttacttgctgagatgagttcagctgttgtagatacgtcaataccataaaaactagggaacatgaattcgggagaagcaattcttacgtgaatgcggttagctcctgaatccttaagcattttaactatgcgtttaatcgttgtacctcgaacaatcgaatcatctacaagtacgatatctttaccatcaacaatatccttaacagccgacagtttcacacgtacaccttgctctcttaattcctgagtaggttgtataaaagttcgagcaacatattgatttttaactagtcccatttcatatggtaggcctatttcttcagcataaccacttgctgcagataatgatgaattaggtacgcctattaccatatctgcttttgctgggttttcctgtgctaaccgtttacctgatgcctttcgtaccgcatgaacactggtaaaactactgttggaaaatatctttcagatttatataatttaagttatgtggatttagataattttattgaagtaaatgaatgtaaatctatacctaatatatttaatgatatcggagaaaaaggatttagatcattggagactagatacctaaaatcttgtctcaatactttcgatattatttcaactggaggaggtattatagaagatacgaattcattaaagctcttaaaaaatcaaaagcatgtagtttggctagactgtgacattgaaatcattttcaaacgagttaaaaatgattcacatagacccaatgctaaaagtaaaaatcttaaccaacttgatgccttgtattcttcaagactttcaagatataatgaaatcgcattcatgaaagttgatagtgcacagagtgtttctgaaatttgcactttaattaaaacaaaattattaagcgattgatcagtattagagagaatagagatcaaaacttgaatcattataagttaaacgtttttagtctattacaattttgactctctatcgccgaaggtgcaagtgaaataacgaaactctcaggcaaaaggataatactgtaacgcattcctgaaatgtgtattaaaacagggtagctttatgctatcctgttttttaaaaattattaattgggggtacacgtatgacaacagatttgaaaaaaacacctttatatcaaaattacgttgatagtggtgctaaaattgttgagttcggaggatgggcaatgcctgttcaattctcaagtatcaaagaagaacataatgcagttagatataatgttggtctttttgatgtaagtcatatgggagagatagaaattagtggtaaagatgcagaacaattcatacaatacatcctttctaatgatacaaatcttctaacaaatgataaagcaatgtatagtgcgttatgtaatgatgagggggcatcattgatgatttagttacatataaacttaatgaaaaccactacttgcttattgtaaatgcagccaataccaataaagattatcaatggattaagaaacatagctctaattttactgtagatgtgagcaatacttcagacaaatacggccaattagctattcaaggtcctcattcaagagcattaataaatgaattagtggatatagatgtaagccatatggcaatgtttgaattcaaacagaacgtacaaatctttggtaaatctattattctttcgcagtctggttatactggagaagatggctttgaaatttactgtaagcaagaagatactaaggatatatgggagcaattattagaatacgatgttacaccatgcggtttaggtgctcgtgatacgctaagacttgaagcaggattacctttacatggtcaagatttatctgaatcaattactccttatgaaggagggatagccttcgctgctaaaccgttaattgaaaatcattttattggcaaatccgt

SEQ ID NO: 3699 - DNA, 3123 bp, Artificial Sequence
  Description of Artificial Sequence: synthetic nucleic acid sequence
atttatagcatcattttgttttttataaagattgctaattacgactaagaatacgtcaatgaactaataccacttatcttttcaattaatcatttattttgttaattattcgtttgtaagctattttattatataaaaccttcccgaaattgaatattgtaaccataaaatgtaaatttctgtcattattatagcataaaaagaggccactgaacttatgttcaatgaccaatagcaaagatatttaaattatttagcgcgattagaagtaccgaattctctaattttacctttaactgtctctttaattgcttcacgtgctggtcctaaatatttacgtggatcatacacatctttgtcgttgtttaatacttcacgaactgctttagcagacgcaatttgattttcagtattcacgttaattttagcagtaccataaggaatagctttttgaatatctttagttggaatacctgtaccaccgtgtaatactaaaggtaatccagttgaagcaccaatttcttccatctctttaaatcctaatttaggttcacctttatatggtccatgtacagaacctaatgctggagctaaagtatcaattccagttttttctactaattcttgacattctttagggtctgcatagataacgccatcagcaactacgtcgtcttcttgtccaccaactgtacctaattcagcttctacagaaacgcctctatcatgagcatactcaactactttagaagtgatttcaacattttcttcaaaaggactatgagatgcatcaatcattacagatgtgaatccagcatcaattgcttctttacatttttcaaagcttgaaccgtggtctaaatgaattgctactgggattgtgatgtttaagtcatgcattaaaccttctaccattttcacaactgtataaaaaccactcatataacgagctgccccttcagaaacacctaaaataactggcgcattctcttcttgagacgcttctaaaatagcttgtgtaaattcgaggttattaagattgtattgaccaaccgcataaccgttttctttcgcatcgattaacatttctttcattgaaactaaaggcattaaagttcctccttgagtgcaacagtgcacgtttttttcaacgtcattatatcaaaaatatatactgattgcattcgaatattttatttaatattgatattttttataattagttgtttttacgtttttggaagcgaatacatttcgaaaaatgttcacatattgcatatctatctaggattatttacaatatttcagtaaagagattggaggtttacaatgtcaaaaatcttaaacacacaattaactggtatttttaatcggcttgaaaaacaagagttggatattcaaatggcagctcaatgtctcattcaagcaattggtggagaaggacatgtctatatcaaaggctacgatgatttaaaattctatgagtcattcatattacaaagccatgaaaaattagcgtctagcttaccacttgaagatttacaaaattttaacgatatagatacaacagatagggtactgttattttcaccatactacacttcggaagttgaaagtgatgtacttcaacttattgatttagatgtcgatttagtgcttatttgtaataaccctaaacgagatgattttcctaatcatttaattcattatgttaatttatcaacacctaggcccattgtttacacagaagattatgataaaatcattcaaccacatccgatggccttaaattatatttattatgatatttatactcaaatgattgagatgactagagacctagatttatagaatatgtgtgaagtcgttcaattattttctataaaataatttcatccgtgtgattaactgatgaagcaacaacgtataataattataaccaaaacatctaatctataatgataaataaagtacactgttaaagttttaacaggcaattaaaaatggtcatttccttgttgcttttaaggaaatgaccatttttatttatttttatattgtttgcgtatcaaaacaattatttttgttggtaattcaacgccgcttctacaaatgatttaaatataggctgtggacgattaggtcttgataagaattcaggatggaattgacatgcaataaagaaatcatttttaggtatttcaataatttctactaaacgaccatctggacttgtacctgaaaataccataccgttactttctaattgttccctaaactcgttattgaattcatatctatgacgatgacgttcttcaatatcgtttttattataaattttctctgccaatgtaccttctttaatgtggcaaggataaagaccaagtcttaaggttccacctaaatcttcaatatctttttgttctggtaataaatctataattggatatggtgtacttggatctaattctgctgaatgcgcaccttcatagcctaaaacatgacgcgcaaattcaacagttgccaattgcattcctagacaaatgccaaagaatggtatgttattctcacgggcataacgaatagctgcaattttaccttcacttgctctgaatccaaatccaccaggaactaaaataccatcaacgtcggataaataagcctcaacattatcatcattgacctcacttgaatcaatccattttaccacaacgtcttttttaaatggataaccagcatgcttaagtgattcaacaactgatagataagcatcttgtaagctcacatatttaccaactaaaccgattgtaattttaccatctaaattattaacggtatttaatagatgtttccactcatccaattgcgtttcatacttggcatttaattgtaaacgttgaataacaatgtcgtccatattttgcttactaagttgtaacggaatttcataaagagaatctgcatctctacattctataacactttcctttttgatatcacaaaatagggcgattttgtctttcaaatcttgtgtcatttcgtattctgtacgtactactattaaatcaggttgaatacctagacctcgtaattctttaacactgtgctgtgtaggttttgttt

SEQ ID NO: 3700 - DNA, 3272 bp, Artificial Sequence
  Description of Artificial Sequence: synthetic nucleic acid sequence
atgtccacgatgccacgctcattctcagctgccgtttcaatagcattttcctttaacattgacgcattttgagtaagtaactcattcgtagtatcggtaaccgaacgttgtgctgaaacagcatttctttgtctcatcaaagttagggcaatagccatttgatttttccataaaggaatacttgttaaaattgaactttgaattttttcggctaaagcttggttgacattttgtatcatacggatttgaggtgcagtttgaatagcaatttgcctagataattgtaaatcataaatgcgcttatctaaacgatccacaaactgttccatatcagcagttgcctgaatatccatttgattaccagtttgatgcgccttttcacgtaactgtggtatggtttctgtcaatatctcttttttctttttttgagccgctaagatatataaagtaacgttatcaaaataagttttattttgctgatataattgatcaagaaattcaacatctttagttaactgatctttatgtttttctaattgaatagtaatacgatcaatttgagaacttacagattgcattctagaaaacacttcattaatagaagctttagtacgtttaaataaacgctttaatctagattgtttttctggatttatgtcatttggatttacagattttaatttccccattaattgacttaaagtttccccaactggtcccatatcttttgattgaacatcatctaaaatttgatgcgaaaaatgagacatcttttgttgaagattagcaccatattttaacaatccttcatgattaagtggctcaatttgctcacttattgatttaattctttgtttatcattttcagttaattggatttcaagatcttcagcgattgtatgatgatcagttgattgattattcatatagtaatcaagtggatgtgactgattactacttcgttcacttaccatctcactcatctctccatttctattaattattatgtcgacgttgctgttctaatttatttaattctatttcaacatctagtcgctcataatcttcctcattaagccttttaaggtcagcaatgagcgttctctttatttcatctagagtaatacgtgtttgttctaattttagcttttcatcttgcgacttacgtggcattcttgcaagacgtgtatacgagtctactaagttaagtgcattatccaaatgagaatagaaaaagctttcaactttaaaaaacatcgcgggtctttgcttaatgcttgtatgaatagaacgagaaattcgatatatatcatttacttgtctaaaatctttgattgaacgaatattaataaatgactttaagatatttctaattttagtatgtgcatgatgaagctgtgattgaacatatctgtaatctcttcttgataaaccaatttcattaagatactttcgtgaagtgagcctttgcgtagggaagtatgatgcaatgaaactaccaaaactgataagcatgtctataatgaatgataaatccaacgcaaaaacagtaataagccaaacaataaaggccactggtatacccactaacactccaaatatacgtgaaatgttatatctcaagtgtcatcttcctttatattaaagtcttatattataaacctaaattgtcttaaactctgataaagattcatcaaggtctaattcttcaatattgtaattagacacttgtgaagccggtgaagcaccttggattacagaatcaataaactgttctaattctgtatcgtcgccctgagcatatatatctacgtagtcctcaacattttggactgtacctttaatattaaattgatgagcaatacgttgcgtgtaaaatctaaatcctacaccttgtactgtaccaaaaacttgaatatgtttacgttgcataaaatcacctcttgtctttattatacgtattttaattgtaaaaaactaatatttgctattcaaaaaattgtttatatcacaagtcttgaaacttgattttaaaacatgaaaagttaaaattattgatgtagctttatagtagggaaggggaaattaatatgtggacagtagtcaagatcagggctgactacgaaggttggtggctatttgaggattggccacaaaaaattgtggaacaatcagaatttactacatacgaccaaatgttggattattacataaatgtattaaaccatagtaagaaatgttacgacaattatgtagtagggaagtataatatacatgctttttacaacaattgcgatttaaacttttgtgaagactgtgaggaagatttacaaatattttatagttttattattttaaaaaataatgaggtttattttaatcttccaaaaatagattgaatgataattttctataattgtattgcaatttagctatgactaaactataatgattattaagcaattgttttattccatattgcaaagaatatttgatttatattaaattttagacatgtattttttgtaatatgcgaataatgcatattgaaagaatttagtcttggaggtttcagaattatgaaacaaggtacagttaaatggtttaatgccgaaaaaggttttggtttcatcgaagttgaaggagaaaacgacgtattcgtacacttctcagcaattaaccaagaaggatacaaatcattagaagaaggtcaatcagttgaatttgaagtagttgaaggcgatcgcggtcctcaagctgcaaacgttgttaaactataataaatagattgtaatcattgactttaactaacaccttaccaagcagtaaggtgttttttatatcaatacataccgtatcacagaaggaaattgattttaatttctttctgtttttttatccccaaaataagaattatgagtatctcattatttttgcatgtctgtgtctaaagacaagcaaaactttcgttaaataatatagcctgcaatataattttttattgatttattaatgtaaactctttataatttaaaaagataagtaggggggaggagacaatgttatgccaaatccttttaaattattgcaggtttcaattggtcgtttttattttggttaccgtggtcgtttcattaaatggtaaattttaaaattgaaaaattaagactaaataatttattcatatcactaagtattgttattattactactattgtactaaatataagcattggaataatagcataccttaaattatctgaatattgtga

SEQ ID NO: 3701 - DNA, 4042 bp, Artificial Sequence
  Description of Artificial Sequence: synthetic nucleic acid sequence
cagaagcggaacgaatcagtaacgatttaacacaagctaagaataacttacaagttgatactcaacctttagaaaaaataaaaagacaacttcaagatgaaattgatcaaggtactaacacagatggaatgactcaagattcagtggataattacaatgatagcttaagtgcagcaattatagaaaaaggcaaagtaaataaattacttaaacgtaatccgacagtagaacaagttaaagagagcgttgctaatgcacaacaagtcatacaagatttacaaaatgctcgaacttcacttgttccagacaaaactcaacttcaagaagctaaaaatagattagaaaacagtattaaccaacaaacagatactgacggcatgactcaagattcgcttaacaattataatgataaattagcaaaagctagacaaaaccttgaaaaaatatctaaagttttaggtggtcaacctactgtagctgaaattagacaaaatacagatgaagcaaatgcacataaacaagcattagacactgcacgttctcaacttacattaaatagagagccatatatcaatcatattaataatgaaagtcatttaaataacgcgcaaaaagataattttaaagctcaagttaactcagcacctaatcataatactttagaaacgattaaaaataaggctgatactttaaatcaatctatgacagcattaagtgaaagtattgcagattacgaaaatcaaaaacaacaagaaaattatttagatgcatctaacaataaacgtcaagactatgacaatgcagtcaatgcggctaaaggtattttaaaccaaactcaaagtccgacaatgagtgctgatgtgattgatcaaaaagctgaagatgttaaacgtacgaaaactgcgttagatggaaatcaaagattagaagttgctaaacaacaagcacttaatcatttaaataccttaaatgatttaaacgatgctcagcgacaaactttaactgatactataaatcactctccaaacatcaattcagtgaatcaagctaaagaaaaagctaatactgttaacacagcaatgactcaactgaaacaaactattgctaactatgacgatgaattgcatgacggcaattacattaatgcagataaagacaaaaaagatgcttataataacgctgttaacaatgctaaacaactgattaatcaatctgatgctaatcaagcacaacttgatccagctgaaattaataaagttacacaaagagtcaatacgactaaaaatgatctaaatggtaatgacaaattggctgaagctaaaagagatgctaatacaaccattgatggtttaacttatctaaatgaagctcaacgtaacaaagctaaagaaaatgtaggcaaagcttctacaaaaacaaatattacgagtcagttacaagattacaatcaattgaatactgctatgcaagcattacgtaacagtgtgaacgacgttaacaatgttaaagcaaatagcaattatataaatgaagataatggtccaaaagaagcttacaatcaagccgttactcatgctcaaacattgataaatgcacaatctaaccctgaaatgagccgtgacgtagtaaatcaaaaaacacaagcagtaaatactgcccatcagaatttacatggacaacaaaagttagaacaagcacaaagtagtgctaatacagaaatcggtaacttaccaaacttaactaatactcaaaaagctaaagaaaaggaactggtaaatagtaaacaaactcgtacggaagtacaagaacaacttaaccaagctaagtcactagatagttctatgggcacgttaaaatcattagttgctaaacaacctacagtacaaaaaacaagtgtttatattaacgaagatcaacctgagcaatctgcctacaatgattccattacaatgggacaaactataattaataaaacagctgatccagtacttgataaaactttagttgataacgcaatcagtaacatttcaactaaagagaatgcactgcatggtgaacaaaaattaacaactgctaaaacggaagcaattaatgcacttaatacattagctgatttaaacacacctcagaaagaggctattaaaacagctattaacactgctcatacaagaactgatgtaactgcagagcaaagtaaggctaatcaaataaatagtgcaatgcacacgttgagacaaaacatttctgacaacgaatcagtaacaaacgaaagtaattatattaacgctgaacccgaaaaacaacatgcctttactgaggctctaaataatgctaaagaaatagttaatgaacaacaagccactcttgatgccaattcaattaaccaaaaagcacaagcgattcttactactaaaaatgctttagatggtgaagaacaattacgtcgtgctaaagaaaatgccgatcaagaaatcaatacgttaaatcaattgactgatgcgcaaagaaatagtgaaaaaggtttagtcaacagttctcaaactagaacagaagttgcttctcaattagcaaaagctaaagaactaaataaggtgatggaacaactgaataaccttatcaatggtaaaaaccaaatgataaatagcagtaaatttatcaatgaagatgcgaaccaacaacaagcatattcaaatgcgattgcaagtgcagaagtgcttaaaaacaaatcacaaaaccctgaattagataaagtaacaattgaacaagcaattaataatattaattctgcaattaataatctaaacggtgaagctaaactgactaaagctaaagaagatgctgttgcttcaataaacaacctaagcggattaactaacgagcaaaaaacaaaagaaaatcaagccgttaatggctctcaaactagagaccaagttgctaacgttttacgtgattcaaaggcattagatcaatctatgcaaacattacgtgatttagttaacaatcaaaatgtaatacattcaacaagtaattatgtgtgataacagaatctaggcgacgtttctcactttctgtattcgcttgtgcttcttggacacgtttcgataagttattgaaggcaagtgcgagctcaccgatttcatcgttaccgtatatcttcactcgttgcgtgtagttacctttagacatctcaacggtttggttacgcatatcggttatcggcttagtaatcgttcgtgcaatgaagaatcctagtattactgtaatgaatagtgatatcgctgtccctacgatgaatatctgattaatgttgttcagctgattgtatacatcattaattttcgattctatgtatatatcaccgattgtctgtttatcaactttaaccggtatattatatacccaaacacgctctttaccacttccgtaatccttaagaaccatatgatcattcgtttgccctaaggagagcgccttttgaactgaaccgtcgttaaccttttgattgataagaccacggttagactgcttggttgttgccatgataatttggtctttatcaataaagcgtatttctcctatttcttggcgattcgcatattcattcaaaaggtcttggatatccttttgagcgttgactgaacctttatctttatctttataaaccttttcaatattgacgtctaattgcttcgcatattgtgttatgttcttcttgaagttatcgagtaattccttttctaaactattcgtaaaatacaaaccgatgatttgcataccaataataatgagtagtacataaacaataacgagtttcgtgtgaagggattgtagttgtttaagccacttcataagacgctccctctaatcatgttgttggaggaagtatccaacgcctctacgtgtcacaatgtattctggatgagatggatcatcttcaattttttctcttaaacggcgaattgttacgtccacagtacgaacatcaccgaaataatcgtaaccccacactgtttgtagtaagtgttcacgtgtcatgacttga

SEQ ID NO: 3702 - DNA, 4346 bp, Artificial Sequence
  Description of Artificial Sequence: synthetic nucleic acid sequence
agctttatccattgacattcccttatctgtagaattgaatatatgtgtaatcagtacctccttgtcgatatcaagaaccatgtctggatgagtaaagatttctgcgatgttgagtgcaatgattgaatatcgactactaaacaatctttctaaaccagggaatgtttgatggagtaattcaaggatctgaaatttaagtcgattttgttcattctcgatttctagatgaaaacggacgcgttctcttaattcaaagaatattaactcatgtataggtaagctgtctgtttgtttaagcgtcggtcctaaacaagcaagcttatgagcatctgcctgatcagttttccatgatcttagagcgctcgttttaaatttggcttctaacggattcatttgaatatagttaatttgatttacacaacaaaatcgttccatacctcttgaatagatacctgtagattcaaaaatgagttgtgggtggtctaagtcattcaaatacttgagtaaataattgtaaccatttttattattctggatgaaaaactctttttggaattttccatttttataatgtgcaactacactacttcttttactaatatcaacacctaagtaatcgataaaaaaacctcctttgaataattgagaagctaaaaactttacttaacctttctcatttcattttcctatacacggtttcaagaacccaacatactacaaacgaatttcaaaaggcgagagtaaagctgacttgttttttatacggatttaaaatccaagagtctggacagtctacttctctctataactataaaaaatagctatgaaaaaatctatcgtcatagatttcttcatagctaatcttagtatgttttaaatgatttaaatattagaattttgacaaataattagaacaatcaatcgttatctcacacatagagtaaaataaactacaatttattaaacttccttcaaaataaattgttaaaattaatagaaactaatttgtaaatcaaatattacaaaatgattaatgtttaatcatgtgttcaataaaatacttagtgatacgataatcatcagttagttctggatggaaagaaacaccgaggtattgtccttgtttgacggctactattttacctccaactttactaagtatttccactccgttatccactttagcaatatgaggtgctctaataaatactccctcaatatcatttgctatccctttaatatcaagttcagattcaaagctatcgacttgtctaccgaatgaattacgctcaacagttatatctaatttatttaaataaccagactcattttcaacattttttgcaagaacaattaatccagcacatgttccaaacattggcaaatctaattgttgtaacttttctttaaatccatataaatccattaaacgacgtaatgttgtagactctccaccaggtaatattagaccatcaatttcatctagttgctctactctttttatagcaatgccttcataaccacttaattcaatatgacgtatatgttcacgtacagcaccttgtaaggctaaaacaccaattttaatcattaccaaccacgctcttgcattctttcttctagtgaaatttgattaatatctagacctttcatagccgtacctagctcactagccaattttccgattaactcataatcttgataatgtgttgtagcttgaacgatagctttagcaaatttttcaggatcttcagatttaaatatacctgaaccaacaaatacaccatctgcacctaattccatcattagtgctgcatcctgaggcgtagcaacaccaccagctgcaaaattaactacaggaagacgtccattatctttaatttgttttaatacttcataaggtgcacccaaatcttttgcaaatgtcataatttcatcatcattcataactgttaagcggctaacttcagaattaacacgtctcatatgacggacagcttcaacaatattaccagtaccaggttcacctttcgtacgcaacatcgccgcaccttcaccaatgcgtcgtgctgcttcacctaagttacgacagccacacacaaaaggaactgtaaattgatcttttcttaaatgatattcttcgtctgcaggcgttaatacttcagactcatctatatagtcaacacccatcgattctaaaactctagcttctgtaatatgaccaattctggctttagccataaccggaattgatacggcattcataacttcttcaactattttaggattcgccatacgtgcaacaccgccagcagcacgaatatctgatggtacacgctctaatgccattacggcaacagctccggcttcttcagcaattttagcttgttctgcattaacgacgtccataatgacaccgcctttttgcatttcagccattcctcttttaactcgatctgatcctactattttagacatactacttaccccttttcttattgattaaatatattttacgagataaactgatatttaaaaaggttcaatttgtacataaagataggggtcagttaattgaaagtaaatcaaccactttatttatcgttatatgaaaagttaaaaaatcaaattatcgaaggtcaatatcaatcaaatgatagatttccatctaaacgacagttaagtaactatttatctgttagccacactacaatagaacatgcatatcaattacttgtagatgagggtttcatttattcgaaacctagatctggctacttcgtttccgatatagaatcgttgccagtgatacatcgacaaacaaatcaattaaacactgataacttagaaaagaagcaacgacaatataaatatgcttttaatttagctgaaattgattctgaaagttttcctatgcacatttttagaaaatatgcgaaagacgtttttgaagaccatcagctatcactattacaacgaggcgagcgtcaaggggaatatattttaaggcaacaaatttcacattacttatttaatagtcgtggcgtcacttgtcacccaaatcaaattattgttggatcatcaacaagccagttactcgatatgataaccaatttactaaaaaaagaagaatttattattgaacagccaagttatccacctattaaacatacgcttgataaaaaaggtataagttatattcaagtcccagttgaacaaaatggaatacaaatcgaccctattttaaatacaaataacaatattttgtatataacaccatctcatcaatttccaactggttatgtcaccaatttaaaaaaaagaacacaattaatcaattggtcccatcaagctaagcaaagatatattatcgaagatgattatgattcagaatttagatattttggcaaacccatacctgcattacaaagtttagacacaaaaggaaaagtcatttatattagtactttctcaaaatctttatatccaagctgtaggattgcatatattgttttgccacaaaatttaatgcacaaatataataatcaaaaatataaagagggaaatacagtgcctgtgcatgttcaacacatgattgctcaattcatgataagtgggaaatttgaaagacatttgaataaaatgcgaaagatatatagagataaacttgattatattttaaaacgattaaagccctacaatactcaaataaagattgaaggcgcactaactggaatgcattttacaataactgttaataatggattgtcaatgaaacaatgtttaaaaaatgcgaaaaaaaataatttaaaattaaaaccttatcattacgaaaattattctaaagtttatccaaaatttattttaggatttggggggataaaaaaagaagaattagaagatcatgttaatgcattaattcattcactcgttatataaatactagattttaagaaactttaaaatgttttaattattgttacgatacacaacagtaattaaagcatttaaggttggatatgttacttaacctttataagccacatatgaaattacctcttataaaagttgttaagtagcgaatttatttattaatactttcttttttagaactatttttgcataaaaaaaagagacctttcggtctcgattaggctcatcgcatcttatacgatatttgcctggcaacgtcctactctagcggaacgtcagtccgactaccatcggcgctaaggagcttaacttctgtgttcggcatgggaacaggtgtgacctccttgccattgtcaccagacaaatgaatgattatacattcaaaactagatagtaagtaagattttgcgtcg

SEQ ID NO: 3703 - DNA, 3330 bp, Artificial Sequence
  Description of Artificial Sequence: synthetic nucleic acid sequence
catcaaaacgcatttcatagacaatttttttgaattgaagtacatcatttgaaaataatgtaacaccccactcatagtcatcaaaacctactgaacctgtaataaactgtttgattttaccagcatatttacgacctatcatcccatggttatacattaaagttttacggtcttcgataggtaacatataccagttataagtttcattgcgtcgtttatccattggatagaaacatatatattcagaatgtggtaattcagggtataatcgtgccttaacgtggggattttcataaggatcctcatcagatttgcctgctaaataattacttaattctatcactgacacataggaataagttggaatgagatagtctgcgatacgtaatttattaaactcattttcaatttgatttaactctttcatttctggacgtaaaaaccatagtaaaaggtccgctttttgacctgtaatgttataaattgcatgatcaccttgatgtgattctctagcaactgttttatctttaataaatgtttccaattcagtaatcattgcttcacgatcatcttcagcaattaaacgaaaagttgtccagtctactgcataaaataaatgtaagctataccaaccatctaaagtttctgctgcttcactcattattattcgctcctttttcaaaatttttattggattcatatcaaattctatcacaaacagtcatttaactactaaaaaaatgtttacaaaagcgaaatggaattctgatgaaaaataacgtataatttactatgtaaacgttattataagagagaattaaggaggatattatggctgatttattatctgtattacaagacaaattatccgggaaaaatgtaaaaatagtattacctgaaggtgaagatgaacgagtgctcattgctgcgactcagctacaaaaaactgactatgtttcacctatcgttctaggaaacgaagataatattaaatctcttgcttctaaacacgctttagatttaactcaaattgaaatcatagatccagcaacgagtgaacttaaagatgagcttgtagatgcttttgttgaaagacgtaaaggtaaggcaactaaagaacaagcagttgaattattagataatgtaaattatttcggaacaatgcttgtgtatactggaaaggctgaaggtttagtgagtggtgctgcacattctactggagatacagtcagaccagcattacaaattatcaaaactaaacctggtgtatctagaacatctggtattttctttatgattaaaggcgacgaacaatatatttttggagattgtgcgattaatccagaattagatgctcaaggacttgctgaaattgcagtagagagtgctaaatcagcacaaagctttggaatggaccctaaagtagctatgttaagcttttctacaaaaggttctgctaaatcggatgatgttactaaagtgcaagaagcattgaagttagctcaagaaaaagctgaagcagatcaattagatcatgtagttattgatggagaattccaatttgacgctgctattgttcctagcgtagcagagaagaaagcacctggtgcaaaaattcaaggtgatgcaaatgtattggttttccctagtctagaagcaggtaatattggttataagattgctcaacgtttaggtggatacgatgcagtaggaccagtcctacaaggattaaactctccagtcaatgatttatctcgtggttgctcaactgaagacgtttataacttatctattattacagctgctcaagctttacaataatggacttagcaactaaatattttaatcaaatcaactggcgttatgtcgatcattcaagtggtttagagcccatgcaatcttttgcgtttgatgacactttttccgaaagcgttggtaaagatttatcttgtaatgtagtacgaacgtggatacatcaacacaccgtgattttgggcattcatgattcgcgtttaccatttttaagtgatggtattcgttttcttacagatgaacaaggatataatgcaattgttaggaattctggtggcttgggtgtcgtattagatcaaggaattttaaacatatctttgatttttaaaggacaaaccgaaacgactattgatgaagcctttacagtgatgtatttattgattaataaaatgtttgaggatgaagatgttagtatcgatactaaagaaattgagcaatcgtattgcccaggaaaatttgatttaagtattaatgataagaaatttgccgggatttcgcagcgacgagtacgtggtggtatcgcagtgcaaatatacttatgtattgaaggttctggctcagaacgggcattaatgatgcaacagttttatcaacgtgcgcttaaaggggagactactaaatttcactatccagacatagatccctcatgtatggcatctttagaaacccttttaaatagagaaattaaagtgcaagatgttatgtttttattattatatgcactaaaagatttaggggcaaacttaaatatggatcctattacagaagacgagtggacacgttacgaagggtattatgataagatgttagaacgcaatgcgaaaatgaatgaaaaattagatttttagcaagtgtgacactatagataagtcataaaatgataagcctgggacaaaatgattgtcccaggtttttttacgtattagcagtgatagttgatgtgaatagaaaataattttttattaattttcaatcaagacggggttctaaccaagaaaatttcacatagaaattcaacaaaataggcaagtgttattcgaggttaaaagaggacaacaaattcaatttgaattcaatcttactactattttgtttaataaaaatacctttcaaacaaaagttaagatgactttgttagaaaatgatatatattctatcacaaatttgtagtattatagttgaggtggaaaattttaaaaactttagtaaaaaatttaacgatgtttacaaaattgtcatttaaggtaaatatatttcatgattttgataactctttaaaagagttttataatattaaagtgttgtgaaaacttaaacaaaaagttattatgcccttttgttgttattttacttttaaatagttataatgaacgcttgattattggcgatatgataaatgtattcgataaaattgacatttaagtgacatctatcaagatgaatatgtaaagaaattaaattaatatcacgtaaaatagcaagtcaatcattctaacatcgtcagtacatcttatgaag

SEQ ID NO: 3704 - DNA, 3994 bp, Artificial Sequence
  Description of Artificial Sequence: synthetic nucleic acid sequence
gttaggattattttcaataaaggagatggcagattcgattttaggtagcatgctgcctttggcaaattgttcttcttcaatatatgttttaagcgtatctatatttgttgttttaagtgcttgttgttggtcagtatgatagttgatataaacataatcaatcgctgttaaaataatgagttgatcacagtgaatatcagcacctaataatgcacttgttttgtctttatcgatgacggcatctatacctttaaagctatcatgctgttcgcgaatgactggtataccacctccacctgcagcgatgacgagtgtgtcattttctactagagttttaatactttccagttcgataatagatattggttgtggtgatggtacaacgcgacggtaacctcgaccagcatcttctacaaattgataacctttttcctgttgaatacgatttgcttcttctttagtgtagaacagaccgatgggtttacttggactattaaaagctggatcgccttcatcaacttctacttgggtaactagtgtgacaacttgcttatctatgcccattgaatgaagttcattttgtaaactttcttgaagttgatagccgatgtaggcttgactcatagcgccacattcagcaaatggaaaagcaggaccttgatcgtgttcagctgcataattcagaccaaggttaatacttcctacttgtggtccattaccgtgactaatcacaatttcgtgacctttagtaattaatcctactagggatttagctgtattttttactaattcaagttgttcttgtggtgattttcctaaagcgtttccacctaaagctactacaattttagccatttcactcacttccttctataatttagaattctcctaaagttgctaccatgaccgctttaattgtatgcattctattctcagcttcttggaatactacagaagctttgctttcgaagacatcatcagtgacttccatttcactaatgccatatttttcataaatttgttgaccaattttagtttctgcattgtggaaagaaggtaaacaatgttcaaaaataacatttggattgcctgttttttctaataatgcttggttaacttgatatggttttaaaagtttaaggcgttcttgccatacttcatcaggttcgcccattgatacccaaacatctgtataaataacatcagaatctttcacgcctttatcaatatcatctgttattaaaatgttaccgccattttccgtcgcaatacgtcgcaacgatttaataattcttctgtcggattgagttctttaggacaaacaagatggaaattcatacccataatggcagcaccttgcattaatgcgttagcaacattgttacgtccatcgccaacataagtaaagttgatatcagcatactcttttttcaatacttctttagcagttaaaaagtcagcaagcacttgtgtagggtgatcttcatcggttaatccattccataccggaacacctgaatattgcgctaatgtttctacagtacgttgagagaaacctcggtactcaataccatcatacataccaccaagtacacgtgctgtatctttagcagtttcttttttacccatttgagaacctgtaggtccaagataagtgacgtgtgcaccttgatcatgtgcggcaacttcgaatgcgcaacgtgttctagtggaatctttttcaaaaagaagcgcgatatttttattttttagcataggcttttcagtgccgatatatttggcacgcttcaaatcttcggagagtgttaataaaaattctacctcttgtcgtgaaaagtctaataaagttaaaaagcttctgttacgtaaatttttcatcaataacaactcctaagattgaaattgctcatcgttatcctgtatcgcttgtataattgactcttcattactcattttgtatcgttctggaatagcataataaaattcattcaatcctcttactttttcatattgctgttcatcataattataaataagtgtcggtttattaagtgcgcttgcttcaataggtaatgagctataatcacttataataatatccgccataattaacaatgaagtaacatcgattgaatgagaagtttgacaatcaacagtcgaaggatgcaaatgactcaataacgtataattcggcaagtgccgttcaaagttttctttatcaatagtacgttgtgctacttgaccttctctataagtcggaacatatactgcgagtttatttgtaatatgatatttcttttttaatcgttgttgttctaacttaagattgcttctaaagtattgggtcagtcttggaagtccaaactttaacatttgcgatggagatgcatcaaacgattgtataaaacattgagccattttctccccacctaccaaataataatcggtagcatcataaacttttttgtattgtcttaccatagccttattttttaaatcaacttgatgatcagttaagccaaaatttttaagcgcaccagcagcatgccatgtttgaataacagtttgcccttttttcttctgatagccacccatcattaaataatacgtatctaaaataataacctttgctttacttaatactttcatatgtctcataatatatttatttccggcaggtataaaatatgcatgattaatgttattaatatctttctgatatatttttttacctataaccgtcacatggtatccttcactacataaggcctctataataggcagtatatcttgcttaaaggtcatcattatcacaatgtgcttcgaatttatattaaacggtttaaaaaccatatttaaaagcacaatagctatgatataaatctttttaattatcaatctcattttttcaccatctttaaatttccaatcattatatcaaattataaacgatacttactttcaaagaaaataaaagcaaataatttttaattcactcaaaaattctactaggagtctcgatattataaaaaaagtaggactacgaattcatcttgaatccattgtcctacctcataacgtcaatatagcgtatattaaatttgaaatatttctaacaaacaattattataatttcttttaataaataaactaaatctttgataataagttaaatattaattcgttttatggtaaatcgttaatagaaccctcttgattgacacttttacaagaagtccgcaaagtgatctctatagcgtctatgtaaaatagaacctactataaagaataagagaatgataataacgttatatagcattaacttccaatgatctatgaaataccattgatggaacaatatcgctgctcggtatgattctgcgataaaatatactggattaaataacataatttgatgaatcaaaccacttacgccgtgattttttggcacccataaaattggagacatataaaacaatattctcattaatgcttgcataatcatctgcgtatctctaattaaaatccccaaagtggatgttaaaagtgccaccgacgatgttagcaaatatgcaaaaggtacatatataagtaattgtacaatgtgaattgaagggataattccattgaacatacaagctattataataattgctaataatcctaaatgaccatagaacctacttgttacaatataagtaggaatgattgagagtgggaaattcatctttgccacttgattgaatttctgtgagattgatttagttccttctaggacaccttgattaataaagaaccacatacttataccaactaacaaccaaaatacaaacggaatgccgtgtataggtgcattgcttctaattcctaaaccaaaaacaagccaatacaccatgatttgtaaagcaggattcaacacttcccatgcaatacctagatagttattatgattggtaattttaatttggaattgtgctagtctttgaattaaata

SEQ ID NO: 3705 - DNA, 3794 bp, Artificial Sequence
  Description of Artificial Sequence: synthetic nucleic acid sequence
taaacaaaaaactttaaatcaaaataatcaaatgaataaatctaaagacgacgataataaaattggagaagaaagtctacatgatgtgcgagtttcaagtgatacctccactttaccgcatcaaaataagtcaataaaagactatgatgattctggaaacgaaagtaaacaacatactaaattgacttcaaaggaatctatgctaggcgtaaattctaatcatactgagcaagattcaagaagtacacaaccatattcttcaaaacatagctattcacaaccaaaagataaagacaacgataatactcaacaagcgcaatttcttaaaaaagaagacaaacaacgtaacagagccgaaaatataaaaaaagttaatgaatttaaacaattggtggtagctttctttaaagaacactggcctaaaatgttaattattatcggtattatagtattacttttaatattaaatgccatattcactacagttaataaaaatgatcatacaaatgatagtgcatttaacggtacagctaaagatgaaacaacagcgatgaaaattgctgaaaactctgttaagtcagttgtaactgtcgagaatgatttgtctaatgacacgactgtgtctgataacaaaaatgaatctgataatgagataggatcaggtgtcgtctacaaaaaagtgggcgactctatttatatttttactaatgcacacgttgtcggtgatcaagaaaaacaaaaagtaacatatggtaatgataaatctgtgacaggtaaggtaattggtaaagataaatggtctgatttagcagttgtaaaagctaaagttgctgacgaaaatattaaaccaatgactatgggggattctaataatattaaattggctgaacctattttagttataggcaatcctctaggcacagactttaaaggaagtgtttctcaaggtattgtgtctggactcaatcgtcatgtacctgtggacattgataaaaatgataattatgatgctttgatgaaagcttttcaaattgatgcgcctgtgaacccaggaaattcaggtggtgctgtggtcgatagagacggtagactcataggtatagtttctttaaaaattgatatgcataatgtagaaggaatggcttttgcgatacctattaatgatgtacgtaagattgcgaaagaattagagcataaaggtaaagtgaactaccccaatactgaaatcaaaatcaaaaatgttggtgaccttgacgattctgaacgtaatgcaatcaacttaccagctaaagtgaatcatggtgtattaatcggtgaagtgaaagaaaatggtttaggagacaaagcaggtttaaaaaaaggtgatgtaatagtagaattagatggtaagaagattgaagataacttacgatatagacaagtcatatatagtcattatgatgatcaaaaaacaattactgctaaaatttatcgaaatggtgcggagaaaaatattaaaatcaaattgaaataaatgttgaggtgaaaatcatgtcagttttaagtcagctgcttaaaaaatctagccctcaacaagggattatactctattatctatttgccatcgtcgttgcatttttattattaaatttgccatatgttcataaacaaggggttgaggttaatccaattgatacactttttgtagctgtatcaggtattagtgttacaggattatcaccaattactatagtcgacacatactcaacctttggtcaaattatcatacttattattttgaacatcggtggtataggtgttatggctattggaaccatgctttgggttgttttaggcaaacatattggaattagagaacgacaactcattatgttagataataatagagatactatgagtggaacggttaaactgattttagaaattgtaagaacaatttttattattgagtttataggtgcactcttactcgcgttctatttttatcgggataatcctgatttaaaaaacgcattaatgcaaggcatttttgtgtcagtatctgctacgactaacggtggtcttgatattactggtgaatctttagttccctatgcaaaagactattttgtacaaacaatagtaatgttcttaattgtgttaggatctataggctttccagttttgttggagttaaaagcatatataaagaatcgagtaactaattttaggttctcattattcacaaaaataacgacaacaacgtatttattcttatttttattcggcgttattgttgtattaatattagaacatagcaatgcatttaaaggattgagttggcatcaatcattattttatgcattgttccaatcatcaacgaccagaagtgcaggtttgcaaacgatagatgtgtcacatttcagcgacgcaacaaatattgtaatgggattattgatgtttataggatcatctcccagttctgtaggaggtggaatcagaacaacaacatttgctattttaattttgtttgttattaattttaataatactggtgacaaaacaggtattaaaattttcaacagagaagtacatattatggatgtacaaagatcatttgccgtatttactatggcgtcattaattacatttattagcatgattattatatctgccactgaacaaggcaagttgtcctttttacaaattttctttgaagtaatgtctgcgtttggtacatgtggtttaagcttaggtgtgacaagcgatgtcaacgacattaccaaggctgtattaatgatattaatgtttataggtcgtgtaggacttatttcattcattattatgttagctggacgtaaagaacccgaaaaatatagctatcctaaagaacgtatacaaattggatagtcaatacactattagcaaagacatacgtgcacctttgctaatagtttttttatttagaatgatatcaatgcgataatagttttataacatttaatgaatggtacatgttacactaaattcaaggagaggagtggctctatggaaaaaaatgaaaataaaatagttgatgtgattgcaacttctgatatgcatagtcacttcttaaatggtgattatggctcaaacatttatcgggctggtacttatgttaatgaagctcgaaaaaataatgaaaatgtcatattactagatagtgggggaagtttggcgggatcacttgcagcattttattacgccgttgtagcaccatataaacgtcatcctatgattaagttgatgaatgcaatgcagtatgatgctagtggaattagccctaatgaatttaaatttggattatcttttttgacacgttcagttgcactctcaaggtttccttggctatcagcaaatatagagtatactgttactagagagccatatttttctacgccttatacaatcaaaatgtattcagatttgaaaattgctatcgtaggtttaacatcagatggattaatgaagaacgagtacgcagaaatggaagaagatgtctgtattgagaagactttggtttcagctaaacgttggattagatacatacatgaagttgaagaaccagacttccttattgttatttatcatggtgggttaaataaaattagtagtgccaataaaagaaatgaaaaaaatgcaaacgaagctgaaaaaattatggaagaacttggtgttattgatgtaattattaccgctcatcaacatcaaacagtagttggaaaagatcatggaactatatatgttcaagcaggtcaaaatgctgaggaattagt

SEQ ID NO: 3706 - DNA, 3644 bp, Artificial Sequence
  Description of Artificial Sequence: synthetic nucleic acid sequence
ctctaatcaatatgcaaatcatacgattaaattaacaacacgccaagcatttcaatttcatggaattcttaaacgtaatttgaaacaatcaatgaaaaatattaatcatgcagtacttgattctattgctgcatgtggagatgttaatcgtaatacgatgtgcaatcctaatccttatcaatctcaagtacataaggagattaatgattatgcaacgcgtataagtaatcacttacttccaagaacaaatgcatatcatgaaatttggcttgatggtgaaaaggttttagattcgagtgaggaaaaggaacctatttatgggaatacgtatttaccacgtaaattcaaaataggtattgcagtaccaccatctaatgatattgacgtctattctcaagatattggtttaatcgctatcgttgaacaagatgagttaattggatttaatgtgactatcggtggcggtatgggtatgactcatggtaatactgaaacatatcctcaacttggacgtctcataggttttatacctaaggaaaaggttgtagatgtatgtgagaaaatacttacaatacaacgtgattatggtaatcgtgaaaatcgaaaaaatgcacgttttaaatatacagtggaccgtctaggagaaacttgggtgactgaagaattaaaccgacgattaggttgggaaattaaagcgccacgtgatttcgaatttgaacataatggtgatcgattaggttggattgaaggtattaataattggaatttcactttatttatacaaaatgggcgtgtgaaagatactgaagactatttgttaaaaacaaccttaagagaaatcgcagaaatccatactggagatttcagattatcacctaatcagaacttagttattgcaaatgtttctcctgagaaaaaggaagaaatacaagctattattgataaatataaattaacagatggcaaaaattatacaggacttagaagaaattctatggcttgtgttgctttcccaacgtgtggtttagctatggcagaatctgaaagatatcttccttcactaattacaaaaattgaagatttattagatgagtctggtttaaaagaggaagaaataacgattcgtatgacaggttgtcccaatggatgtgcgagaccagcgctagcagaaatagcctttatcggtaaagcacctggtaaatataatatgtacttaggtggtagttttaaaggcgaacgtctaaataaaatatataaagagaatatcgacgaaaatgagatattagaaagtctacgtccattgttgttgcgttatagtaaagagcgtcttgacggagaacactttggggactttgtaattcgtgacggtgtgatagccaaagttcatgatggtcgcgattttcatagttaaacgagagggggagtggttcatatggggaaagtatatttagttggagctggacctggtgatccagaattaataacgttaaaaggtttaaaagccattaaagaagccgatgtcatcctttatgaccgacttgtaaataaagaaatacttaattatgcttctccttctactaagttcttctattgcggtaaggatcctcacaggcactccttaccgcaggaagaaacaaataaaatgatggtaaccttagccaaaaaagggcacatagttacacgtttaaagggtggcgatccatttgtttttggacgtggcggagaagaagcagaggaattagcatgtcataatatccactttgaaattatacctggaattccagtaacacatcgtgattatagttcttctgtagcatttgtaactgcagtgaataaacctggtatggataaaggcaaatactggcaacatttggccaatggtcctgaaactttatgtatttatatgggggttaagagactcagtgaaatttgtgagttgttaatacaatatggtcgttcgtcagaaacaccagtagctctcgtgcatatgggaacgtcaaaacagcaaatgacagtgactgggacactcgatacaattcaagaacgagcacatcatattcagaatccagcaatgattattgtaggcgaagtggttaagatgagagaaaaaattaattggtttgtagaacaggcaactgttcaaaatgaaacgttaacggaaatgtcatcaacttagcgcatacatttaaaaaaacagtaaaaatcacgtttataatgagtattaattaaagtgtataggaggaaatcatcatgaatatgcccttaatgattgatttaagtaacaagaaagtcgtcattgtaggtggaggtaaagtggcaacacgtcgtgctaaaactttattagcttatacaaaacatattcatgttgtaagtccaacaattaccgatacattacaaaaatatctagaaacgaagcaaatcacttatgaaaagaaacacttcgaaccacaagatgttgagaatgctgatgtggtcatcgcggctactaatcaatctgatgttaacaacgatgtgggggcagctttgtctaagaacgtattatttaatcatgcaggacaagcagacctaggtaatgtaacgttccctaatttcttaaaaagagataaattaacaataagtgtatcaactgatggtgcaagtcctaaattaggtcaacgaattattaaagatttaaaagatacatacaatgaagactattcaatgtatattcagtttttatatgaaagtagacaatatattaaatcacttaaaattgagccatctgataaacaagcgttactcgagcaaattttgtcagacaaatatttagatgagaagaagcaacaagatttcatccgatggctaaaatcacaagtcaaatgaagaatgggggcatatgatatatgcgcaaagtattaattttcgcaattgcgggatttttagcacaacttgttgatgggtcattaggcatgggatttggcgcttcatcgtcatcaatattattaacttacggtatagcaccggcagtagtgtcagcaaccgttcatttttctgaaattgcaacaacagctgcatctgggacatcacattggagatttgataatgttcataaaccaacaatgttgaagttagctatacctgggtcaataagcgcctttatcggtgcaggtgttttgacatttattcatggtgattatattaaaccattcattgctttattcttgttaagtatgggattttatattttgtatcaatttctatttaaacgtgcacatgaacatcatcatcatgtgggaaatttgagtagttttaaagtaattccacaaggttttgtggcaggatttttagacgcaatcggtggtggtggttggggaccggttaatacgccgctcctgctttcaagtaaaaaaattcaaccacgatatgcgattggaacagtctcagcaagtgaattttttgttacgtcatctgccgctttaagtttcattatctttttaggagtcactcaaattaattggtttgctgtaattgctttaagtctcggtggaatggtagcagcacctatttcagcgtatttagttaaagtgttacccattaacattcttgcaatttgtgtcggtggtttaattatttttacaaatagtaatgcattattaagctatttt

SEQ ID NO: 3707 - DNA, 3012 bp, Artificial Sequence
  Description of Artificial Sequence: synthetic nucleic acid sequence
ggcaatatcattaatggagcggaagacgggattcgaacccgcgacccccaccttggcaaggtggtgttctaccactgaactacttccgcgaatgcgggtgaagggagtcgaacccccacgccgtaaaggcgctagatcctaagtctagtgcgtctgccaattccgccacacccgctatttaaatggtgagccatagaggattcgaacctctgaccctctgattaaaagtcagatgctctaccaactgagctaatggctcaaaagatggtgccggccagaggacttgaacccccaacctactgattacaagtcagttgctctaccagttgagctaggccggctataaatggtggagaatgacgggttcgaaccgccgaccctctgcttgtaaggcagatgctctcccaactgagctaattctccaagatattttgcctggcaacgtcctactctagcggaacgtcagtccgactaccatcggcgctaaggagcttaacttctgtgttcggcatgggaacaggtgtgacctccttgccattgtcaccagacaaatgaatgattatacattcaaaactagatagtaagtaagattttgcgtcgcaaaacgttttttaaaaattgattaagtcttcgatcgattagtattcgtcagctccacgtgtcaccacgcttccacctcgaacctattaacctcgtcatcttcgagggatcttataaccgaagttgggaaatctcatcttgaggggggcttcatgcttagatgctttcagcacttatcccgtccatacatagctacccagctatgccgttggcacgacaactggtacaccagaggtatgtccatcccggtcctctcgtactaaggacagctcctctcaaatttcctacgcccacgacggatagggaccgaactgtctcacgacgttctgaacccagctcgcgtaccgctttaatgggcgaacagcccaacccttgggaccgactacagccccaggatgcgatgagccgacatcgaggtgccaaacctccccgtcgatgtgaactcttgggggagataagcctgttatccccggggtagcttttatccgttgagcgatggcccttccatgcggaaccaccggatcactaagtccgtctttcgaccctgctcgacttgtaggtctcgcagtcaagctcccttatgcctttacactctatgaatgatttccaaccattctgagggaacctttgagcgcctccgttaccttttaggaggcgaccgccccagtcaaactgcccgcctgacactgtctcccaccacgataagtggtgcgggttagaaagccaacacagctagggtagtatcccaccaacgcctccacgtaagctagcgctcacgtttcaaaggctcctacctatcctgtacaagctgtgccgaatttcaatatcaggctacagtaaagctccacggggtctttccgtcctgtcgcgggtaacctgcatcttcacaggtactatgatttcaccgagtctctcgttgagacagtgcccaaatcgttacgcctttcgtgcgggtcggaacttacccgacaaggaatttcgctaccttaggaccgttatagttacggccgccgtttactggggcttcgattcgtagcttcgcagaagctaaccactcctcttaaccttccagcaccgggcaggcgtcagcccctatacatcaccttacggtttagcagagacctgtgtttttgataaacagtcgcttgggcctattcactgcggctcttctgggcgtgaaccctaaagagcaccccttctcccgaagttacggggtcattttgccgagttccttaacgagagttcgctcgctcaccttagaattctcatcttgactacctgtgtcggtttgcggtacgggcacctgttatctatctagaggcttttctcggcagtgtgaaatcagcgactcgaggaaacaatttcctctccccatcacagctcagccttatgagtgccggatttgcctaacactcagccttactgcttggacgtgcactccaacagcacgcttcgcctatcctactgcgtccccccatcgattaaaacgatactaggtggtacaggaatatcaacctgttatccatcgcctacgcctgtcggcctcagcttaggacccgactaacccagagcggacgagccttcctctggaaaccttagtcaatcggtggacgggattctcacccgtctttcgctactcacaccggcattctcacttctaagcgctccacatgtccttgcgatcatgcttcgacgcccttagaacgctctcctaccattgtccaaaggacaatccacagcttcggtaatatgtttagccccggtacattttcggcgcagtgtcactcgactagtgagctattacgcactctttaaatgatggctgcttctaagccaacatcctagttgtctgggcaacgccacatccttttccacttaacatatattttgggaccttagctggtggtctgggctgtttccctttcgaacacggaccttatcacccatgttctgactcccaagttaaattaattggcattcggagtttgtctgaattcggtaacccgagaggggcccctcgtccaaacagtgctctacctccaataatcatcacttgaggctagccctaaagctatttcggagagaaccagctatctccaagttcgattggaatttctccgctaccctcagttcatccgctcacttttcaacgtaagtcggttcggtcctccattcagtgttacctgaacttcaacctgaccaagggtagatcacctggtttcgggtctacgaccaaatactcaacgccctattcagactcgctttcgctgcggctccacatttgctgcttaaccttgcatcagatcgtaactcgccggttcattctacaaaaggcacgccatcacccattaacgggctctgactacttgtaagcacacggtttcaagttctctttcactccccttccggggt

SEQ ID NO: 3708 - DNA, 3109 bp, Artificial Sequence
  Description of Artificial Sequence: synthetic nucleic acid sequence
tagatataaaaaaagatgtgtcgtgttgagagttcaacattaaatgaaaaacccagaaactctctgatagagaaacacgatcacatcttttaattcattcataatctctttagtttttaaagcgatttgctaaactaagtatatcttcgatgatatttaataagttgataaacaaattaaatcccatttctcttggtgagaattgacctcttttcattctattaaaatcgtataaagtataaaggagaaacaataataagctcactattgtaatgacagtatgaaaaattggattattaataaatatccctataatcccagctataattagcgcaattaatgtcacaaacaaatattttcccatactcgaagcgtcttttattaaaaagtaacctataataccaaaagctataaatgcaccaatagcaagaataatatttttatagaatacttctgctcctaaattttgtaagtaagtcgtaaaaagagcatacgaaagcaaacctacaataatagcgtatatatgagagatcactaatccatattttcgcgcacgtttaataaacaacgttgctaatatcagaattaacaatcctagagacaatggttttctccatgacataggaagatattgtccaaaataacaaccaatcccaaaaatcatccaataatacataaaatataaccaaacttttgcataggcatgtgtttggttcttatcttgagattgtcttttatgatcagttgattggtgtgtcgattgtgacattataataactccttttctatattaaataattaggtaataaaaattttacaacactataaagaattacaaaagtatttaagttcataaattctaaatatatagaagttttagaaaactcattacattgaactttactttattacaatttatctaataaatattaagaaaagtaacgaaatatgtcttataaatagcgatatatcaactttctttaataaatgttcagaacaatacattattttaacaatgttacaagataataacaaagcccacaaagtcaaatatttttgttagtatggggtacgtaataaaaaaacaaaaagttaatgtacagagacttgtcgggacaattatctaaatcattaaacttaaatcaattaaatctttgttatatttaaggaggagttactttgaaaaagttagcctttgcaattacagccgcttcaggcgcagcagcagttctatcacatcatgatgctgaagcttctacacaacataaggttcaatctggagaatccttatggactattgcacaacaatacaatacttcagtagaaagcattaagcagaataataatcttagcaacaatatggtattcccaggacaagttattaatgtaggtggaagtgcttcacaaaatactagttcaaacacttcttcaagttcagcatcttcacatactgtagtagcaggtgaatcattaaacatcatagctaataaatatggtgtttcagttgatgcattaatgcaagcaaatcatctaaatggttatttaattatgcctaaccaaatattaactatccctaatggtggttctggttcaggatcaggtggtacagcaactcaaactagcggtaattatacttcaccttcattcaaccatcaaaacttatacactgaaggtcaatgcacatggtatgtgttcgacaaacgttcacaagctggtaaacctatcagtacttactggtctgatgcaaaatactgggcgtcaaatgcagcgaatgatggttatcaagttgataatactccatctgttggtgcaattatgcaaagtacacctggaccatatggtcatgtagcatacgttgaacgtattaatggtgatggtagtattttaatttcagaaatgaattatgcaaatggtccatacaatatgaactatcgtactatcccagcttcagaagtatcttcatatgcatttatccactaatcattgatgattaatgattttactacaaggtaatggaatataccttgtagttttttattttaatagaatgattgaacctcattattttatattttaagcaattcaaataaaaaggccacacaaagttgactaaaaatgtcagtctttgtgtggcctttagctatatgtacttacgtattatacaaaccttttttattttaagaacagatgaataataaaataaataattgctgctaaaacagctgagataggtaaagtaatcacccatgttacaaccatacgttgagcagtactccatttaacacctttcgcacgatttgaagcacctacacctagaatagatgaagacacaacgtgtgtagtagataatgggaaatgtaatgatgacgctacgaaaatcgttaatgctgaagaaatatcagcggctgcaccgttagcaggtctaattttcataatatttccgccaacagttttgatgattttccaaccacctactgctgtacctaatcccatagctgttgcacacgcaactttaacccatacttgaggttcaacattactaccatcttgtaaattacctacaattaaagctaatgtgataatacccatagatttttgagcatcgtttgtaccatgtgagaatgattgtaatgctgcagtaaagatttggaaaaacctaaaattacgattagtacgtgttaaatttgaatttttaaaaacgattttaacaatcgtatacatcatataacctacacaaaaagctataattggtgaaatgattaatacgataataatttttgtaaaaccttgatagtgtaatactgcaaacgaaccttgcgatgcaatggctgcacccgctatagatccgattagtgcgtgagaagatgaacttggtattccatacaaccaagtgattaaattccaaataatggcagcaataatagctgctaacacaacaactaaaccatgttgtaatttgaatggatcaacgatatcttttgtaatagttccagcaacacctgtgaaggtcaatgccccaataaagttcatgactgctgctaataaaatagctcttcttggtgttaatgctcgagtagaaaccgcagtagctacagcattagctgtatca

SEQ ID NO: 3709 - DNA, 2683 bp, Artificial Sequence
  Description of Artificial Sequence: synthetic nucleic acid sequence
tagaaaaagtttacaaaaatataacaaattgctaaaaaaattattataccaataacatagaatacttttttcattaaagttcacctagttttcaaaaaaatttttataatttatgataacttaaaagtgtatattttttctacataatatatttaattttcaaggagatgtaaaaaagttgaaaaatttcgcaaaactaattttggtgggcattttagtatcggggtcagggatagcgagtgtacaaacaaatataactcacgcaaaagaaagtcacgattcaactcctcaaaatattaaattagtgggaacgtatgatacttctcaagttgattccaaaacgatgaaacaatttaaagaaatagaaaaagaagataataatttccacataactaaacatggaaataaagtcgttgtagaagacaaattacctaatccagagaataaaacttcaagttattcagctgatggtagtgctgaaaataatacaaaagtaattaatttctctgattttgttggtaatatggatgggaaagatgatggaaaaatatcggatgggataaccttttatagtggtaaatcatataacggacaacacgatggtcaaaaagtaaaaaaagggactcatgtacattgtaatagatttaacggaacaaaatctgatcatagatactggtcaaaaaaacatcctagagcttatgtagatttttataaaagtgattgctggtatcacgccaaagcttataaatgttcttccttgggaaaaatgactaaatgcgatggtttgaatagtatttatagaaaaggtgtcaaagattgctcatcatggaaaggtaaacccaaacataaaaactggcctaaaacagcatggtatagaaattaaaaaatgaataaaatcttaaaaatattaataacttctattattgttatcattattaccttaacagtttggacttttagtgtgattacttatcagaaacacaagagtgagaaaatcatcaatcacgttatagaacgtaagggttgggataaaaaaataaaaaatgaaaaaatgagttttaatattataatgggatatgctgaaaaagatattgtttttaaagatcaaccatatagtgagtatgagtataacgtgacaccagcaccatggacagatgataaagaatataaggtgtggggggaaacagatttacaaaagaaagactcctattataaatatcttttagaatcagaaccttacagaaaataatataaatgtataacataataaaaaatagagatcattcatctaccacttagagacagcgtagacttctacctaattatattaataaaatgatattgaaggaaaaataatattgaaaagagaaattttaaaatgaaatggttaaaaatcattatattaattttatctttagttccaatagaatttatcggattatttactgattatcaaacaggtttattaataggttacatcccatttatagtagttgctatattaatgagtatatccatttttaaatttggctttaaaaataatataagtattgtaataggtagatgcattggaatatttctttcttggggatgtgttcatttatttatgaacatttacgattcatcagattattttaaacctcttaccacagatattttcgcattatttttaggagctattcatttcatagttattatgcttatatatttagttatctatggtttttctcatcgcaataattaactattatgttacttatattaaagggcacaaagattaatttaacaatgtttgtgtttttagtatttatacaattctactacctataatacataattatgtcaactcaacacaaaggcttaaacgctgtgaaatcaacgtttaagcctttgtcttgtgattatcgtttattcatattttatacatgcccttaaccacgcgctttcatgcattttcatcacgtgaacttttgtatctttattcagtatttaagcgactaaaaaatagatattaattaatcgtttgtattttaatattcttgattattttcattcaaaaacgtgtttagtcttttttcttttaaaaatagaataacttgcccatcatttttatcagatatacatatataataggtgttgcgcttcctatacatgaaaggaggtgtgcatatggcgttaacgatactttcacttgttggaacatttatcttatctgttatcgctggtgtagttgcgaactacattacagataatctaaaaagataaataaaaaaccccactttgctttggtcggcagtggggtttttgcatatggcgaaccatacttcacttgttatttttagtatatattgtagcttcttcatttgcaataaaattacaagtcttactcatagaaaatctgtaatttctttactatagtgaactagttattttttatcatgttttttcttttttagtgataagataaatcccactattaaaggaaataaaagcaaaatatagatgtatctcatttaaattattattcctcccatttttcttctaattgacgttgaaatgcctctcgatcttgttttaattttgcatcttcattatgtatctcttgagattgtttatatatcttttcgtctaaccatttaggtgttttttcacgattggtatattggcgcgacttacctatatt

SEQ ID NO: 3710 - DNA, 3041 bp, Artificial Sequence
  Description of Artificial Sequence: synthetic nucleic acid sequence
acgtttcaaaacgtaggctttctaaatccaatgctatcttcatttgttccaactgtttgaatttctttaagtctttcgcacgttgaccgacttcaaccgatgtatctttgtaggctggcactgtaacaatactaacctcaatcaattcatcgattttatttatggtttgaacgtactcattatctatgttttgccacgtacgagccgttgagtcattaggtggcaatgtgtaaaagaaactgcactgattaacgttgcctgctttaatattctcataaatatctcttgcgtatgatgtattaggtaagtggcatttaaagtatagccctttttcatccacctgtagctcaagcgttcctgcttgtgtgcgtcctataacataactaaaatcatgattgattagacatttcacatcacttacatctacatcatttaaagcattaggcgctacaatttctctaaatccacccaaatcatcactcattgaattaaagataatggcgtaaccttcgacaaccatgtcttgttgtccagtgtcaacgttactattcgtcatactcatcaccccctttaatggagttcttttcgacttctttgtcaattttcgatttttggtaattttctaaagtgttaagtggcgctctgttaagatcaaccaatggttgctcgccatgttcaataggttgatagccaaatacacttctagcttcgtctgttgaaataattcctttactatgcaattcagtaatacgttgtaattgtaactctggatcaatgtcaatgagacgtgatgagtcaaactctaattcgttaccagaatcaataaatttaaatattttcgtttcgagttcagcaatcatcattttaaatattggatctaatgtactttgcaaatactctaagtttgcttgtgtgatagatgtattgactgtttcaatacctagtttagataccggcaaaccgaacgctttagcaacttgagatgtgctgaacttataactatttaagaagttcaatacttcggtaggaatttgtagtctgttaaattccattgtgtcatcgatagcaactaaaccaccgttgttttttaattgactttctgaaaagttctttttcaattctcttaattgttcagcattgatttgcccttttctatacttcaatactgatgtcgaagtcccaccattatcgaagaagttacgcaggaagctcttagagccttgagaaataccaatctcatgtgctagtgcatacaacggactgtatcctatatatccatctaatgtgatatatctgaaatgtaatatatcatcgcttgttatcttaacggcattaccttccacatcttcacttacgttgtaaataatttcgccgtctttttcctcaattcctactaagtcgttatgtaagaagtggaatccaacaggaaaatcatttttgccacgcacaatttcaacaaaagattgaccgttaagcagcatattcgcgatgattataaacttaaagtgccaacccggtaagtccgaatacggattgttattaaatagatccagtatttggtccatcactgtatttgtttcgtgacctttaactttcaacttggtacttgcaatgtctgcagatataatacgtgtagcagtaaatacatcactgttacgtagcgcgtttataccaacatagcttgcatgtgtgccatgttcttgccaatacaataatcgttctaaatctctgttcatcttttcttgtttgcttgtaaatcctaaatcaagtaatggcattaactgtcaccccctttctgacttatcgaggtattgtcgtacgcttgatttaaaacgcctgagaggcctatgagcagcaatccaccaataatataagctaacggcttccaaagtataaacaagccatagaatagacctattaagcccacaacgaataatagtattactacaagtgcatataagaattttttcatcatcacacctcctataagaacaatggcattaaagtttctgtgtcccattcatgttcacaagccataacataagcaaatatggtagccatgagtggatctattttttctcggttcatcttcttttcaatcattaatgagtcattggtatcttttgccacagcatttttgactgcaatgtctagtaacggatttttatgatgcttgatgtccccattaatcactttcagtctaaaatccagtatcggattagatagtgtttgtggcccttgtctgatttctactaaatcataaggccaatctctacgctcaatttctgcaataacaccatgtattgagtaaggatcataacataacgcttgtacgtctaatttatattggtcgatataattctcaatgtaatttaaaacttggtcagtattgataattccactttgtaaatcggtaatcgtacaataaccactttctgcaagttgtctgtaatcaataaagtctctatcaatcttgccatctaatccacctttagtagccacaaacgaatgactagttacataatactcttgattatcttcatcaagatgaacaaacgatactgcggttaagtcgtcagcacgcgataagtctaaaccgatataagttttagagccatttatatcaaagtctatttcatttttcttccaatcattgaaatctaaataagattctgtgcttgctgcacgccacatattgaaattctttattaatatcccatttaatcctgaaccactatcaattgcagttttaacttctggttgaatattcttagttaacaattgtgccatttctggcaactccataagtggattggatttaatccaagttttaacgtcatatacttctttctcatcatcttgttcagcacagaaaacaaagtagttttcattttttgctatgccgtcaagtatcttatcaatatataaatattcttcatacatcggaccattcaaattagttccagctgttgagataataattaatatagggttgtgcagtagcacttgcccacgtcttaacgtttcataaatctttttat

SEQ ID NO: 3711 - DNA, 4331 bp, Artificial Sequence
  Description of Artificial Sequence: synthetic nucleic acid sequence
tatcataatgacttttattttgtatgagtgggtcatacttaccattcacaattaaagtaggtatggacacattatgatgaacacgagttaaatctttaatattaagcaatgcacgtactgcaattgcactttcttccggagttggtctattgtataatttttggctttgataccatttcattgctttatctttctctttaaataatttagagaataaaataatcattgcctcagatttattaaagcctgctaattcttcttggtaatcaaccattaatttgttgaaaccatttgcaatgtcttcacttttggccgaaacaattgtcaatgtaatcactttatattgatatttttcagtaaattcactcgcaatgatgccccccatatcatgtcctaaaatatgtgcagaatcgatatttaatgctcccattaaatcatttaaatcttcaacatgatcttttaattcatatgattctgttcgtgaagattttccatgacctctgacatcataagtaattactctatactgcttcttgagttcattttttaaatctttaaatcctgccaagtttccatctaatccatgaattaaaatgatggggatgccttcgccttcatcaatatagttaagttcaatctgattacaaatttgaattttattcatcttggcacctccctttagtcatttatatacccatattaaaatagtgttacgcttttaggttattttcagtgtaattaaattatttgtatattaaaatagtgattcattttctaaaacaaacttatatggtaaacaaatgatatattttaataaattaaaaaactcagaaagatatgtctagcatattttctgagtttaaatctttgtattatgatgatttagtgcgttcagataaacgtatcgtataaaaaatgattagcacaacaagtataatccaaattgctaaagagaaaaactgtgcaatttccgggtcagttaccattgcatctattgttttttgacaaaatagtaagccaactcctacaaattctatacgtttaaagaatataccaacaagacttaaaataattccagcgaaaaatacaaactgatgaccatagatagaaataggaataatagcccagttaaagtgaaacccttgcataattactagaattaaagcaataataccaatgattattccagttctcatttcatacttattactgtatagataattttttttggcaatacgcacatataaaatgagtgttattggaaatataactaagcaataaaacaagcttataccggtaattgcttgaaaaggtacatattgtttatcgtacaaatatgaaataagaataaagttaatgataaagaaaatcattggattgagttgtaatgcaaacaaattacgctgaattgttaatattaattgcgcaggtgatttacctctatattcaatgtaatcttgatctttttcttcagactttttaatatcttgtcgatatttttcttttatatcatcaattaagtgtggtgacattcctttgtgactaaaataatcattaatattttcgagtaatactttatcattcgtacgcatgatttactccttttcatttaaatcttgatgtaatttgtagatttcataagttaatcattttcaaattaaaattttatcatacatcttacaattttacttgaacataatgattaatcatatcatcattagcaactaaaatgaaaagaagagctaaagtgaaatccattttacaaattatgatttcaactttaaactcttcaaatttcaaactattttatcttataaaacgtatatccaattcttcttatttatttaaatctatacgatataacttcacatttttatcctttggtgaatttgaactgaattgataacttgcttgatctttttgaatatagccaaagttacctgtaacattattataatgtacacgacttatagctttatgaccaagttgttgttttacggctttgtatgaagggccgtttgcatcattatatgtcattgatacgcgtgtaacatttcctctttcttttttaccattagctgttactagcaaaacacctttatcagttctaaattcgtaatacttttcattactatttgggttataagaatagataggatgactatacttttttaatacactcttcattgattcgcctatcttaacgttttctaatgatttatcacctttgtttaattgttgtactgttttcattgaattaccagttgccgcttcaacgttgtttccaacgcttactccagttaaaactaatcctaaaacaagtaatgatgttattagtttcttcataagcactcactcctttaattctttatgtcttctgtgctcatgttaattgtactataaatattactaaaataacaataatattacaaaatgattacgtggatttagtagatgacttttttaacaactgttttagcgcttatagagaaacctatctttcttaattcattgattattaccttacaaaatctcagtgtgaactcttttatttaggtgcatgttgttgaatgaagtttgttgtctcttgagtaaattgagcctgttcttcaacaaaaggatatgcacttgaatgttgatagacgttaaattcacagtgttgaatcaaatctgcgacttctttagcttctagtgtagttgtacgttctccgtgttctccagcaacaataagcgtaggaacttgaacatgcttgaaaacatctgcaataccttcagatttgaagacatctttaacagcttgaatttcttctttagtagaaatactatttgtatcaacgacatgctttaaaaatttattcatcttacgcgctttataatatctacgtttatctaaaaatttttcttgcttatcatcttcccagttacgtattttatgcgcatattttctgaacaagcgttcttcaggcaattcaccttctattgaagtaggattaactaatgtgattgaggatatatagccaggatttctaacagacatatcagcagcaataagtgcccccatctcgtgcccaataaatgctgcttcatctatatatatagcatctaataaaaattttatatcgtcagcaaagtcataaaactctatatttctaggcttatcagagtaaccatgtcctctcaaatcgataagcacaacctgaaaagactttgctaataccttagctaaatcattaaaaacagcataattatcaaaagcggtatgcacgagtacgacaggatatccttgtcccatagtactatagtgtaatgttgtaccgtcttgtttagtaattaaatccattgccatgttgttcttctccttctgtttcaaaattatctggtaaaattttaagcaattcctctatggtagtaatcgtataatctacttcttctgttaatggctccaattctgcatcttcttgtttataccacacacttaccatccccattgcacgtgcaggagcaacatcgtttaatgcatcatctccgacatacattatttcagatggtttaacccccaattgatcaatcatatcttcaaagattttaggatgtggcttacgatagcctacagtttcagaagtagttaaataattaataacgtgcataatacccaatgaatgcaatctaaattgtttaattttggatttcccatttgcaatcacaccaatcatgtaatgatgtttcgataacttttctaatgtatacaaagtatcatagtaagggaaaacgtaacgatagaaatgcatttcaaagtcattaaataaatctttccatttaagacggtcgatatgaaattgtttaatgatttccttatatagatcaggtttatcgttgtcttcatcatcgtctaattcaataaatttattcttataatctgctaattgcacatgaataaaataatcatgaaaccgttcatattgctcttctataaacttttcacgcgattttactctatctaatagagtaccttctaaatcaaagacgatagccttaatgcagtttaaattcattttcaatgacctcttaatattttaataatactattgtagcaaaagagtagtgtgaacgtcatatgttagtctgtttaattaaaatataaaataggactggtacaccgagcaatgccatcacgatgcctacaggaatttgtataggttgtatcattgtacttcctataaaatctgcaattatcatgactacagcacctatgattatattcaataacatttgtaaacctatttgataacgccaataaaattttctaatcagttgtggaataatcatgccta

SEQ ID NO: 3712 - DNA, 3180 bp, Artificial Sequence
  Description of Artificial Sequence: synthetic nucleic acid sequence
attgctcctattggtactttattttctaaagatcaaaaagtagagcttgtaaattatgttaaggaaattagtgaagctactcacacaagtgatgttgcaatagctggagctagtatgattgcttatgcagtaacattggcagcggaagataagaattggaaagaaattatagaaggcgttttggatattcacgatatagctattaaagaaggagaacaaactttttctgcatcaatagcagaaagattaaaattagcagttcagtttgccaatcatttcgaaagtgaggaggaatattcgctctggctttatgatgtgataggatgcggaacatcattaactgaatcggtccccactgctttggcaattgcttatttttgtaaagaccccaataaatgcgcaattttttgtgcgaatattggtggggatactgacacaattggtgctatggcaactgctatatcgggggctaaatacggatatagtaattttaaaaaactttggatagagactatcgacaaacacaatagtgtgaacttagaacaatatgcaactacgctcgaaaaaaataaaatgttataaaaaatcgaggtgttcgttatggaaaaagaagaaatctttcttcctgaaagtgaaaaaaatgggaaacctatcgacttattttttatatggtttgcagccaatctaggtattctcgggatagtttatggcgctgtcatagtaagttacggattgagctttttacaatcaattttgattgctataataggaccgttatcctttgttctagttggttatataagtgtagctggtagagatagtggagctataacttttatgctctcaagagcaccatttggatttaaaggcaatcatatacctgctttaattggctgggtaggtcaagttggttggttatctgttaatgtttctacaggaactttaactcttctggctttattcaatacttttggttttaagactagtacatttctaattttgatgagtttagcgatttttgctgggctagttattatatctgttcttttttcacaaaaagtacttgtatcagtacaaacatttttcacatatgtatttggtgcattaaccttattagttataacaattttaattactaatactgattggaacgcccttttttctatgaaatctgggtcttaaatgaagaaaaaaataaactaatatctcaaattaataagttagtaaatggaattaagaatgaaattcaacaagctataaacaaacaacaaatagaaaatgctacaacaaaactagatgaagtcattgaaactactaaaaaattaattatcgccaaagcagaagctaaacaagtgataaaagagttatcacaaaagaaacgagatgcaataaataacaacactgatttaacaccttctcaaaaggcacatgctttagcagatattgataaaacagaaaaagatgcacttcaacatatcgaaaattctaattcaattgatgatatcaataacaataaagagcatgcatttaatactttagctcatatcattatttgggatactgatcagcaaccattagtttttgaactacctgaattgagccttcaaaatgctctagtaacaagtgaggtggttgttcacagagatgaaactatttcattagaatctataattggagctatgactttaactgatgaacttaaagtcaatattgtttcattaccgaacactgataaagtagctgatcacctaaccgctaaagttaaggttattttagctgatggctcatttgtcactgtaaatgttccagtcaaagttgtagaaaaagaattacaaatagctaaaaaggatgctataaaaacaattgatgttctggtaaaacaaaaaatcaaagatatagattctaataacgaattaacgtctactcaacgtgaagatgcaaaagctgaaattgaaagattgaaaaagcaagccatcgataaagtgactcattctaaatcgattaaagatattgaaacagtaaaacgaactgattttgaagaaatagatcagtttgatcctaaacgctttacgctaaataaagctaaaaaggatatcattactgatgttaatactcaaatccaaaatggtttcaaagaaattgaaacaataaaaggtttaacttctaatgaaaaaactcagtttgataaacaattaactgcactacaaaaagaatttttagaaaaagtcgagcatgctcataatttagtagaattaaatcaattacaacaagagtttaataatagatatgaacatattttaaaccaagcacatttactaggtgaaaaacatatagcagaacataaattaggatatgttgtagtaaacaaaactcagcaaatactaaataatcaatctgcttcttactttataaaacaatgggcacttgatagaattaaacaaattcaactagaaacgatgaattcaattcgtggtgcgcataccgtacaagatgtacacaaagcattgttacaaggtatagagcaaatcttgaaagtaaatgtaagtattataaatcaatctttcaacgattccttgcataactttaattatcttcattcaaaatttgatgctagattaagagaaaaggatgttgcaaaccatatcgtacaaactgaaacattcaaagaagttctaaaaggaacgggtgttgaaccaggtaaaatcaacaaagaaacacagcaaccaaaacttcataagaatgataatgatagcctattcaaacatttagttgataatttcggcaaaactgtaggtgttattacattaactggtttactttctagtttctggttagttttggctaaaagacgtaaaaaagaagaagaaaaacaatcgataaaaaattatcacaaagacattcgtctttcagatactgataaaatagatccaattgtaataactaagcgtaaaatagataaagaagaacaaattcaaaacgatgacaaacattcaattccagttgctaaacataagaaatctaaagaaaagcaattgagtgaaggagatattcattcaatccccgtcgttaaacgtaaacaaaacagtgataacaaagatacaaaacagaagaaagttacttctaaaaagaagaaaacgcctcaatcaactaaaaaagttgtaaaaaccaaaaagcgttcta

SEQ ID NO: 3713 - DNA, 3461 bp, Artificial Sequence
  Description of Artificial Sequence: synthetic nucleic acid sequence
taaacatacgttttacctgtcccggtctccatttttatatctatgttagcttcttctgaatatctatttattattaaattattagcgaactcattgtcacaattttttgaagttaaatacttttcgattcctgtgaaagtatctattatttttttaactgcttgttgttggtgaattagttcttctaagaatattttcatattaaaacctctttattaaattaactttattatctaattgatccaaagctatttctaattctctagtttcctctaatccaaaagaatagccatatagtataatattttgcaataataatttattattacctattaaattaaccaattcttttgtatttttactacgccaaccttctttaattaaatacaaccttgaattctcaatataattagcttcgtagtcaaaaatggttagcttagatacttttgtattaaaatcatagccatcttgtactaaccaattttccattataacttcttcacctgttgctccgccttctaatcctaagttttcactagagaaaatatcaatcatattatcaaataaatcaagaccaatattttcaaaattatcaattttttccaaaacactgattgggggagttactacaaagtaatgtctatataattctaggtttttttcactatttttttcataaattttatttatacgacttaaagttaattcatcaatactcttataacctaattcaaatagcctttcattagaagcaacaggaactttcacattgttttcagtaacactataagttttctctggaatttgaacgataatatattttctatttgttttttcctttatgttagcttcaattaccgcttcagctgtcgtacctgatcccccaaagaaatctaatattattgaattttcatctgaaaagtatctaactaatttttcaacaaattctactggttttggacttgtaaataaagactcgccatcaaataagttcactaaatacttagtagccacttgattcataaatttattatcagcaccaaagagtgaattcactggattatatttgctttttacatctttcaaatattttttcacaataaatcctctttctgaacccttaacttccttcttaaattttactttccctgattcaacccagttctcaaatgttgttttagaaaaagcccaatatctaccttttggcggaagatcgatagtacctgtatagggatttttaatttcaaacagtgtatttttactaccacttctggcacttggattatctggcgcccacgggccattaggatcattatcaatatttttataaattccaaattctttagcatcaccttttatttttacctgattaatatttttagctttactttatctttaacttcaacttgtgaaacgatgaataattgttgtaagtcattaaattgttgtaagaattccgctgtattaaatgtttcattgtttccaataaccactttagcttctaatgacttaccaattactttttcattacgtgcttgttctaatgcacggttaacatcatcacgtaaattcataaatgtattccatttttctaacaattcttcatctacatcaacaactttaggcatatctgaaaggtgtacactttcttcttttacatgaggcgtatgagaccaaacttcttcagctgtatgcactaaaattggtgctagtaattttgtcatgtcaataagtatttgatataaaacggtttgcatgctacgacgtttatgagaatcttttttctcaatataaagtatatctttaccgtaatctaaatagaagttacttagttcaacattgataaagttttgaacttcttgataaatattcaaataatcaaaattttcatagttattaatcgtactcgctgtgaattcacgtaaacgatttaacaaatagcgatctacttcaagtaaatttgtttcagcaatactatccgtttcagggttgaaatcgttaatattacctaacataaatcttaaagtatttcgaatttttcgatatacatcagacgtttttttaagaatttcatcggaaatacgcacatcagaaaggtaatcagtactacttacccataaacgtgcaatatctgcgcctttttgtttaacaacttgatcaggaactataacattacctaatgacttactcatcttcttaccttcaccgtccatgacaaagccatgtgataacaagaatttatacggcgcttgaccacgagtggctacagcagttgtaattgaagagttgaaccaaccgcgatactgatcactaccctcaaaatagaggtctgctgggaatgaaagttcaggtctcgtttctaatacaccacggtgtgatgaaccagaatcaaaccaaacgtccataatatcagtttctttagtaaattcaccgttagggcttccaggatgactaaatccttcaggaagtaattctttagcttctttttcaaaccaaatatttgaaccgtatttttcaaataaatctgcaacgtgatttactgtctctttagtcataatgatgtcgccattttcagcataaaataccggtaaaggaacgccccatacacgttgacgagaaattacccattcgccacgatcgcgaatcatattgtaaattcgtgttttaccccagtctactttaaagttcgtgtcttcaattgcatcaagaatatcctgttttactttattaatggaagcaaaccattgtggtgtagctctaaagataacaggttttttcgtacgccaatcatgaggataactatgtgtaataaagtcaagtttaagtagtgcgtctttttcttttaaaagatcagtcacagctttgtttgctttgtcgtagaacattccttcaaatggtccaccttcttcagtgaatacacctttatcatttaaaggactaattactggtaaatcatatttttgacctacaatatagtcatcttccccgtgaccgggagctgtatgaacacatcccgtaccagcgtctgtcgtaacatgttcaccgttaattactaatgatacacgatctaggaatggatgttgtgcctctacaaattccagttctttacctgtgaattctttctctaattgtatagaatctttatcccaacctaatgcttctgctactgcttctgataatgcttgggcaacaatgtatttatgtccattaacattatactgaccgtagtttagctctggatgaactgtaattgccacatttgatggaattgtccatggtgtagttgtccaaataataaattgggcatcagaatcaactttacctttactgtctttgacgtcaaaagcaacgtaaattgatgcagaacgtttgtcatgatattctatctcagcttctgcaagtgatgattcacttgaaggtgaccaatacacaggttttttccctttataaatcaaaccttt

SEQ ID NO: 3714 - DNA, 3092 bp, Artificial Sequence
  Description of Artificial Sequence: synthetic nucleic acid sequence
gactaagaaaatgaataaagaaattgcgcattatttaactcgacatggttatgctaatgtaagtgatattattggtttagatgcataaattacaattatgaagctgccttttaaataatgaataatttaataaataacgtataaaagtttaagaatgctattattcattggaggtcctatcatggataaaataaacaaagaagataccgatactaaaaaagatagtaataacaactataaacatcaaaatgaccatatagatagacaaggtttaaatggttatcaaaaaactgatttagatcttgagatagaacgagaactacaggaaatgatggaaaatggagaatctaataaagaaacaaaaagtaagcatttcaaaatcttatctttcgtttcaatgattgtcattgtagtgatagccatcatacgattcatccaaaaaacgatataaatatacaaatgagcctgggacaaaaaggtccaagataagtaaataaagacaatttctattgaaataatatagaaattgtcttttttataatttttttgatgattttcacctcgttgagctgttacttttcttatattaagccacgataatgtctgaattcatcgaattcagtatcgggaattgtttctgcaatatcatttacatgtcgtgaaatatcattcgtagggataagaactgaagtttccattagtagagtatgttgagtcatgttatagtctttatacataaggcacctcgttaatttagtttagtgatgtttattaaattatacgaaagggcttatttttttaaagtattttaatgtaaaattacatataaacacaaagtattttggcgagactcttgagggaacaggacaagctgaagactacaggctgaagctgtcccctaagaaagcgagccaacaatacgaagtattttaaataaagatgccagtaaatgaatttatgaaaactcatttactggctattttgctaggaattatgtccgagcctcacattttatatttttaaaattgttgtaaaaatgcttgagcatctttatttatttgtttaaaatctataccttgcttcatcgctgcaaatacacaaccacaataacattgtctaaaaatattataatcattacacatttcgatagaacgttcataccctttattctttttaaaatcacttggtaaatattttacattatatatattttgtacatccatacctagttcattgattaattgcgcatttttctttggagagagtgtgattgcactaccaaaataatcgtaaccatgttctaaagcagcttttgcaacaatttctaatcgcatctcgaaacaagccgtacatcttagtccaccttccggctcttcagttaaacctttatcttttgccattttcataaatttatgcggttcatattcggcttcaatatactttacatttgcacctgttttattattaaaatcatttacaaattgttcttgaactttagcacgtcttaaatattcacttttgggatgtatattaggattcgcaaaataaatcgctatatccgcatattgtgttaaaaactctaacgtatatgtactacaaggtgcacaacaactatgaagtaagattttagggcgttctccatcacgttcccattgagaaattatctttcttaatactttatcatagttgattttttgatttttcattttagctaaaatttgattcgcttcaatcacaatatgacctctctttcatctacataacacattatttaataatattatatattagcgaatatataaaggaaatatcgaatgtacaagacaattcgactttaactcttaaaaaattaaaaaaagcgaccgaatttgaattgcgtgtatttccacattttaacaacaagtcctaaaaataaaaatttgttacatagctactttaaaattagtcatcaatttccactacaataaaacacctgagacaattatttttgtctcaggttcttacattaaatattaataaccagatccaacttcttcaccatcttcgtcatattctgtaacataaccgtcgtcaatgtctaccgtgtacgatccagctaaatctccatctttatctaagaatgaaaaaccccatttaccatcaccggttttttcaggttctttatacgtatacgtatcagtatctagtgtatgtccttcatatgactctactttatcaattacattttcacgcgttacttcgccactacttgaatcgttatctgactcgtcatctgaatcatcgtatttttcatctaattttttatcgacatactgatcaatagcttcttcatcgaatttgactgtgacatctgtcacaccaccatctttttcgcttgcacttgctacattgaccgaatttgatttaaaagtttttccttcgtatgaaccttcagcgtgaacgataacttcttcatctggatcataaggaccatatgtttctgatgaaaaaccatcgcctatttctttaccattagcatatatttttacattatctaatatatatccgccttcagtatcaacattaaaacgtttttgtttaaacgattcatatgcaatactatcactttcactcatatcaattgtaatagcgcctttaaaatttttaccttccatgtcttttgatgcttttaaattataatcaccgataggaaatgttcctaattctttatcgtcatcttcttctacagaaatatgatgtttatccccgttaaattcataagtaatttcaccactatcacttgaaacgagcgtaattgttttttgaggaacattaaattgatagttatcaaaaaaaacatattttttcccgtctttagatatatttaaaatattattatcatttgcatctacagataaattgttatagtgattatttttaatatctttggtgttttcttcaactttgtcagcaacatgctttaaatcactttctgctttaatatactttaagtacgcacgtgcttcttcttcatttaaacgatgatcgtttgatgttaattgcttagataatgatttagcatcgtcttttttgatagcatgtgcaatgtgagt

SEQ ID NO: 3715 - DNA, 3842 bp, Artificial Sequence
  Description of Artificial Sequence: synthetic nucleic acid sequence
atcgccattaatacaatataacctgtgtatgtaagaccatactcttttaggtaatctgtatattttttgatgatttctttagaggaaacataaaataaaaaacataattgtttgctcaaataactattctctacatacatttaatcactccttgttaaggtaacaatattatgaagcgtatcacttgtcaagtattgatctcatcactataattcaaattgctttaaattaaatttatcaaatatttgaatgagtttaatttgataataaaacaattttttaaaaaatggaggagtacgaaaattgacacgtataaatgattttaacgaagtgcttaacagtagaaaatcagtaaaggtatttgatgagaattataaaattcctcgagaagaaatggatgaaatcattactaaagcaactaaagcaccatcatcggttaatatgcaaccatggagaattgctgttgtagaaagtgatgaaatgaaagaaaaagttaaagaatcatttggattcaattccagacagttaacaacatcctcagctatgttaattatttttggagatttacaaaactacgaaaaagctgaacagatttatggcgatgctgtagaacaacaattgatgacagaagatatcaaagcacaactgttagattggatattaccctattataaaaacttatctagagaaggcatgaaagatattgtgaatatagatagtagtttaatggcaatgcaattaatgcttacagcgaaagctcatggatacgatacaaaccctattggcggcttcgataaagaaaatattgcggatattattaggaattatcgttatattaattagttaaaatgatagtatgagtatagaacacaataaggaggaattctaatgagaaaattatttctatcaattttatctattataataatttcaagtttttgtgttgcaacagggtttcaaaacgttaatgctgcaaataatgaggtgagcaaacctcaaagtaatgtggatagtaaaactaaacaaaatattattaaaaaaataaaaaaatctagaacgtggaaacaaaaaggataccctatctcaatcatttaccctactgaggggacgatgttaaatgtagatggtattgctttagttaacaatgcacaacctcatcccaaacgtaaaaagttagtacaatatttaacaagccgttctgtacaacaacgtttggcagaagaatttgatgctaaatcaatacgtaaagacgtgactgaaacaaatcactcatctattgaaaacttggatcatattccactaatcccacaatcacgtgtatccaatattccacatcatcaatttttggagatgattcaatgaagacctataagccgtaccgacatcaattaaggcgttcgctatttgcctcaacgattttcccagtatttatggtgatgattattggtttaataagcttttatgctatttatatatgggtcgaacattgcaccattcatcagcatacctatcaaactcaaaccgaattacaacgtatcgacaaacattttcatacgtttgttacgcagcaacaaaaacaatggcgtcatgttgatttatcacatccaactgatatcacaaagatgaaacgccaactattaaaacaagtccatcaacaacctgcgatattgtattacgatttaaaaggttcttcacaatctttcacaaacaattatgaacaattagacacaacaaagatgtatttaatatcaaaatatcgaattgattttaaagacgatacttatatccttaaaatatatatgtcaagcacaccactacttaaaaacattaagaaaaatagtggacaatctgcactcattgttgattcatatgatactgttttatatacaaatgacgaccgattctctatcggtcaaaaatatcaaccaccacagtttgggtttataaacgagtctttaaaactcaattctcatcatgcgcatcttattatatataaagatattcatgaaaccattgaagatggaattgcattactagttgtcatgggtgttgttcttattctgcttgttatttttggatatataagcgctgatagaatggcaaagcgccaatctgaagatattgaagcgattgtccgaaaaattgatgatgctaaaaatcgacatcttggtagttacgaaccgttaaaaaaacatagtgagttagaggaaataaataattatatctatgacttgtttgaatcaaatgagcaattaatacaatctattgaacagaccgaagtcgtttacgtgatatacaattaaaagaaattgagcgacaatttcaaccccatttcttattcaatacgatgcaaacgatacaatatttaattcctctttcacccaaagtagcacaaacagtcatacaacaactatcacaaatgctacgttattctctacgcacagcatcgcacacagtcaaattagcagaagaattaagctacattgagcagtatgttgccatacaaaatatccgcttcgatgatatgatacagctttacatcgatgctactgagggtgtacaacatcaaacaattggtaagatgatgcttcaaccactcgtagaaaatgccatcaagcatggtcgtgatagtgaacctttaaagataacaattcgtatcagacttacgaagcgcaaattacatattctggttcatgataatggcatcggtatgtctccatcacatttagaacacgtgcgccaatcccttcatcacgatgtttttgatacgacacacctaggtttaaatcatttacataatagagccatgattcaatatggaacatatgcacgtctgcacattttctcaagaagccagcaagggacattaatgtgttaccaaataccacttgtctaggaggaataaagatgtttaaagtagttatttgtgatgatgaaaggattataagagaaggcttaaagcaaatggttccatgggaggactatcatttcaccactgtttatactgccaaagacggcgtggaagcattgtctttaattcgccaacatcaacctgaactcgtcattactgatatacgaatgcctcgaaaaaatggtgttgacctactagatgacatcaaagaccttgattgccagattatcattttatcgagttatgacgacttcgaatatatgaaagccggtatacaacatcatgttcttgattatttactaaagccagtagaccacactcagttagagcatattctagacatattagttcaaaggttattagaacgcccacattctaccaatgatgacgcggcatatcatactgcctttcaaccaggtggtgttgtacaaagtacatatgttcaggcaacgtttattcctggtgaaacaccgtgttttaattgcttaatgcctcaattaccatctattaatttaacatgtgatacggttggagttattcaaccagctgtaacaatgacaaccagtttacaactcgttgatgcattgaagttgctgactggtaataaggttaataaacacttcacttacggggatatttggacaggagatcattatacatttggttttagtcgtatgcaaaatgaagattgtaaaacttgtggtaatgctccaacatatccacaccttaatcaacatcaacaagattatgcgaccttatgtggaagagacactgttcaatataaaaatgctgatatttctcaggaaatattactatcatttctcgagcgaaatcatattcaatatcgcacgaatttatatatgacaatgtttaggtttagagaacatcgaattgttgcattttctggaggtagatttttgatacatggaac

SEQ ID NO: 3716 - DNA, 3451 bp, Artificial Sequence
  Description of Artificial Sequence: synthetic nucleic acid sequence
tatacgcgtaatttcattatattctaacattcggtctaagatttttttcataagcggatttttagcaactatcaataaacctactgtttcttgatctagtcgatgtatgggctcaacatattcactatcaacagtgtaaatcacatggttcataagtgtgttgctctcttttaaatcattgggatgcgttttaacaccttttggtttcatgacaatggccaagtcatcatcctcgtaataaatttgagcatatcgataacttggtaaataattacttacttcattaggggttggtatctcaacatgatcaccagttttaacattatttaataatgtaccgtactctttattaattaaaatttctttagacatattcagttgatgtaagtcttttttaggtaattttaaatattggaaaatctctctcaatgtataatcgttaaattgtttaggtattgtaaatttcattttttcctcctataaactcagttctatcatatcatatatttgcacgactctataacttgttttattttgaaagttttaataacatcgacattgtgagtttttaaaaacaaagaatgagatgtataataatgataaaatgctaaatttgaggggataaaatggagaaaccaactagacttgcattacttaaggaaatagccgaatttctaaatgaagaaactgaaatatatagcatgatgcaaggagctttgcgtttacttataaatgggagcgacttttcaactggttggattttctatattgatgaagaggggcaccatgatttagtttcctctgtagatttacctgaagctttatctaaaaaccattgttactatttgacaaatggttcttgttggtgtgtgcaagcatatcaaaatcataaattaactaaagcttctaatataataaattgttctagaatcaatttagctaatcatgcttagtctccctggacttttaacaagtcgttcgtttcaaggtggagaaaataaaccccttactattatagggcctaaaggtattcaaaattacatagaaacatctttacaactttctgaatcgcatttgaattatccgattacctatatcgaaatcaatcaacaattagcgtatcaccacaatggttttactgtacaagctgaaatgcttaaccatggcataccttcattcggatatcgtattgaagccccaatcacgcctggtacaatcaatgtagaggccttgagaggtattggactagagcctggtccaaaatatcaggaagtcaaattacaagaaacgttcgaatataaaggattaatttacaattcggatgattttaaaggtaaagctaaacctggtccaattatcagtatatttggtgatacaaaaccgtgtgaaaatgaatatgaattagcaaagaactcagatttaatgattcatgaagcaacttacattgaaggagataagaaacttgctaataattaccatcatagtcatatagacgatgtatttaatctaattaagcaagctaatgtaaataaaagtcttatcactcatatcagtaacagatataacattgatgaagttacatcaatatacaatgagttatcccttgatcaaacttctccacatttttatttcgttaaagattttgatactttcaaaatataataaaacgcttttctctcagaatactatcttaggagaaaagcgtttttatttattcatcttctttatgtgataattccatacttctattcacagctgcacctaaacaatcttcaaacatcgatacaatatcatattgagatagtgcatcaagtccagcttgtgtagtaccacctttagatgtaatatttttccttaattgagacatacttaagtctgaacgctcaatcattttacttgttccaataattaaattgcgtatagattcttcgacttgatttcgttctaaacctaattctgtacctgcttttacatattgttcaaatacatgatataaaaatgcaggcccacttcctgtaattgcagtaacttgatgtagatgttcttcggagacttctataactgatccaaatgcattgattaattcatccacttcatttttagatttaggatcaaaattatttgaaaaacttattccagtaaccgaatgtccaacttgagcatttgtatttggcataatacgagctaatggattattggtattaagctgctgacgaatataatcaatagataaacctgccattatagaaataaacctattatcattagtaatgtgttctctaatacgattagctaaattttcaaaatcatggggctttgtacctaaaaatacataatcggcatctttgagtaatgcttcatcatcataactataattaacccctaatttttctgcaaagctttttaatgcttgttcattggatttattagttaaataaatatcatttgcatttaaattgttggaattaataattccagtaaaaattgcctgcgccatattaccagcaccataaaatacaagtttcatattcaactcaactccttcaattttgaattctattcattgacttaaagttatgcatatatagtatcatatatcatagataagtaatattacacataaataaaattgaatgctatcacacttattaagcttgttattaaaatatacataaaggaggagcgacgtgataggcaaacactttattataactggagcaacgagtgggttaggttttgcaataaccaatgaattacttcaaagaggggcccatgttactatacttgcaagaaatatagataagttcaatcgaatcaaagaaaactattttaaacctgaacatatcaatgtgattaaatgtgatttaatgcaacgaaaagatattgaatcattacaaaaatttttaaatacacctataaatggtttcatctacagttcaggtgttggatattttaagtctataagtgagcattcaactcgtgaagtagtagaaacttacgaggttaatcttacaaattttaatttgttatacaaagtgattcaaccacaattagtaaaagcagcatatatcgttggtatatctagtcaagctgctcttgtttcacaggctaatgcggcacattacggtgcatcgaaagcagggtttagcgccgttcttaatgcattgagattagaacaaccggaattaaaagtgctcaatgtacagcccggtccaatagatacaccattccaaaaaaacgcagatcctactctaaagtattttaaaaattatagacacatgatgatacaacctcaacaacttgccaagcaaatagtggaaggaataatactaaataaaattgaaattaatcaaccatcatggatgcaaataatgcttaaattttatcaattatgtccacgtacactagaaaaattatgtccaaatctatttaaaaataaagtttaaacacc

SEQ ID NO: 3717 - DNA, 3177 bp, Artificial Sequence
  Description of Artificial Sequence: synthetic nucleic acid sequence
tctatcatataacaaaatttccaagtctgatcgactttcacgtagctcgctcgctaattcaatgccacttaaacctgccccaacgatacctacacgtgcccctttaggtaactcgctaattctatggtatgtttcacgcgatttagataatgtttgaatgctatgtgtatatgcttcagcaccagggacattatgatatttatcctcacaccctagaccaatgataagttcgtcataatctatttttgaatttccaactgttatcatttgttcgtccaaatctatatcactgatttccccataaaccgtattaatttgactgctatctggaaattggattcgcacctctttgtcagatttagttcctgctgcaagtgcataaaattcaggttttaaaccgtggaatggcatgcggtcgattaaagttaagtgatatccctcaggaattgaatgaggtaaaatgcgcgacataattcgcatattaccatagcccccgcctagtaatactaagtttttcattgattaatacccctttgttataattgttttattgaaacccttttcaaaaatcactagaatactctaaatgaagatgattcctagtccctgatagttataataattgtatgcatgactattatatctatttttcaaaatgactacaaacaaatgtagaatgcaatttaattattatgaaatttaaaaagataaacaaaattaaaatcgtcataccgactgatagtcaggacattgaatactttgttataatgtttaaactaataaagataagaaggtgacttatgtttccgttagtggagttctgtatttcaaatatggccaaaggtagtgatgttgtatttgaaaaattagaaaatgatcctaacatagatgtccttgaatacggttgtctacaaaattgtggtctatgcgcaagtagcttgtatgcccttgtagatggtgatattgttgaaggtaacacaccagacgatttattaaaaaacatatatcaacatatcgaagataatgatataacgaatttgttatagagattaaaaaattatgggaggttttttatatgccaacagtcattttaactgaagcggcagcatttgaagttagagacatgttaaaaaataacgacatgtctgatggttatttaaaaattaaagtaaatggtggaggatgcacaggattaacttatggtatgtcagccgaagcagaacctggtgaaaatgatgaaattctcgaatactatggtttgaaagttctagtagaccgaaatgatgctcctgtattaaatggaacaacaattgattttaaacagtcacttatgggtggaggatttcaaataaacaatcctaatgctattgcctcatgtggttgtggaagttcatttaaaacagctaaagtcgctggaaatccagagcaatgttaatttcatattgccatccgaaattaaattaaacttttcacaaactatccctattgtagcttgaaaatatagggtaaaagctatagaattaaaattagattaaaagtgtcttttatgtgaacaactgaagagcaaaacccaaaaaagacttgaaaattttaaatgttgactaagactataaagaaagagacaatttggcttgtcatatgtttatagcctttatctacattgttggttggttaaaatattatgaaagcttaggtgaattagagatggctcaagatcgtaagaaagtgctcgtattaggtgcaggttatgctggtttacaaactgtaactaaattacaaaaagaactttctgctgatgcagcggaaattactttaattaataagaatgaatatcattatgaatcaacttggttgcatgaagcttctgccggtacgattaattatgaagatttattgtatcctgttgagaaaactgtcaacaaaaataaagtgaattttgttgttgctgaggtaacaaaaattgatcgtaatgctaaacgtgtagaaactgataagggtgtttatgactttgatatcttagttgttgcactaggttttgttagcgaaacatttggtattgatggtatgaaagaacatgctttccaaattgagaacgttttaacttctcgtaagttgtctcgtcacattgaagataagttcgcaaattatgctgcttctaaagaaaaagatgataaagatttatctattttagttgggggagctggatttacaggaattgaatttctaggtgaattaactgatagaattcctgaattatgcagtaaatatggtgttgatcaaagtaaagtgaagttaacatgtgttgaagcagcacctaaaatgttaccgatgttctcagacgacttagttagttatgcagtaaaatatttagaagaccgtggagtagaattcaaaattgcaacacctattgtcgcttgtaatgaaaaaggtttcgttgttgaagtcaatggagaaaaacaacaattagaagccggaacttctgtatggactgctggagtgcgtggaagtcatttaatggaagaatcatttgaaggtgttaaacgtggacgtattatcaataaacaagatttaacaattgaaggtcataatgacatctttgttataggagattgttcagcgtttattccagctggtgaagagcgtccattaccaacaacagctcaaattgctatgcaacaaggtgagcatactgctagcaacattaaacgtttattaaatggtgaatcaacacaagatttccaatatgttaacctaacgatcaagatgcagttgaaaggaaagagaaagaaactgagtttcaaaaacaacaagatgaagaaattgctttaaaagagaaacttaataatttaaatgataaagactatatcgagaaaatagcgagagacgattattatttaagtaataaaggtgaagtcatttttagattacctgatgataaaaaatcctctcagtcaaagacttcaaacgaaaaaggcaattagaataaaataatatgattatatcattgtgaaattacgtgaacaggaatataataaggataaaatcgaatctaaccaggaggatttatttagaaaatgtcaatcgaagtaggaaacaagcttaaaggtaaaattacaggtatcaaaaagtttggtgcattcgtagaattacctgaaggaaaaagtggtttagttcata

SEQ ID NO: 3718 - DNA, 3896 bp, Artificial Sequence
  Description of Artificial Sequence: synthetic nucleic acid sequence
catctgaatgagttatatctaattttaatgatgtggttttaacacctgattgtgtagatatagttgtggctgtttcttgaccaatattggattgcaaatcagcgataacgatatttgcccctgcttgtgctaatgcctctgccatagctttaccaatgccagttgcacctccaatgaccattgccaccttaccagttaatttaaatttttccataatgtttaccatcgtcaatcacctttctcgattttcaaaactgtttttaaaatcatgaaaatatcataaaaaataacaatttttcattagcttatgtatgataatccttaaatctgaaatcacttctgtgtcacaatttaaaattgttcttcattaccattgcaaagatatgtttgaaagcaagaattttacttcaaattttaaaaatgatgataatgaatgatgattctgcctcaatatatcacatattaagatgatttcgaataacaaagatagatacttagttttaacaacgttatacgtcaatcatttttgttgtaaacttaacaaataactacaatattatagtaccaaaacaaaatgtctcgaacaataaaattaatgtttttattttatttacttaattaataaaaaatcaatgctatttataataaaacgaactcacactcttttgttcaacttaaatattcaacaattaatttcatcaaaaatgaacttgagtttcaccttttaaaataataagacactcaatactgagcactttgtttatcctcacattttcgcattaattcatctctttcattctcatttttaagatgaactcacattgttcattttttgtctttatacctcactatcgcacatatctcctttattcaattaaatcgcacctccttcctatttcctataaaaaacaccccgtaacattagactttctacctaatgctacggggtgcacacatcatgtggttatttcgtgacatgtcattctatttttaaaatacttatctatttaaatgtaagtttttagaagtttcgcgacgtgtttctctcattaatttttcgtcattaattaatgaacgaccgtatgttggtaccatttctttaacaacaggttcccatgcttctttgtcatcagcgaagtttttctctaaaacttctaatacaactgataatgatgttgaagcccctggagattcacctaataatgcaatcatagaattgtcgtctgaattgacaacttcagtaccaaatactacgaaacctttcccgtgttgttcactatctttaataacttgaacacgtttaccagcagtgtaaagttcccaatcttcatctttagcatcaggaataaatgttcttaaatagttcatacaaccttctttagttttgatcatttgatcaattgaatatttaattaaaggtacatttttaactgctgaagccaacattgtagtaatgttatatggtttgattgattcgaataagtctagatttgaaccgaatttcaagaatttagggccgatattcgcatatggaccaaataataatgtttgtttaccattgatataacgtgtatcaaggtgtggtacagtcattggtggcttaccttgaggctctttactgtaaactttagccgcatgttgtttaataatatctgggtttgtacatcttaagaattgaccactgattgggaaaccacctaggtgttctctttgtttaacgccagatttttgtaataacggaatagagtgaccgccagcaccaataaacactttatctgctattttagttactttttctttagtttctctattttcaacgacaacttcccatttgccatcttctctttgtgttaaatctacaacatcatgattgtattttaatgaaacattagatttttgttctaagtaatgtgctaacttacgtgttaacgcaccatagttcacatctgtaccttcatcaattttacttgctgccatttgatgacctggttcacgattttccatcattaatggcatccattttctcattgtttccatgtcttctgtatattcgattgtatcgaacattggaagagttcttagtgtttcataacgttttcttaaaaagttaacgtttgttggtcccataacgaaactgatatgaggtaatggttgaataaattcttcaggattagaaatatcaccatttttaactaaattaccccagaattgtctagataattcgaattgttcattaatttcttgcgctttagatgcatcaattgaaccatcatcttgttcaactgtatagtttaattcacataatgccgcatgacctgtcccagcattattattttcatttgaactttcaataccagcgccttctagtctttcaaacatatcgatatgccagttaggacttacttttgaaagcattgtcgctactgacgtaccaataattcctgcacctacaacaacgatgtttttatgatttgcttcactcatgtgcatgttcctttctaaatttatatattaaaatagtacatatatagactttaccactttaaaaatttattaaacaattaagcgcgaaaactcagtaatcatttatttaaaagttgtagtcagctatgtgagttttgtggtaatatcatcatgcgtaaaaattcgagattattattataaagaaggtttaaataaatcatgaaagaaaatttttggagtacattgccacgtccgttttttattctggcacctatggaagacgtgacagatattgtctttcggcatgttgtcagtgaagctgcgagaccagatgtattttttactgaatttaccaatactgagagttactgtcaccctgaaggtattcatagtgtgcgcggacgcttaacttttagtgacgacgaacaaccaatggtagcgcacatctggggcgataaaccagaacaattccgagaaatgagtatcggcttagcggatatgggttttaaaggtatagatttaaatatgggttgccctgtcgcaaacgttgcgaaaaaaggtaaaggatccggcttaattctacgacctgaaacggcagccgaaatcattcaagcttctaaagcaggtggtctaccggtcagtgtaaaaacacgtttaggttattacgatatcgatgaatggcgagactggttaaaacacgtcttcgaacaagatatcgcaaatttatccattcatctacgtacccgtaaagagatgagtaaagtagatgcacactgggaattaatcgaagcaatcaagacattacgtgatgaaattgcgccaaatacactattaactatcaatggtgatatccccgatagacaaactggtctagaactcgcaaataaatatggtattgatggcattatgattggtagagggatcttccataacccattcgcatttgaaaaggaaccacgcgaacattcaagcaaagaattattaggtttattacgcttacatctctctttatttgaaaaatatgataaagatgaagcccgacacttcaaaagtttacgcagattcttcaaaatctacgtacgcggcattagaggcgctagcgaactccgccatcaattaatgaacacccaatccattgccgaagcaagagaactactcgatacttttgaagcacgtatggatgcacgttcagaagtataagtatgcgagcggtaagtataataaacaataaatgaacctcccctgttgagtcagagggaggttgtttaatattaagtagtagtaaatctcgagcaatttacaaaagtgacataaaaataagttttagactgattacttaaacatatagtgggccgaaaagtaaatgagcaaactgttaaatatagtccttgctttttatacaaaatatagaatgatgaatatatattgaacat

SEQ ID NO: 3719 - DNA, 4032 bp, Artificial Sequence
  Description of Artificial Sequence: synthetic nucleic acid sequence
gtgcttttttaagtgagttaaataaagatttgagtaatatagaatcggctattcgacttgcaaatcaagcgtcgtctctaacggtacaacgaaaaggagcacaagcttctataccaacacgtaaagaagtagaggcagaatataattaatgaaaaacatactaagattagctatgaagaaatctatgacgatagattttttcatagctattttttatagttatagagagaagtagactgtccagactcttggattttaaatccgtataaaaaacaagtcagctttactctcgccttttgaaattcgtttgtagtatgttgggttcttgaaaccgtgtataggaaaatgaaatgagaaaggttaagtaaagtttttagcttctcaattattcaaaggaggtttttttatcgattacttaggtgttgatattagtaaaagaagtagtgtagttgcacattataaaaatgaaaaattccaaaaagagtttttcatccaaaataataaaaatggttacaactatttactcaagtatttgaatgacttagaccacccacaactcatttttgaatctacaggtatctattcaagaagtatggaacgattttgttgtgtaaatcaaattaactatattcaaatgaatccgttagaagccaaatttaaaacgagcgctctaagatcatggaaaactgatcaggcagatgctcataagcttgcttgtttaggaccgacgcttaaacaaacagacaacttacctatacatgagttaatattctttgaattaagagaacgcgtccgttttcatctagaaatcgagaatgaacaaaatcgacttaaatttcagatccttgaattactccatcaaacattccctggtttagaaagattatttagtagtcgatattcaatcattgcactcaacatcgcagaaatctttactcatccagacatggttcttgatatcgacaaggaggtactgattacacatatattcaattctacagataagggaatgtcaatggataaagctacaaaatatgcacttcaattaagggtgattgctcaagaaagctatcctaatgtcgatagacattcctttctagtcgaaaaattacgcttacttattcaacaattaaaacaatctattcatcatctcaaacaattagatgatgccatgattcaattagcacaacaactcgattattttgaaaatattcattcgatacctggtattggtaagctaagcacagctatgattattggggagattggtgatattaagcgatttaaatcaaataaacaactcaatgcttttgttggcattgatatcaaacgatatcaatcaggtcatacacactgtagagataccatcaacaagcgtggtaataaaaaagcgagaaaacttttattttgggtgattatgaatataataagagggcagcatcattatgacaatcatgtcgtcgattattactacaaactaagaaagcagcctaatgagaaacctcataagactgccatcattgcttgtataaatcgattattaaaaacaattcattatcttgtaatgaatcataaattgtacgattatcaaatgtcaccacattagccaaacgtacaatcaaatatagtttaacaccttattcaaaaaaattaaaatgaacggtttagttaagtaatgcttattttaattataagtacttgactaatcgtaggataagagtctgtgacatggaataatgtcgcagactttcctcacttataaagagggaatctctaaattttataactgtttaaataatgtcaaaggcccaataaaaagagattatagaaaaatcgaacagattaagccagttgcacgacgatgacgaaatttaacacgaattcttctccacaccctcatatagtgtaatgaataccttttaattttaagttttaattctcgttctaactatttatgatatatttatacttaattaactttttaaacaaagggtgaacgatggtgaaagaagtagttctaggaattgatttaggcacaagcgcaataaaaattattgctgttgatcaactaggaaatgtcattgaatcagtaagcgaaacattaaagttataccaagagcatcctggttatagcgaacaagaccctaatgaatggtttgaggctactaagaaagggataaaagaattaattcaatcaacagaaatgtcagataagatagtaaaggggatttctttttcaggtcaaatgcatgggttggtcatagttgatgataatggcattcctttgagaaaagcgattttatggaatgatactagaaattcaatacaatgtagacaaattgaagatatatatggtgaaagattgaattacaatccgatattagaaggatttacacttcctaaaatgttatgggtacaacaacatgaacctgaaatttggaatcgagttgatgtttttatgttgcctaaagattatttacgttattgcttaacgcagacaattcatatggaatatagtgatgcatgtagtacattattattcaatcctgagaattatgaatggacaaaagatgttggagatacatttaacattggtgatatctatccacccttagtaaaatcacattcgtatgttggaaatgtaacttcatcactggctaaagaattaggattatctagtgatgttgctgtatatgctgggggtggtgataatgcatgtggtgcaattggtgctggtgtcatccatgataaaagtgcattatgtagcataggtacttcaggtgttgtattaaatgttgaataccaacgtgtgacctcatatgatagtaatttacacttattcaatcatagtgttccagatacttattacgcaatgggagtaacgttggcagcaggctatagtttaaactggttaaaacaaactttttttgaaaatgaatcttttgaagagattttaaatttagctgcatcttcaaagataggtgccaatggactactatttacaccttacttagctggagaacgtacgccacatggtgatgctcaaatacgtggaagttttataggtatcagtgggcaacatactaaagctgactttgcgagagcagtaatcgaaggcataacgtattctttatatgattctataaagattatgagacgagctggtcatgaaatgaactctatcacttcaatcggtggtggtgctaagagtagattttggttacaacttcaagctgatatttttaatgtgcaaataaaaagattgaagcatgaagaaggcccaagcatgggagcggcaattttagcggcatacggtctaggatggtttaaaacaattgagtcttgtgtagaggcatttattaaagtagacgaggtgtttgagccgaataatgaaaatcatgacctttatgaacaatactattcagtttatgaagctatatataaacaaacgaaacagcttactgctgatttgttaacgataacgaattaaatattaaagacttatcgctcacttttaatggcgatgagtctttttattatagtcaattataaggaaatgaaaaaaataattatatttattaacagtaaatacaattatgtcgaagaaaagttcaaaaattgaaaaactgtctactaaaaatgataagtaaaaatttaattattaaaatgaatattgacattgatttaaattatacgtttaatataggtatcatttttaagatttgagcaatcaagactatataagcatcgagaggatgatactatgtttatttcaaaacaagaattatatgaaaagttacaatatgttacgccaagaacgtttgcctacttgaatgaaatagattattataacttattaatgataattgaagagcatcaaatatctattccaccgattcatcaacttcgaaaaacattgcgaggaagtaaaattatgaagcctaagaatcgcgtagacaattgttatattcatttaaaggatgaaattccgacccctattaacaatgaacaattaagtttcctgcattttta

SEQ ID NO: 3720 - DNA, 2932 bp, Artificial Sequence
  Description of Artificial Sequence: synthetic nucleic acid sequence
tttttgctttatcaattttcacctctaacattgttccatcttcaactgttattttaaaatgactttgactcacaacatctgcccctattcctttttttatttgttatgtcatttatagtacatctacctatatcatatttaatataccgtgtgtgagatatcatatcaaatcgtacgcatattgagtttatataagcttatagcattaaaataaaaaactacttgtagataaaaagatctattccatctacaagtagtttattataatctattagatattcaatcaataggaatgattaagctttagttgcaggttgatcattacctgtacgtgcctcatcaatcgcaacttctacttcttcagtataagcttctttttgagtttcactataattaagcatatccgccataacatctatcacagcatttttataatctaacacatcttgaatattaaagtataatttgccagaacgacgtactaagaagtcagttggtttgtaaaccatttcttgttgaatactataaactaattcaacataaatttctaatggtaatttactatcatgatatggtgccgtttgagcaatattaaatagttgatcaacatttgaaccatatttacttgctaagcgacgtgccacatcttcatcaattccaaatcctttagctgcatcaactttttgttcaacaaagtgttcaaagtttttgcttccgccaacgtcaccaccggaaatttttagattttttgtggcacatgattcaaatttcaatccgtattcttgttttaaacgtttagctaataaatcaacaatttctagtgccatatgacgataaccagttaatttaccgcctgctatagttaataatccagattcaccttcccaaacttcatctttacgtgagatttcagaaggatctttacctttttcaagaattagcggacgaataccagcccatgttgattcaatatcttcatctttaacattaactgttgggaacatatagttaattgcattaattaagtagtctctatcttcttgtgttgttaaaggtgttgctttttcattatcataaaacgtgtcagttgttcctacataagcttttccttcacgtggaatcgcaaaaatcatgcgtccgtctttttcagtatcaaagtaaactgcttgacctaatgggaatttagattgatctataacaacgtgtacacctttagttaatcttaattgcttattgttacgtgcataatcgccacttctcacttcatcaacccaaggaccagaagcattaataacttttttagctttaatcgcatacgtttcgccatcaatcatatccaatacttcaataccatttactttcttattggaatcataagtgaagtgttctgattttgtataattaatgatttctgctccattttcagcagcttttttcataacttcaatagttaaacgcgcatcatcagtgcggtattccacatagtagccaccgccttttaatccatcacgtttaactaaaggttctttatttaacgtttcttgcttagataacatttttttacgttcggattttttgacaccagctagacgatcgtacatagctagtccaatagaagttgagaatttaccaaatgtaccacctttatgcataggtaaaagcatccattctggtgttgtcacatgtggaccattttcataaacaatagcacgttctttacctgtttctgcaactacccctacttgcagttgttttaaatatcttaaaccaccgtgtacaagtttagttgagcgtgaacttgtaccttgtgcaaagtcttgcatctctactaaagctaccttcatcccacgattacttgcatctaaagcaatacctgcacctgtaataccgccacctacgataacaacatcgtattcagtgtctcttaaattctttttaatatgatcccttttcaatgtagataatgacattatctaaacgcctcctagttataaataaaaaacgagaaatttatccccacaataacattaaattgttttgtacgaacaaatctctcgtttctcgattttcttattaacttatctagattataacacagttaagaaaatcaagtccatttaaagatttaaaaagtctaatacatagcttaatcttctaatttaaatacttgagtcgccttaacagcttttttccaaccactataaagtttatgacgttgatctgcatccatttctggtttgaactcagtttgaagtttccaacgttcacggatatcctctttatcatcccagaatccaacagctaatccagctaaatatgcagcaccaagtgctgttgtttcttggatttcaggtctttcaacagatgaatttacgatatctgcttggaactgcataatgaagttattttttacagcaccaccatcaacgcgtaaattttgaacttcaatacctgagtccttagacatagcttccataacatctcttgtttgatagcacaaagattctaatgtagcacgaatgaaatgttctttttccgtaccacgagataatccgaaaatagcacctcttgcttctgaatcccaataaggtgtacctaaaccaacaaatgctggaaccatataaacaccctcagttgactctactcttgaagcatagttttcggtttgtggcgcagaattaatcattctcaaaccatctcgtagccattggatagcagaaccagatacgaaaattgaaccttcaagtgcataattaacttttccatctaaaccgtatgcaatggttgttaacaagccactttctgacttaactgcttcttcaccagtattcattagcataaatccacctgtgccgtatgtattttttacatcaccacggtcaaaacatgcttgaccaaataatgctgcttgttggtcaccggcaataccagc

SEQ ID NO: 3721 - DNA, 3116 bp, Artificial Sequence
  Description of Artificial Sequence: synthetic nucleic acid sequence
tggcctactttttgtagtgtctgttgaattaattcatcttgtgcttggtttaacttacctattaaatcatcacccgcttcagtggtaaaaagtttttttactcgtctatcctgcttagatgtttgttcgacgattaaaccttcttcttttaatttacgtaacgttgcatgcgatccttgtttagatatttcaagcgtaatcaaaagttctttaattgttatacccggtaatttattaatgaaaaataagaatcgatgatgttggcgactcatgccatattgctcaataatttcatccgctgtagtaataaaagtcttatacgcgaagtaaaacagcatatgttcgtaatcatttttatttttagacatttaacactatcctttttttattcaatatcgttattataataaacttttgactgatagtcatatatttcagaaactgttcaaacttttaataggtcaacttagttgactttatttcaaattgacgttaatatgatacttgtaagataaaagaaatcaaaggtggaattatatatgaaacaacgcgtaggacaatatttaatggacgcggtttattcagcaggtgctgacaaagtttttggtgtcccaggagattttaatctagcctttttagacgatattattgcacataatgatattaaatggattggtaatacaaatgagcttaatgcaagttatgctgccgacggatatgcacgtattaatggcatcggtgcaatggtaacaacatttggagtgggtgaattaagtgctgtcaacggaatcgctggatcttatgctgagcgtgtgccagttattgccatcactggggcacctactcgagctgtagaacaagaaggcaaatacgttcaccattcccttggcgaaggaacttttgatgattatagaaaaatgtttgagcctattacaacagcgcaagcttatattacacctgataatgctaccacagaaattccaagagtaatcaatacggcgcttcaacaacgtcgtccagttcacattcatttacctattgatgtcgcactaacagagattgaaatttcaaatccattcaaaccagaagtcgaaccacaaaaaaacgttcaaagttatatcaatatggttcaagacaaacttgaatcggcatcacaacctgtcattattacaggacatgaaataaatagtttccatctgcataaagaactcgaacaattcgttaatcaaactcaaattccagttgttcagttatctttaggtaaaggtgcaaaatcatttttagcttcagtaattttatcagcaatagtgttaatattagttggagacatatttggatttgtttgttcagcaactatgtttttacctctatctgtatactcatcaaagttaacttgttgagaagtatcttcattaatataattactcgtttgttttattgcgtcattaccagttaaagcatcatctaattttttcatcgcatcattaagttgatttgctaattgaactactttttgtacttctggtctagaattagagttttgaactttagtttcaagattacctctttgcgcttgatttaagtaatttaacgcatttaatgttgcttgggcatctgtcttgtcgttagcaagtttttgatcaccatgtaaattatctttagtttgtttaacttcatttaggacactttgaatctcatcatttgccattactggtgttggttgatcattaattatatttttagctttatttacggcttgattataagcattttgttgttcagaatcttcattgaagtacttactactttgtaaaatttcattattatcagcaatagaatctctaagtgctttcattgtattatttaattgtttagcacttgcaattttttctcctacttggcttcttgttggtgcactgaaaatatgatttaaaatcgtatctttttgcccgttcgtcaagctattaaggttttgtagttgttctgaagcttcttttttatcttctgatagtttattactaccgtgtaaatcattaagtgcttgtttgatattttcaatagcttgatctatttgatttttatccatgatagtaggatgagcagttatcaaatcttttgctgcttgaattgcatgattataagcatcctgttggctggaatcttcattaatgaaatcactattttgttttactgtattgtcattgttaacaatttgttgtagttgattcatagagttatctaattgtttagagttatttacgatatcatctacctgttgtttagtttgagcttgattaattaaatcatgttgtttatctttttgtgattgtgttaatccttgcaaatgttcgatgctttgatttccgtctgacttagcctctgctaatttagattgcccatttaaattattttcagcagttttaatcgtttgagttgctctatttattacatctttattaagctctggtggttgggtagttgcaataatttgagaaccataatttaacgcagaattgtaatttgcttgaagaccactgtcagcatttacatatctactatcagccttgatttgttcttttttatttatttcagttttcagtgctttcatagcttcattaagttcttttgctttttgtaaggcttcttgaacttctggtttggttgatgcttggttaactaatgttttttcagcaagaacctgtccaggatttaatgcttgtaaattatcaatttcagcaatagcttgatttttagcctcttgaagtttttgctcaccatgtaaactttctctagcattttgcaattctaataaagcatcttcaattgtagctttatctaaagtgctacttggaacgccgttgataatgtctttagctttttgaagtgcattactatattcattttgtgccgcttcatcttcattgataaagtcgcttaattttttaacactgttttcaagagcaacttcattctcaagttgacgcatagcttcattaagtgctttagcatgatttaaatcattagaaacttcagttcttgaaggagcagagttaatctcatcatgctcgctttgtctttgagaattgtttagatttgttaaatagtttaattcattg

SEQ ID NO: 3722 - DNA, 3370 bp, Artificial Sequence
  Description of Artificial Sequence: synthetic nucleic acid sequence
gaatagcctcaaaaaacatctaaagtgatggattttgaggctttttgatgtttggcacttcattcacatcatcatttgtggattgatatcaatttttaatgatagtttatcctttacatattgatcatgattataatcatctaaatattgtaacgcttgatgtaattgaggctcactcttatattttactagtatttgaaaacgatactcattgttaattcttgctagtgctgctggtgaagggcctagcacgaatgctttttcacttaagtgctgtactaaaatttgatgtatatgcttagaggccatcatgaccttttttatatcagtatgtgaaatggtaaagttaatcaaaaaatagtaaggtggatattttcctaattttcgataattcatttctttttgataaaaagaaagataatcgtttaatttcacatcctttattgaataatgatcagggttgtacgtttgtatgataacttgtccttctttttcatgacgacctgcgcgtccagatacctgagttaaaagttggtatgttcgttcactggcacgaaagtcaggtaagtttaacatagtgtcagcattgagcacaccaactagagtaatgttaggataatccaaacctttagcaatcatttgcgtacctaataagatatctccttttcctgcttcaaagtcatttaacaatttctcatgtgcaccttttcttgaagttgtatcaacatccatccttataatacgagcatgagggaattcttgttgtaataattcttctacacgttgcgttccagttccgacttgtctgatatgatcaccttcacaatttggacattgagatggtggattttcttgataaccacagtaatgacattttaattgatcggttgttttatgatatgttaacgaaatatcacaatggggacattggggaacgtaaccacaatctctacataacataaatgaagcatatccccttctatttaagaatagtactatttgttcttttttatccaaccgttcttgtatcgcttgtcttagtgctatagaaaacatggaacgattaccttcacttaattcttctctcatatctataatatcaatatgcggtaacgcttgttgattgactctatgtggcaatgacaacaactcgtaaacatttttttctgctcttgcatatgactcaagactcggtgttgcgctacctaaaactacaggacaatgatgaaattgacttctccattgtgcaatatcacgtgcatgatatctgggataatcttcttgtttatatgtagattcatgttcttcatcaattataatgatgcctaaatttttaaacggtgcgaaaatacttgaacgagcacctacactcactcgagctcgaccgtctctaattttttgccactcatcataacgttcaccttttgaaagtccggaatgtaataccgctacatcatctccaaatcgacgtttaaatcttagtaccatctgaggtgttaaggcgatttccggcactaacatcatggcttctttacctttattaagaacttcttctattgtttgaagatagacttcggttttacctgaacctgtgactccgtgtaataaaaatgttctttctttttcatcatgaatataatgttgaatagcttcaaatgcatcttgctgttctttagttaatatcctcttttgttcttgttcaaatatacgatttgcatatggatctctgaaaacctcggcgatatatttttcaatataaccttttttgattaaagaatctaaactcgagtgagagaagcccatatcattgatttcttttaaaaacactgttcgatgagactcttctaataaaaatgcatacaaatcatattgttttgtatatttctcgagttttgcaagtacttcatcaccattcaacgtattaactacgccaacagctttttgagttttcttttttgtgttttgagaaagtatcgtgacctcttcaatcaatccttgatttaacaaagtcaacatttcttctaaatcattgttttgctgaacttctttatataagtaataaccgtcattgttaaatagcgctttggtttttgaagataaattttttggatcgataattgaaaaagctttcttatactttgctttaatggcacttggcaacatcgcttctaaaacagaaatacgtttcatcacatgataatggctcatccattcgcttaattgaatcagttcggatgttaattcaggtttaatatcacgtacttcttttatttcttttagtttcgatatatccatatttccatctggtttttgttgaatattcatgacgtatccttgtatagttctagggccaaaaggtaccacaacgcgaacgccaatttgaatcacacgttctaaatttttaggaacgatataatcaaatttaaaatcgacacttttcgacggaatatcaacaattacttttgcaatcattactgccacctagtttctaaaatttctataatttgatgtgctaaagctgatttttttcctttcttaatatttactttttcattatttttaaaatgcatagttaattcattgtcatctgaactaaagcctatggatgtatcacctacattgttcgaaatgataacatctgcattttttcttttgagtttgtctagagcatactgttcaatattttgtgtttcagcagcaaaaccaacaagatattggtgcgttttattttctcctaagtattttaaaatatcctttgtacgcttaaattgaacagataatcctccttcttgtttttttaatttatgttcaagtatgtccattggtgtataatcagacaccgccgctgctttaatcactatatcttgtttcgcaaagcgttcggttacagcttgaaacatatcatctgcactctcaacttttactacattaatcccttcaggtagagataagtgggtgggaccactaattaaagttacgattgctcccttatctcgtaatgcttcagctatagcatatcccatttttcctgatgaacgatttgatacgtatcgaacaggatcaataacttcaactgtaggcccagctgtaactaatgcgcgctttccagaaaaagagcttttgacaacattcttctgttgagtaaaaaatttattaataacagataggatttgcatgggttcttccattcgcccttttgctacataaccacatgctaaatagccactaccaggttcaataaaataatatccgtcttgacttagcactttcatattatgtttagtacgtggattgttatacatatttacattcattgcgggtgcaacgaattttggtgttgttgtagcaagtaatgtagaagtaattaaat

SEQ ID NO: 3723 - DNA, 2997 bp, Artificial Sequence
  Description of Artificial Sequence: synthetic nucleic acid sequence
tatacttcagctttgaattttgtgtgtggtgtaatagaaccaggagcagctaatacttgaccacgttgtacgtcttcacgtgcaacaccacgtaataaagcaccgatgttgtcaccagcttcagcgtagtctaataatttacggaacatttctacaccagtaacagttgttttagaagtttcgtgcataccgatgatttcaacttcttcaccaactttgatttgaccacgttcaacacggcctgtagcaacagtaccacgaccagtgattgagaatacgtcctcaactggcatcatgaatggtttgtcagaatcacgttctggagttggaatgtaatcatcaactgcttgcattaagtctaagattttttgttcgtattcagcatcgccttctaatgcttttaatgcagaaccagcgattacaggtacatcgtcacctgggaagtcatattcgcttaataagtcacgaacttccatttcaactaattctaataattcttcgtcgtctaccatgtcaactttgtttaagaatacaactaatgctggtacaccaacgttacgtgataataagatgtgttcacgagtttgtggcattggaccgtcagcagcagatacaactaagataccgccgtccatttgagctgcaccagtgatcatgtttttaacatagtcagcgtgtcctgggcagtcaacgtgagcatagtgacgtttgtcagtttggtattcgatatgtgcagtattgattgtaataccacgttctttttcttctggagcgttgtcaatcatatcgtatgattgtgcaacagtgtcaccatttttagctaatacagttgcgatagcagctgttaaagttgttttaccatggtcaacgtgaccgatagtaccaatattggcatgttcttttgagcgatcaaatttttcttttgccattattaaatctctcctattcttaataaaagttatttcaaatttatctctcatgatagtttctcaccatcatgagaagaaaattgattgagtgtagcataaaagaatttataattcttttataatgcatttacccctaaaaatcaaatcataaaaatgtcagcttataaataagctcaacctgtattttaacctagcatagctagtcttaacaagttatattattcacctttatttttcttgatgatttcttcagcaattgatttaggaacttctgcatagtggtcaaatatacgtttaattctgtgtaatagattctacctgagcctttgtcatgtcaattaaatcattcacatgaatgataatttgcattcctctttgacctccgctaatataaactttttctaaatttttagcggaagcatcaatcgtcgttttaaaggaatgtttcataccgataggtgaacatcctcctctaacataccctgttacttgttttaattgatcgagaggcattaaattcaatttcttttcattaacaacatgagccgccttcttcatatctaaggtttcattaactggaatgacaaaaacatagtgttcatgattggaattctctagtacaagtgttttaaagacttcttctattttagcacctacgagttgtgcaatctcttctccatgttgatgcttgtcagtaacttcgtaagtattcatttgataattaattttagctctatctaaaatccgcattgcatttgtttttttagttttagacatattctcaccctttataacaatcattcacatctcattttaacatgaaaactttatttcatttacactaacactattaaaaaacacccttaaacaaaacaattcctccattttaatagggggaattgtttttataattttttcttttagagtcggtatatggcgtattttaataaatttttaagcaattctgaaaggaagcgtggaaaagtgagtaagaaagtggcaattattggagcgggaatcactggtttatctagcgcatatttcattaaaaaacaagacccttctattgaagtaactatcttcgaagcctcaaatagagtaggtggaaagattcaaacatatagatcagatggttacacaattgagttaggccctgagtcttatttaggtcgtaagacaattatgactgatgtggcaaaagatattggattagaaaatgaccttataacaaatactactggccaatcttatatttttgctaaaaataaattatatcctattcctggtggctcaattatgggaattcctacagatattaaaccatttattaaaacaagactcatttcacctattggtaaattaagagcggggcttgatttgtttaaaaaaccgatagaaattgaagatgatatttctgttggtagtttctttagacaacgattaggtaatgaagtattagagaacttaattgaaccactaatgggtggtatttatggcactgatattgatcaattgagcttaatgagtacatttcctaactttaaggaaaaagaggaacaatttggtagtttgattaaaggaatgaaagacgaaaaagaacaacgtattaagaaacgtcaattatatccaggtgctcctaaaggacaattcaaacagtttagacacggattgagttcttttatagaggctcttgttaaagatattgaaagtaaaggtgtccacatacgatataacacgccagtcaaagatatattgatttcgcaaaaagattatgaaattttattagaagatgacagtaaagagaaatttaatggcttacttgtaacaacaccacatcaagtatttctgaactggtttagtcacgatccagcatttgattactttaaaaacatggattctactactgtcgcaacagttgttttggcctttgatgagaaaaatattaccaatacgtacgatggaactggctttgttattgcaagaacaagtcaaacggatattactgcatgtacttggacatcaaagaaatggccatttactactccagaaggtaaagttttaattcgag

SEQ ID NO: 3724 - DNA, 3645 bp, Artificial Sequence
  Description of Artificial Sequence: synthetic nucleic acid sequence
cattaaacgatcgatttgaatactttcagatgtataaaccacccaaacttcatctacagtatcttgtagttcattttcgtacaacaatgggatatccataattacatgatatccatgttctagataattgtttttctcttgttccattatctctcttacaataggatgaactatttcattaagagcctcgcgtaagtcaggatgattaaaaactatctctcctacatattgacgattcatctcaccattttcgtcaattgcttcttccccaaaaatctctttaacttgttcaagacccttagagccttttttaactgcttcgcgtgaagcaatatcagcatctacgattttaaacccatatgctgttaataattctgaaactgttgattttccagtggcaataccaccagttatcccaatcactttagacattatttcactcttcctttatctctgacagtttgggcaaaaatgactatttctaccagctatcacttttgtttcaatcgaatgaccacaaaccttgcactttttttgtttatatacatttaaatgtaattgcatttgtccagttttaccatctgcatgcctataatctgaaatactagtacctccatattttataccctcttctaaaacttctcgaacataataaaagagggattttctttcttgtttagtgagtgaattagtaattttatccggagtaataccagctctgaataaagcttcacaggcatagatatttccagctcctgctataacacgatgatcaagaatcgtttgttttattggtttattcttatattttttcattgtcaaacattctaaatagtgttcaaatgccacctcttcaaatggttctggagcgatttctaataaagatggataactatcaaaattgactatatttctaatttctccaaaccgtctgatatcagaatagactaatttttgtttattatccaaatcgaaaatgacttgccaatgctttcgataattcggtgtacttatctcatcaaggttattaacaacaaagaatccgcctgccatacctaaatgactaactaagattctatcatcgtcatgatccgctatataaaaaataatgtacttacttcttctttcaactttttttataacataaccttcagtaagttttttaaaagtatctaattccataccttttataatcgtctcacggttattattcttaccgttaattacatttttagcaaaagttactttctctatttttgcactttttataaatggctcaatacctcttttaacatgttcaacttcaggtagttcaggcatgatattatcctttctttatttagcatcgtaccatgttgcaccataattcgaatctacttttaaaggtacatcgagcactaatgcttgttccataatttcttctacaaatttactaaaatcttctacttctgattttggtatttcaaatatgagttcatcatgaacttgtaataataacttagcatgatatttagtttctttaatcttttcactgaatttaaccattgctaattttattatgtcagctgcactaccttgtatgggtgtattcattgctgttctttctgcaaaacttcttaaattaacgtttctacttgttatatcaggaatgtatcgacgacgatgaagtagtgtttccacataaccttgtgcttttgcatctttaacaatgtctgacatatattgttttacacctggaaaactagctaaataatcatcaataaatgcttttgcttgttttctagtaatacccaagctctgactcaatccataatcgctgataccatatacaataccaaagttaacagcttttgcttgacgtctcattaaactatcaacctggtcagattcaacattaaatactttcattgctgttgcagtgtgaatatcatgtccgtttataaatgcatgttttaaactttcatcttgcgtaatatgagcaagtacacgtaactcaatttgtgaataatcagcagataaaatcacactatctttagaagttggtttaaaggcctttctaatctttcttccttcttctaatcgtataggtatattttgtaaattaggatctatacttgataatctaccagtttgagcaagcgtttgattaaaacgtgtgtgaattctatgatctttgcttattactttttgtaatccctctacatacgtagattgcaacttagcaatagccgtatcggaaggtgcggctggatcacctcctttctaaggatatattcggaacatcttctacgaagatgagggaataacgtgacatattgtattcagttttgaatgtttattaacattcatttgtacattgaaaactagataagtaagtaagattttaccaagcaaaaccgagtgaatagagttttaaataagcttgaattcataaataatcgctagtgttcgaaagaacactcacaagattaataactagttttagctatttattttgaataacaattcaaaatatggtggaaacatagattaagttattaagggcgcacggtggatgccttggcactagaagccgatgaaggacgttactaacgacgatatgctttgggtagctgtaagtaagcgttgatccagagatttccgaatgggggaacccagcatgagttatgtcatgttatcgatatgtgaatttatagcatgtcagaaggcagacccggagaactgaaacatcttagtacccggaggaagagaaagaaaaatcgattccctgagtagcggcgagcgaaacgggaagagcccaaaccaacaagcttgcttgttggggttgtaggacactctatacggagttacaaaagaacatgttagacgaatcatctggaaagatgaatcaaagaaggtaataatcctgtagtcgaaaacatattctctcttgagtggatcctgagtacgacggagcacgtgaaattccgtcggaatctgggaggaccatctcctaaggctaaatactctctagtgaccgatagtgaaccagtaccgtgagggaaaggtgaaaagtaccccggaaggggagtgaaagagaacttgaaaccgtgtgcttacaagtagtcagagcccgttaatgggtgatggcgtgccttttgtagaatgaaccggcgagttacgatctgatgcaaggttaagcagcaaatgcggagccgcagcgaaagcgagtctgaatagggcgttgagtatttggtcgtagacccgaaaccaggtgatctacccttggtcaggttgaagttcaggtaacactgaatggaggaccgaaccgacttacgttgaaaagtgagcggatgaactgagggtagcggagaaattccaatcgaacttggagatagctggttctctccgaaatagctttagggctagcctcaagtgatgattattggaggtagagcactgtttggacgaggggcccctctcgggttaccgaattcagacaaactccgaatgccaattaatttaacttgggagtcagaacatgggtgataaggtccgtgttcgaaagggaaacagcccagaccaccagctaaggtcccaaaatatatgttaagtggaaaaggatgtggcgttgcccagacaactaggatgttggcttagaagcag

SEQ ID NO: 3725 - DNA, 3649 bp, Artificial Sequence
  Description of Artificial Sequence: synthetic nucleic acid sequence
attttttaactcagctaataatttttcattttgggctttttcatttttaatagaatcaatttgtgattctaaattatctaattcttcctcatatcttgcatttgtttctgattggtttttctttcgttcttctaatacatttagcttacctgataattgctcataattctcagttgctttaactaattcataatttaacttttcaatgtcataatcgttttgttgacgtttacctttatatttttgtagtaactgattgatttgagcttgttgaccttctttctcagcctgttgactctttaggtgatttaaacgctcatctaatcgctgattatcttcagtataatgatcaatgtcagatactgtaacgatgacatcactttgctccatctctttagataattgcttatattctttagcaatggccgcctcttcttttaacggttccactcgtccctctaaatcatataagatatcttcgactcgattaagattatcttcagtatggtcaagtttttgaatcgattcagctttacgttttttatatttaagtactccggcagattcttcaataatttgtcgacgattgattggttttgcattcaatatttcatctactcttccttgagaaataatactaaatgcttcctttccaagtcctgaatcgagaaataaatctataatatcctttaaccgtgcacgatcattatttaaataatattcactctcaccacttcgatagagacggcgtgtgacaactaattcctcagaatcaatttgtagtttttgtgaatgattatctaatttaagttttacttcagcaaaattttgagcttttctatgttcagcacctgaaaaaatgatatcttccattttagcaccgcgcagtgatttggcagactgttcacctagtacccatttaattgcatcagtaatattacttttaccacttccattaggaccaacaatagctgtcacacctttatcaaattgaacattggtatggtcggcaaaagatttaaatcctatggcatcaattgattttaaataaaccattgtattctccttatcacagtcgtgttgagttgataagcttggggctatattaacaattattaaaaattatcaatatagattaaagctttatatgataatcaatcatagattatcatatttttataattataatgattttttatttttcattagtttatacgcttgttctgctgccttttgttcggattctttctttgtctttcctttaccctctgcaactgctttattttctaaaatcacttccgatgtaaatagtctatgatgtgcgggaccctcttctttaattaattggtatgtcacatctcctttattttggctatgcacatattcttggaactgtgttttaaagtctacgacaccaacaagctcgtcatcttctacatacggaaagatgactttttcagcaaatgtccatactgaatctaaaccttgatctaaatacagtgcacctacaaaagcttcaaatgcatctgaaataagggaaggtcttgttctgcctcctgtcttctcttcacctttacctaataaaatcagttcgtttaatttaatcttattcgcaaatatcacaagtgaaggttcacaaacaattgttgcgcgcatctttgtcaaattaccttctggtaaatgaggatgtctgtcaaaaagatagcgtgaaaccgtcaattctaataccgcatcacctaaaaattctaagcgttcgttgtgttctaaacgattcatattaaagtcattaataaaacttgaatgagagaatgcctgttgatataaatcaatatttttaaaacgtaatcctaacgacttcattttatcagtaaatttttgttgaaaatcatgtaccatttctttctttttctggttagccacaacctaacctcctaactataaatttcaaaagcttaatttaattttacgtgaaaacagactaaaactaaagaaaaaatctgagccgacgagaagacgactcagatattaatcattttatttttcaaggctgttgatgtatttaacagcatcaccaacagtgttgattttttctgcttcttcatcaggaatttcagtaccaaattcgtcttctaattccattactaattcagcgatatcaagtgagtcagcgcctaaatcatctttgaatgatgcgtcttctgttaccttatcagcatctacgcctaaacgatcaacgatgatgtcttttactttatcgaagttttccacgtcgcttcacctccttttaaagagtcttttgatagactattttattttcccattttactttctaaaatacaagtagaattttagaaacacttaatacaataagtatttagtgtttcttatacatgagcctcaagctcatgtgttcctcttttcacttaatacataggtatttagtgtttcttatgcatgagcctcagctcatgtgttcgtttgctccttttcgaacattacatatacattccaccgttaacatgaattgtttggcctgtaatatatttagctttatcagaagctaggaaggcaacagtattagctatatctgtatcttctccaaaacgttttaaaggaatttgctctaacatttgatccttcaaatcatcacttaaagcatttgtcatgtctgaaacgatgaaaccaggtgctacagtgttcactgtaatacctcgtgatgctagttctcgtgctgcagtttttgttaatccaatgacacctgcttttgttgcaacatagtttgcttgtccaggattacccattgcaccaacaatactagttagattaatgattgcaccactacgttgacgcaacatttgtggcgttactttttgaatacagttaaacacaccttttaagttcgtatcaatcacgtcatcccattcttgttctttcatacgcataagtaagttgtctttagttatccctgcattgttaaccaatacatctacagaaccaaactgacttaccacttctttaatcatttctttaacttcatcgccttttgcaacattagcttgtattgcaaagctttctacacctttagctttaatttcttcaacaactgcttctgctttatctttacttccagcataattgacagctacattatatccttcttccgctaattgcaatgcaatgcttctaccaataccacgagaagcacctgtaactaaagcacttttattcatgattattccatcctttcacatcttcgagtgtttgaattgaagtgatttttacatctcgatttatttttttgataagtccagataatacttttcccggtccaatttcaataaagtgatcgacaccttgattaatcaaccactccgttgattgaataaattgaacaggtgaatataattgtttaaccatattgcgtttaattacttcagcatcggtttctccctttgcattaacattctgaacaactggataattagcattatgccattcaaattgattaatgaaattagcaaaatcctcttcaataactttcatcattgaagaatgaaaaggaccggaaacagctaatggaagaacgcgtttagcaccaagttctttgcccttttctactaattcatcaattaaagatttatgtccagac

SEQ ID NO: 3726 - DNA, 3043 bp, Artificial Sequence
  Description of Artificial Sequence: synthetic nucleic acid sequence
atttaatgctttatccaaatcgaaatttaattcatcattcaacattcctagttcgctataattaatattcttttgcaataattctgggttagttgaagcttgtagtaaccttatataaatcgctagtatcccagattcattttcgtatatcgcttttgctaattcaatttgaatattactaggcttaacacataatataatatcattttctgcttgaggcacttccaaatcgttcttatttgtacgccagaaaaaagggttcaacttgtcattaatttcattaggatcaggattttgtaaatcagcaacattccaaccaaaataagtatcatactcatctttatataaaatatttaagaagttaaatatgtcttgataactatttggaattggggtaccagttaaaacgtatctgtaataacttttaggacctaaagttaatgcataacttgctctgctactattaataccttttatcctatgaacctcatcataaactatcattgtcttatcattaataagttcatttaaaacccctacatacttttgtattgcttcaaaattcaaaacaatgacatttgcacttccccaatctgttcgtactttacctaaatcattatattttttatctcttaggttcataaagtgtaattctcttttatcttgaaaaacttcaataaattctgaacgccaagcttcaaatgcattaattggagaaataactattaatttatcaactttccgctttatttcactagacaaaaaagcaaatgtgccatacatcatagccgttttaccagctccaggtacagaaaaattggctgctcttttcatggtggctaaataaaaactcgctcttacttgaataggttttaatggtcttgtaatctcttgatttataacattattaaaatttgaaagttcttcttgccatcttgaatcattttctttaattgttaagccagcaattctttgttcattaatagcataagcatttttactaataaaactttttatattattatctattaatatatcaggtttcgatactttagctaatgctttattcagctctgaaactaatctttctatttcaagatgtgataaatccgcttttaaaacataattagtgaaatcagaaaaataacttgtgaatttctttaaagttctatgaacctttctgttcgtaagatcactgtctatactatcaacaaaaacaaattcattattaacttcaactagttgtatctcagatttcatgttcataaatatctatcaactctctactacaattatttattcttattagcatttctctaatttcttttaattgttttagattaaattgttcaaaattaagactactaggtaaaccattgcctttttccatatcattgagactttcagacattgatttaacattttcaataaaactttccacattagcatttcgtttacttttgcttacaactttgttatatgaagaacttacttctcgtagttcaggtatcgattggcttagtgtactctttaaatctgcggtagattctacacgtttttcttctaatttatctctcaaaccatcgatagcatcttctgtttctgtattaaattgatgactaccctcatttgaaaaaacgatattttcaaaataatctcttccagcatatgcccgtgtgcttgtccctgattgaatttgcaaaaggacaaaactaaaaaatttttcaatagcatcttctaacgaaggtccacctttaggataagctttatctaacttaggtactgcttcttcaaataatgaataaatgccagcatcttttataatataataagaattctcttgagcattaataaaatctaaaaattttcttattaattttgcagaacctaattgcttttcaatagttttttttgttttatttgactcatttgcatagtccgctacagtcatcaacttttcaacttcaattgtttgataaatatccaccgcttcatcaactttatcataatcttgctttccttctatacccatttgtattgcaagttctaattgcttgattttagctcgatcagtctttttatcataagtaaatggtaaaataacagcttcaaaataaaaagtatttcctgtttcttgttctaactgtctaagcgcagtaaaccttctatttccgtcaataactctaccatcatctaatacataaccaaatacttgctgacctttatctttaatagattttttagtgttttttaaagcagaagtattagcctcatatatcatattttcaatacttttattataattattatcttcaaattcataagcaacttttatatcgtcgcttactctggatattacagaagcaattcttccatttctatcattataatacagaaactttagtggtattctatatacctctaaagtttcttgatttaaatcggtaatagttgttggtaacttaggttttgctccggttttatctactaaaccatcttggactttttcaagtaatgaaattttttctgatttccccatcatattccctcactttgaatcatctaattttttaatttcattataaacatcttgcgcgctagtagctaattgatatttaatattcaaattatctaatgtgttaaagaattttttttgtatttcaccaatacttttatctcctagtctcatgttttctgcttttgtttcaacaataaggtattttgcatcttgttcatcagtttctatcatatagacaaaatcaggcgtagtagtgccaccagtatatttaggaacttgtatcgcttttttaggcaaattaccaaatacagttacatttttatcgtaatttctttttaacaactctaactcaggtgttacactatcatatctaactggtggtctttcatataaaaatcttttttcagtttgaatgttattttcaacgttagtacctaaataatttgcatctacccaatctttaaactctgatatttctgaatcataaatggttgtagtagcagaaaaatctaattttttatattc

SEQ ID NO: 3727 - DNA, 3864 bp, Artificial Sequence
  Description of Artificial Sequence: synthetic nucleic acid sequence
ggtaatgcaacaagaccatttttagtcccatataaaatacaaacttcatcttctttgtctaattcaacatcgtaatgtctttggtagaagttaacaatagcttgtttaaaggcatctttgccgtgaaatggaccatacttttgattttctggaatacatagcgcctctgaaaaatgattgataataccctttggcgtttctccatctggaattccaactgccatatttataagtggtaaaggaccatgttcaactatacggcccattgttttgccaaagtagctatcaggaattgaagctagcctttctgacatttccatgctatgcctcctcattaaaataatttaattagtaagtactttatattataacaatagttagaattttctgaaataagaaaacagcattatatctcataaactattgaagcagcctgaaaaagcactagtgaaccatatcaaaaaatgtatcggtcgtccaaacagcataatattgcgttccattttttagaaattctaacatttgatacacagcaattacaaaacttattgatactaaacttattagaaataaaaaaagcattaaacaacatcatacaatgttagtttaatgctttaaatatcagtatattattaatcacatatgattagtgaatatagttatatgaagcagcttggctcgcagagattgtacgtgaagtgacaacacctgcaccgtgaccgtagttcatttctgaaactctgattgaaccattgctgtttacaccttcaacgtatgctacgtgtccgtatgcaccttgtgacgtttgtaagattgcacctttagcaggcgaattgtttactgtgtaaccagaacgtgctgcagcgtttgcccagttgtttgcgttaccccacgttgaaccgattttgccacctactctgtcaaatacataatatgtacattgacctgaagtgtataagttaccagatgctgagcgagcgtttgataaagatacaccgtttgatgatggcgcagaagttgttgtaacgtgaacattactacttgatgttgaatagcttgcgcctaaaccaccagtcggttgagttgttctttgtgattgcgtgttgtttgattgatagttgttgtaattgttgtaattactgtagttattgtagttgctatagttattgtaaccatagtagttgtagttattataattattatagttatatgaagtatttacacgatctggactccagttacctttccaagtgtagtggtagttaccttcagcatcgattgtgtaagtgtagctatatgaataagggtcgtttggattgtacccatcattattttgttctgctgcttgtgcgtcatggtgtgcaaatgcgaaagtagcgattcctgcagttgcaattgtagctgtagcgatttttttcattgttaaatatcctcctaaaaatttaaataattaatttcatataatgaatagtcatgtgactaaaatatttactttgttatccttggtttcgttcttttttaacgacaagcattactttatcagaaaaatgtacgtttgtgtgcggtgttatcattttgtaatgtttacatagagttatttcgttaaacgaagtctgtaaatagcgtaacgaaagcatgtaactaacaatgtttcatgtaacgttttataattgttatattcttgtaataataaattttgctattattacaactttagctttgatgagtttaatctatcttttaaatatttagccaataaagaatatttacttgatgtaaatttaatcttagatatcgttaagattgttcataaaattgataaaaaatgaggtgagacagaattcgtatcgaattcgttatcccaccccatcactatggtgaactataataataaataccatatacccatttttgacttaattgtttttgtcatctcattaaatcatgactaaggaaacacattgaatctaactctaatttctagtgatatatagctctcttatttttatttttgaatattatttttcattaacttctttcattttcttaatgatttcattagataatgccttaacaccactgtattccaagtgaataccatcatatgcaaaatactcagaatgaccttcagatgttttataccaatcaacaatatgaacatttttatgtttcttagctacttgttccataattttattattagtagactcgtagtctctcggtactcttaccttaattaagtaaatatctgcttcacctaaagaatcaattaattcattcatttgatctttcgtaaactcaccgtttgtaccaagttctatcacaacactctgaccttttttagtataatcttggtacttttgattgattaaatctttaccctcaattaactgtcggccaacttttccatcaatattagcatttggtactttttcactaaagacttgaccgatatctaccattactgaatctcccagcaataatggagacgcttctttaggattaaaatgttgttgtgaagacttatcttgattattttcatctggctttttaggttttgctttctggttcgttttaaaagatttttgtttcgcagcttgttgtttatcatgctctttacccaaactatcataggcaccaaatactatgaatgcagaaggaacaagcaagattaacacaataatcgttcttgaaaatcttgttaaatttttcggtatcaccgtgaatgctttaaatccattttttctaataggtgtttcgataaatttataagatacttcagccatgacaaacataagtatcacttcacaaatatatacaaaccaaggaatctgaccttgtacgaaataactattcataaaaataatgataggatagtgccataaatataaactatacgatctcttacctatataaataaataacttgaaacttagtattttctttaaaacacttgatggatgcacaacgcttgcaatgacaaacagtgttaagaacgagatggcataaaatcctccactatatatccatttatcttgatcactaaccactacaaacaaataaatgagcactgccattccgactatgcctattgcacttatacttgctttagcacctttagatatatcctttctgaaagagaacggtggccaaataaatgctagtaagcatcctaataataacgtttgtaaacgtgtgtcagtcccgaaataaactctagaattgttacctgtatacatatgtatcgttatcattgcagttaatgataataaagagatgattaatagaataatcattgtagttctctttttgaaaaactttaataagcctaaaagtataaatggaaagaatagatagaattgttcttcaatagctaatgaccacaaatgctttaatggcgctacagcaaattgattaaaatagtctacgtcttgtatgatataccaccagttagaaacatagaaaagtgctgctatagcatcatgttttatactaataattaattcgggtttaaatagtaatgtatatattaaaacaaccgtgacaacaaacatcattgctggtattaatcgtttaaatcttctaagccaaaaattaactaaattaatagaattatttctataatactcacttaataataaactagttatgagataaccagaaatgacaaaaaaagtatctactccaaggaatccaccagataaccatttcgtatttaaatgataaatgattatcccaatgactgctatagctctcaaaccatctaaaccaggcaaatagtgcggtttataagttttgttgagacgtctataattgttctcgttcattcaattacactcctttagagcacagtggcgatgatat

SEQ ID NO: 3728 - DNA, 3285 bp, Artificial Sequence
  Description of Artificial Sequence: synthetic nucleic acid sequence
ttgcgagttacatgattgagataagcatcttttctccatatcacgccaagatgccatgataattcaacattctctaattgaatggacgttacgttattccccattaaattaactaaactttctggaacgatactaattcctattccttgttgaatcatattagcgataaaactaatttgagaaatattagcaacagttttagggtaatagcctagccttttacagttctctataatttgatcttttaaataataatcatcatgaaataaaacaaactcttcatctttcaaatctgccatgtctactttatttaaatgtgctaaatgatggtcattacttactactaataataattcttcattatataaagaagttgaatgaaattcagtgtgatctacaggtaatgtagtaataccaatatccacatcatcattagatgttaagttctcaacaattttaccaccaccctcaatcacttcatatgtcacattaggatagagtctgtgaaactgattcaatgcatttgtaaacatttgaacattcatcattggtgataagcctattttaatatgacctttttgaacgttcacaatgtcattcatttctaaagataatttctcgaataaagctaaaaattctaaactattatcataaaatgtttgacctatatctgttagttttatttgtttttgtgaccggtcaaacaatgtaatatcgtattcattttcaatatttttaatcgctttgctaatcgttgactgtgcaatgtataagtgttcagatgcttgcgtcataccaccttgtcgtacaacttctacgaaatatttaatttgtttaatttccatttacattcatccttaattatcaacatttgattgatggatatcttctctcatagaaccatcgtttgatatctagcatttttttaacataacttcttcaattaatcatttacactaacactcattgaacaataattccgtgtatataattgttttaattgactaataccgattatttttcatcattatcatgatgctctcttttacgataacatgttttacaaatataattactttactaatttataaatcatgtgaagaaatacatgacaaataccataaatgaaaattcctgtgatattaacattcaatttatatcctttttagcctattgaaattttactatattaacttaatcactgaggaaaataatttttgttaatttttcagaatttttagacaaaatatttatcttctgtgctattatattaattatcagaatcagccaattcattttatctacatgtagatgattttttaatacgtattgttaaggaatgtttgctgactcatgttaatagtaagttgatgttatggaggtttgttatgggaagtttttttaatcggatgactcgaaaagagaatcctactatttatcaaagtaaagatgggcatcttaaacgcacattacgtgtacgcgactttcttgcactaggtgttggtacaattgtttctacatctatcttcactttaccaggtgttgtcgcggctgagcatgccggacctgctgtttcattgtcattcttattagctgctattgtggcaggtcttgtagcctttacttatgcagaaatggcatctacaatgccttttgctggttcagcttattcatggattaatgttctttttggtgaattattcggatgggttgccggttgggcgcttttagcagaatactttattgctgttgctttcgttgcttcaggcttttctgctaacttaagaggtcttattgcaccattgggcatttctttacctaaatcattatctaatccatttggaagtaacggtggtgtcattgatatcattgctgctgtagtgattattttaactgcattactattatcacgcggaatgaacgaagccgctcgtatggaaaatgtattggttatattaaaggtgttggccatcattttatttgtgattgttgggctaactgcgattaatttcagtaactatataccttttattccagaacataaagttactgaaactggcgactttggaggttggcaaggtatttatgctggagtttcaatgatttttttagcttatattggttttgactctattgctgctaattcagctgaagcgattaatccacagaagacaatgcctagaggaatcttagggtcactcatagtagcaattgtattgtttgtggccgtagcacttgttcttgttggcatgttccactactctcaatacgctgataatgcagagccagtaggttgggcattacgagaaagtggtcatggtattattgctgcaattgttcaagcaatttctgtcatcggtatgttcactgcattaatcggtatgatgcttgcaggttcacgtctattatattcatttggacgagatggtttactcccttcttggttaagtcaattgaatcacaaacatttacctaatcgagcacttgtcatacttacaatcattggcgtagttatcggatcaatgttccctagcaatcgctaaaactggcagatatctgtcagaatcataaccgataatatccgcaatattttctttatcgaagccgccaatagggtttgtatcgtatccatgagctttcgctgtaagcattaattgcattgccattaaactactatctatattcacaatatctttcatgccttctctagataagtttttataatagggtaatatccaatctaacagttgtgctttgatatcttctgtcatcaattgttgttctacagcatcgccctttatcgtcaatatgcacttgtgctacacgaccgatgactatatccacagttgaaacagggtctccagtgggaattcttactgtttgaacatattcacattcaaaatgaacaggtgattcctttaccctacttccaggagcttcgatacacgattctttcgtcacaccagcaaagtcaaattcatcatcttctggaggtaatgctttggatgataaattcactgcttcacgcaaatcatatgttgccatattccatacaaaccaaccagtttcttccgcattttaactgtatcttttctttcatgatcgccaagcactgactgattagccgcaaacattaccattgggggtcccatgtaagattttgatattgactgtacggcgccaagttatctttaccttctttagatactgtagaaatccaacctataggtctaggtactgtgctacttttgaacggatcatgtggcaatccatgacttttaacac

SEQ ID NO: 3729 - DNA, 3022 bp, Artificial Sequence
  Description of Artificial Sequence: synthetic nucleic acid sequence
tcatctcatcctattcctcatttgggttggaatgaattaaagagtacacatcccttactgcaaagtgatgtgtattttgttcattcatatcaagcagaaatgtcagaatatgtagtagcttatgctgactatggtacaaagattccgggagtcattcaataccgaaattatataggtatccagtttcatcctgaaaaaagtggaacgtatggattagagattctaaatcaagcgcttaaaggagggtttattaatgattgatttatggccagctattgatttaattaattcaacaagtgttcgattaacagaaggcaaatatgattcaaaagaaaaaatggaaaaatctgtagaagacagtatccgattttatagtcaatttaaatgtgtgaaacgtatacatattgtagatttaattggggctaaagcaaaagaggtaaaagaattcgactacatccgttccttaagaaaggtgaccactaagcctatagaagtgggtggcggcattcgttcaaaacaaacaattgaaaattatattcattcaggaatagactattgtattgtaggtacaaaaggtatccaagatatagagtggttaacacatatgacacatcaatttccaaataaactctacttatccgtagatgcttttggagagaaaataaagattaatggatggaaagaggatgctaaactcaatttatttgattatgttgccaaaattgagcatttacctttgggtggtgtgatttataccgatatttcgaaagatgggaaactttctggacctaattttgatttgacaggtcgtctcgcactttatacatcgttgcctgtaattgcttcaggaggtattagacatcaagaggacttgtttcgattagaatcgttaaatgttcatgctgctattgtaggaaaagcagcacatctggatgaattctgggagggattatcttgattaaaaaaagagtgattccatgtttagatgttaaagatggacgcgtcgtaaagggtatccagttccagtcattaagagatatcggtaatccagttgatttggctctttattataatgaagccggtgcagatgaactagtctttcttgatatttcgaagacggaagcaggacatgatcttatgatagaagtgatagaagcaacggcaaaacaattatttatccctttaacagtaggaggagggattcaaaatttagatgatattacgcaactattaaatcacggagcagataaaatatcactcaattcaagcgctttaaaacatccagaattaattcgacaagcaagcgagaaatttggtcgtcaatgtatttgtattgctattgatagcttttatgataaagacagaaaggattatttctgtactacgcacggtggtaaaaaattaactgatgtcagggtatatgattgggtacaagaagtagagcttttaggtgctggggaattgcttataactagcatgcatcatgatggaatgaaacaaggttttgatattgaacatttagcaaaaattaaacaattagttaatattccgattattgcctctgggggtggaggaaatgcacaacattttgttgaactatttcaacaaacagatgtttcggcaggtttagcggcaagtattttacatgatcaagaaactacagtggcagaaattaaagataaaatgcgtgaaggaggtatccttgtgagatgaataaacttatagacttttctaagggattagtaccggtaattttgcaacatgcacaaacggatagcgtattaatgttgggatatatgaatgaagaagcttatcaaaaaactctgaaagaaaagaaagtaaccttcttctctagatctaaacaacgtttatggactaaaggtgaaacttctggtcatttccaacacgttgagagtattcatctagattgtgatcaagatgcaatcttaatcaaagtgatgccacaaggtcctacatgtcacactggaagtctgagttgttttaatagtgaaattgaatcgcgctttaaaattcaagcattagcacaaacgattcatcaaagtgctaaaagcaatcaatctaactcttacactcaatatttattaaaggaaggtatcgagaaaatatccaagaaatttggtgaagaggcatttgaagttgtgataggtgcgataaaacataatcgtgaagaagttattaatgaaacagcagatgtcatgtatcacctttttgtgttactacatagtttggatattccattttcagaagtagaacaggtactagcgcatcgccatcaaaaaagaaataattttaaaggcgagcgcaaaaaggttcaagaatggtaaggtagtataatttagaattttaattaatctaatatagggaatttgttcgatgaatcttataaatcaattattaaaaataggatgaaagtgaatgacgattcatcctatttatggttcaaatgggataattgatacgtttaaattaaaatatttttttaaaaaatatttgtagttattggtagtaacgtcatatttatgtttagtactatcattgcttaaagttaaagaatgataagtcattgttgcacgtccaaatgattgtggttgtgtaataagcaaatgtcgtacaaaaatagaatgaggatgatgctcattgtagcttattttatcttcaaagtctttaatgctttgagattttaaatgcgcttcatagagtgtcatccatttattttgtctaagcttctgtaaggcatattgattgtcattaatccaaacagcacggtaaactccatttttatcatatgttggaatgaattgtgttttagaacctatctcgataatacttgtaggtaaatcaccaaatccaacatcagtaatataaagtgttccttcgatattaacgtaaagtgacatatgcgagccttcaggactacgtccaccatttggtgtgtgaactgttgccgcagcacgagtgacatggaagcctttatgttctaaatacgtagcaaacaaatgat

SEQ ID NO: 3730 - DNA, 3065 bp, Artificial Sequence
  Description of Artificial Sequence: synthetic nucleic acid sequence
tccacatggggtgggaggtagaattcaattatattactttgaattctctcctactcctatttttgttgatgttgagtaagtcatattacgttatggaagacggatttaattgtatcacgtagaattcaatttagtggcatcatttaaagtaacgaggtgaataaatgaatatcaaaacagatggttggtctaaaaaagcacatattgttgtggctgtctcaacaggcattgatagtatgagtttattatatagcttattaaacgactatcaacatacatatcgtaaattaacatgtgttcatgttaaccacggattgcgtgaacagtcatatgaagaagaagcgtttttgagagagtattgccatcaacatcatattgacatttatataaagcgtttagacttaagtgatattgtagcagacggtaatagtattcaacaagaagcgcgtcaacgtcgttatgaatggtttggagatatcatagctcaattaagagcagatgtattgttaacagctcatcatcttgatgatcaatttgaaacgattatatatcgtttgtttacagggagatcaacacgtaattcattaggtatgacatatgagtcgtattttaatcaatacaaagtgtatcgtcctatgttaaatttaaaaaaaactgaaatattagcgtatcagtatgcgaaccaaattccatactatgaggacatgtctaatcaagatagaaaatatgttagaaatgacattagacaacgcatcatacctgcaattaacgagaacccgcatttaaacgcgcatcagctactcaaacttaaggattggcatgatattgaattgcaatcgttaaaagaacaagctgaaacgttcatcaataacgaagtttcaaaaagtaaatatttaacctattccttttctagaactgcttttaatgaattgaatgtgaatatcaaaagcgtagttatggatttgttattcgaaaaattagattgtcatttagcaatgccacaacatgcttatgacgagtggtttgaacagattagaaatgataaatctcaatttaatattcacgtaacagatgaatggataattcaaattgcatatgataaattaataataatggctaaaagtgaaatggatcaatatatattagaccgtatatgtattagaaagccaggtacatatgaatttaatgattatcaaattgatattcatcctgacttaccacaacagttatatccgcttactgtgcgtgtccgacaaaatggagatgtgtataaattaaatggtcaaaaaggtcataaaaaagtgagtcgtttatttatcgataaaaaagtgactcttgctgaacgtcagcgcatcccactcattattaatcaagaaaatgcagtgttagctattggcgatttatatgttaaagaaaattttaaagaatttattttgatttcgaataatggagatgaattataatgcataaggatttaaagaatgttttgttatcggaagaagacattcaaaatatttgtaaagagatgggagctatcattactgaggattataaagatcgcccactcgtttgtgttggtattttgaagggatcagtcatgtttatggcagacttaattaaacgtattgatacacatttatcaatcgattttatggatgtttcaagttatcatggtggaacggaatcgactggggaagttcaaatattgaaagatttaggtgcttctatagaaaataaagacgtacttataattgaagatatattagaaactggtacaactttaaaatctattacagagttattgcaatcacgtaaagttaactctttagaaatagctacattattagataaacctaaccgtcgcaaagctgatatcgaagcaaaatatgttggtaaaaagattccagatgaatttgtagttggttatggtttagattatcgtgagttatatagaaatctgccatacataggcacactaaaagcagaagtttattctaaatagattttaaaattggatctgtattaattaataagtatgttagtataatgaactgtgcgtagatttagtgtagactcaaagtaacaattcaaaaatgttatgaattgattaaaactattaagataattaatgttaacagatagtaaacaaagaataatgcattttaaaatcgacaaaattgtagatgcaatactaaagttgaaatactagcctgaatataaagtgttgtgttacaatttttgttagttttattattggaagtaggaggaaatgacgcatgcagaaagcttttcgcaatgtgctagttatcgcaattattggcgttattatatttggcctcttttcatttttaaatggaaatgggaatatgccaaaacaacttacatatactcagtttgttaataagttgaataaaggcgatttaaaaactttagaaattcaaccagagcaaaacgtatatatggtaagtggtaaaacaaaaaaagatgaagattactcatcgacaattttatataacaatgaaaaagatttacaaaaaatcacagatacagctaagaaacaagataatcttaaatttacagttaaagaagaagaaaaacaaagtgtattcgttagtattttaacgacactgattcctgtattaatcattgcattattatttattttcttccttagccaagcccaaggtggcggcggtggtggtcgtatgatgaactttggaaaatccaaagctaagatgtacgacagtaataaacgtcgagttcgtttctcagatgtagcaggagctgacgaagagaaacaagaattaatagaaattgtagatttcttaaaagataacaagaaatttaaacaaatgggttcaagaattccaaaaggtgtcttacttgttgggcctccaggtacaggtaaaacattattagcacgtgcggttgcaggtgaagctggtgcaccattcttctcaattagtggatctgacttcgttgagatgtttgttggtgttggtgcgagtcgtgttcgtgatttatttgaaaatgctaagaaaaatgccccatgtatcatttttatt

SEQ ID NO: 3731 - DNA, 3362 bp, Artificial Sequence
  Description of Artificial Sequence: synthetic nucleic acid sequence
tattcaactcattaagtttttcaataactttaaagatttcaaagacaatcttaaagttttctattgtttatttatttcactaacattactgattatgtttataagtatgtatgatattttaaatgaatatgtcacatcacaccaagttgggggagacatgtctgtgtcctcaatgatgaaattgttcggtgtgataggcatgttattatctctattagcagggcgtgtaagcagtcgtataggtataaagcgcttgctaactatcgcattaacaacatgtattgtgtcgatcatactcatgggtgtaactacgaatattatacttattacaacatttagtgtgttgtttgttgcaggtatcgcatttgcgattcctactgttatttcaaaaataggtgtagttgttaaaaacaatcaaggtttctttttatctgttaatacatttgtattattcttaggaacagcgattgcacctattttaatgttatttgtaggcgaactgtctaactttttcttacagtttttaatgattgctattgtcggactgattgctttagttgtatcaatatttatgccaggtgaccaacgttcttgaaaatagcttcaaatgataaaagcaatattggttgttaaaagtttaaaatactatttataacttttaactatattgaaatgattgataaatattagacaatgctaagtcaagtcatgtaaccttaagttgatagaacgattaacgataggagtggatataaaatgaattattcaccaaaacaaggtgttaaaagtcatggattgccacatgatccgttcaaaagtagcacagtacctagacctataggttggatttctacagtatctaaagaaggtaaagataacttggcgccgtacagtcaatatcaaaatcttacatgggacccccaatggtaatgtttgcggctaatcagtcagtgcttggcgatcatgaaagaaaagatacagttaaaatgcggaagaaactggttggtttgtatggaatatggcaacatatgatttgcgtgaagcagtgaatttatcatccaaagcattacctccagaagatgatgaatttgactttgctggtgtgacgaaagaatcgtgtatcgaagctcctggaagtagggtaaaggaatcacctgttcattttgaatgtgaatatgttcaaacagtaagaattcccactggagaccctgtttcaactgtggatatagtcatcggtcgtgtagcacaagtgcatattgacgataaagtaattatggacaacggaaaattagacattaagtcaatcagacctatagcacgtctcggttattatgattacacggttgtcgatgaaatatttgaaatgaaagcacctgcagcttcgaaagaagaattggctggacttgaaggtcgaaattttgacaacactaataatgaatcatgatacatcaaaaagaatgaaatcatattcatattaaattcgtcgttcagattcattaatgagaactaaaaatttaaaaacttaatataagcgtattttaaatttagctatccaaagccaatagctaagaggctgagacataattcctagcaaaatagccagtaaatgagttttttataaattcatttactggctttttatttataacacttcgtattgttggctcgctttcttatcggacagcttcagcctgtagtcttcagcttgtcctgttccctcaagagtctcgccaaaatactttgtgcatatatgtaattttatattaaaatactttgaaaaataaggacctttcgtataatttaataaataccaataaactaaattaacgaggtgtcttatgtataaaaattataaaatgactaaacatactctactaatggaaacttcagttcttatccccacaaatgatatttcacgacatgtaaatgttattgcagaaacaattcccgagactgaattcgataaattcagacattatcgttgcttaatataataaagtaaaagctcaacgagctgaaaatcatcaaaaaaattgtaaaaaagacaatttctacattatttcaatagaaattgtctttatttacttatcctggaactttctgtcccagccactcttttaataattacaaaatttttaaatactatgttttgttatagagatgttggtatgttttacagttttgaaaaaagattatacgtagccattaacaaagtgaccgattaaacttaagagtcctactaaaaaaaggcatacaccgggtataaacattttttccttagcatctatcggttttgaatgatagataatttgacttaaaacaataagcacaacaccaataatcatagcgatgattgatatggtaaacataaatagtcctccttcggtgatgagcaactttacattttatgaagaaaaaatctacttacttatactattcccattttaacctttttatagttattttaaagtgaaattttttaaaaagtatgaaatttatttaaaaaaagatattttgtttatgaaaagtaaattgaatgagagattggaaatgaaaaacagagactgtggaagtatgaaagtatataaaaagagtagaacagaattcaatttgaattcattattctactctttaatcttgtatagaaacatttgctaagaattagttgtacgattacaagttttattgcgctgtaacatctaactgaacgtcaatgttaccacgtgtcgcttttgagtatggacagaattgatgtgcttgctccacaaatttctcagcatcttgttgggacatattttcaagtgtgactttaatatctgcgccaagtttaaaaccattgtcagtatcatctttaagtaattcaatagtgatttcaacttctgggttggcatcacttattttattttgagataagattaatgatagcgcgctattaaagcatgcactatatccagcagcaaataattgttcaggattagtatcgttgcctccttgaccacccatttccttaggtgttgcaaggttttgaacaaatgtattatctggactaaaaacgcgaccatcacgtccaccatttgaaatcattgtagttgagtaaatagaatttgccattataaaaactccttgtttttgaattacacttaacttaatatattaattaaataattaagtgtgtaaagaagtgtaataccaaattactaataattacaagaaatttgttttttaaatttgttattttaggttcattatctacaaatctatgaaattatgtattataatgtgatatgtatatttttgattaaatcatataaatctatttaaagaataatacaggtaactttattaaaggagtatgtgtcttt

SEQ ID NO: 3732 - DNA, 3348 bp, Artificial Sequence
  Description of Artificial Sequence: synthetic nucleic acid sequence
aagccaagatagttatatagttcagccatttcttcactttgtgaacttgatagatattcattgactgtaataacatgtacacctctaccagctaaagcattcaaatacgtcggcatggttgcagtcaatgttttcccttcacctgttctcatttctgcaatatcacctttatgtatagcaataccacccattacttgtactttataaggaatcatattaaatactctctttgacccctcacgtacaagtgcataagcttcaggtaaaattttatctaaataatcattttgtttttttacatcttcaatttctgctaactctttttgaaaagattttgttttttcacgtatttcttcatcggttaatatcgcagtatcttcctctaaagcaagtactttatctgctaacttacctaatcttttaatttcttttttattgccgtcaacaattttcgataaaaatcccattgcacgcgtcgctcctttaactaaaaactgtttggcttacaacaatttatcttatcatttatatcgctaaatttatacttatatactcatgaagtaatgcgtgttaactcaatttttcacaacacttcactttgattcgactggcaacagcctttttctatagacaatcatttatattataaaatgtatataaacatttcaattaacaataattttattttaacacgttgcaatcatttttttctcgcaatcaaacacgtttttaaaaaataacgcaacgcgatacctttaactaatatagaaatttaaaatcaaagtttaaatataaatcgtcaaatcacactagcatatttgtaagcatactgtctattaaatactcatttaattggttaattcaaaatttaagcaaacaaaataagctgagacacttattaagaatacgaactccaaagcttgattaatgtcatatctactttgaagtgaacatatcaaaacaatgccccagcctatgtttattaagttctattttgtagtcaagcattctgctaatgtatttagtaaaaacatggtatcttcaaaacgtatgcctggttcttcaatttcttcaggtgagaatcgatatcctataataaaatgagaagcctctttttcagcaacgacgtgttgaacctttgtcaaaacttcgattggaaatcgtgtacgtttttcacgactgcctccccatgaatcttgtctccgattagaatgtggagagaaaaattgttgtaataagtatgtgttggcgccatgaatttcgacaccatcaaaccccgcttctatagcgcgacgtgtagcctctccaaagtcatcaatcatctgattgatttgagcatgtgtcatttctctaggtggtacagcatcaggtcttaatgctgcaatggggctcgcagatatcggctgctctccttcattaaatttaggatttgccattcttccggcatgataaagttgcaaaatcgcttttgatcccttagcttgaatcgcttctgctaaacgtttgagtccaggtattttgtcatcattatcaatacctatagctcccggaaatcctcgtccgtgattttcaacaaaacaactttcaacaatgattgctgaagcatcaccagctctaaattgataataatcaatcatttctgatgtaacacttccatcaaaatacccagcttggatagtcatgggtgccattaatactctattttttaattcggcaccacatttaaatttaaaagtatcgaatatttccttactcatagcaaatcctcctagtttttttgtgaatattttcacattattacttaaaaataaaatactcttcatgagtattctttaaatttttataaatacttttgcattttcgaagtcattaaaacgcttccatctcttgtcacaataatgccttcaataccgtcaatgagatttaataattcaatatttttttgtgactgaccaaaactacaaattgtactccatacctcgccatcaatcccatgatcagatatgattgtcacgctagcgatatcattatctacaggataacctgttgttgaatccaatatatgatgaaataattgattttcctgtatgaagtagcgttcgtagatacctgtaatttatcgtgataaagaggacgatgaaatatggttgtctcataagagaaaacattcaattgttgtatttagaaaagatgtcacatctacccaagagattaggtttgataaatcaaaaattatggaacgacctgaagaaatacaacaattcatcggttatatacctgaatcttatgaattttattattttacggataaagagctttcaaaagaaaatttaaatgaagaaaaaccaattaaactgaaatttaaaattataagcaatgagcaaagcttaaattcactccctataaactttttacttttaaaaatgctaattaataatgaagataaaaggacttaccttcattacaaaagaaaagttttaacacaaaatcttgttgataaacatatgcaacgttttacccctattacatatacacttatcttaattaatattgtgatatggttatgtatgattttatacttaaatcgattttctgatgttaaactattagaagtaggtggacttgttcattttaatgttgttcacggagaatggtatagacttatttcgtcaatgtttttacattttaatttcgaacacattttaatgaatatgctctctctatttatttttggtaaaattgtcgaatcaatcattggatcatggcgaatgctaataatttatataatatccggattatatggaaattttgtttctctatcatttaatacgactacaatttcagtcggtgctagtggagcaatatttggtctaattggttctatttttgtgattatgtatttaagcaagaattttaataaaaaaatgattggccagttattaattgctttggttgttttaatcgttttttcactttttatgtctaatattaatataatggcacatttaggtggatttatcagtggtgtattaattacattaataggctattatttcaaaacacaacgctctttattttggtcatttttgattgtatttttacttatattcatcattttacaaattagaatatttactataagtgaggataatatctatgataaattaattcgggatgaaatgattaaaggtaattatagcgaagcaaaaaatgttgtaaaacaaacacttaataataattacgccgatgatgaaacatattaccttagtggtttgattactgcaactaagagttcgcaagcagaggccgtatcagaatgggaaagaggtttaagaaaatttccaaatt

SEQ ID NO: 3733 - DNA, 3242 bp, Artificial Sequence
  Description of Artificial Sequence: synthetic nucleic acid sequence
tattccctttctatccctgactgttcataggcatcaaatacacagacaatttcatctgctattaatgcattgtagttggcaattgtgtctaataattgctctctagcttcttctaaattctctttagcaacagtgctaagtgttgaggattggccaatcatattgtaaccatctataattaagtatcttttcttcatgacttttcctctaactgatgacgtttacgatatacttcatacatcattaaacttgcagccacagacgcgttcaagctattgacatgtccaaccattggaatcttaatatgaaaatcacacttatcactcactaaacgactcataccttgcccctcactacctattacaatacctagtgacatatctgcttgtaaatctctataatccgttgcattattagcttctgtccccgcaatccaaaagccgttgtcttttaattcgtcgatagttttcgaaagattagtaacccttataaccggaacatgctgaatcgctcctgtagaagcttttgcaacggtctgtgttagcgcaactgatcgtcttttaggtataataaccgcatcaacaccagaagcatctgctgttcttaatatagagccaagattatgcgggtcttctaaaccatctaaaatgataacagttgaataacgggcttttttcttttgtttttgtaaaaattcatcgaagtttgcatattcatatggggctactaaagcagccacaccctggtgaggtgcatttgctaaaaaatctaatttagattttggtaccgtttgtacaattaatttttgtgattttgcattttttaaaatgtcgttaatttgttgcttttttataccgtcttgaatcaaaatcttatttatggcgtgacctgatataattgcttctttaactgcgtgtctacctactatcactatatcttccacattcacactacctttcatccactatcctaacaattgtttctaataagttttctaatcgttctgattgatggtctaaatataaaaatccgataacagcttctaacgctgaacttttacgataagtttgaatgtcagtatttttagcttttgtataacttttagcgttacgtcctcgttttaaaacacttagctcttcctctgtaaaccagtcaatatctaacaaatactctaaagtcttagcttgacttttcgctgaaacgtaacttttcgatacttggtgcaaacgatgaggtttactttgtaattttagcacgatatattcacgcacatgttgatcaagtactgcatcacccatatatgccaatgttaaaggattaagaagttttacgttcatatgtttagccacgtttaaatcttacaccttggggggtatcttctaaaatgatatgacgtgcttttaacatatctctaatttcatctgctcgagcgaaatctttatttttacgtgcttcattacgctcctcaatcaattgttcaatgtcttcatctagtaactcttcagtttctttactcttaagtggtacaccaaggacgtcactaaaaatgctgtacacttctttaaatctatttaaaacttttgttgaagttgtattttctaatacatatttatttgcaagtttagctaagtcataccatgcagttactgcattagcagtattaaagtcatcatccattaccgtttcaaattgatttagtattttatctatttgttgtatatattctgattgttcttccaaatctgaggcaatttgttctctttcctcaattaacttgtagctattacgtatacgttcaagaccacttcgcgccgcacctactaattctaaattgtagtttattgggctacgataatgcacactaatcataaagaatcgtaatacgtctggatcgacttctttaatgatatcgtgaactaaaatgaaatttcctagagacttactcattttctcattatcaatattaataaaaccattatgcatccaataatttgcgaaaggtgcatgattatgagcctctgattgagcaatttcattttcatgatgcggaaattgtaaatctgaaccacctgcgtgaatatctattgtagaccctagttcatgataagccattactgaacattcaatgtgccaacctggtctacctttaccaaatggactattccaactaatttcacctggtttagctttcttccataaagtaaaatctagcgcatcttctttttgttctccagcttcaatacgagcgccaactttcaaatcatctaatgattgatgacttaatttaccatatccatcaaattgacgtgttctaaaatagacatcaccgtcactttcatatgcataaccttcatctactaattctttaataaaatcaataatttcacccatatgatgcatcacacgcggattagatgtagcctttttcacattcaaagcaccaacgtcctcataaaaagctttaatatacttttcagcaatttcaggaacactttcattaagttctttagagcgattaatgagtttatcatcaacgtctgtgaaattagaaacatagatgacttcatatcccttatattcgaaatatcttctgactacatcataattaatagctggtcgtgcatttccaatatgaatataattgtaaactgttggcccacatacatacattttgaccttacctggttcaatgggctcaaacgtctctttccgacgtgttaaggtattatataatgtaatcatcttgaatctctccattcttagctttttcaagctgtctttctaagtgtttaatttgttcgtaaagtggatcaggtaagttacggtgatcaaatgttttaccaatacgtctaccttcttgtttaacaatgtgacctggtatacctactacagttgtataactaggaacagactgtaatactacggaattagctccaatattcacatttgattcaatttttatattacctaatatcttagatccagctgctatcaaaacattatcaccaatatcaggatggcgttttcctttttctttgcctgtaccacctaaagtaactccttgataaatagtaacattatcaccaattgtacatgtttctccaataactacacccatgccatggtcgataaataaacgcttaccgatttttgcacctggatgtatttcaattccggtaaaaaaacgtgatagttgagaaatcattctggctgctacatagcgtctatttttatataattta

SEQ ID NO: 3734 - DNA, 3357 bp, Artificial Sequence
  Description of Artificial Sequence: synthetic nucleic acid sequence
aagtcaccagaaatggatgcatcaaattgattcatacggtggtacacataccaagtacattggccatgtgggtaaggtgatgtaccggaagtttcagtaaatggtttgaagtcattaccagagacatccgtacctattgatttgttgtatttcttcatgttaggcattttttctttgtcaaaagatgttaaatgataatgtttaataatactatttaattttttagaataattaggatctgtggcgtatgagcgtgacagatgtgaagtagcatctttatatgatagagcttcactcttccaagttggtttataaattgacggattaccatcgataccatgtttgattaaatctgcataatcttcaagagattgtttagtacttgggtatttacggaaacctgcttggatactgaacatatgattactgctatcagcttctaaagtattaaaagttacagattgtcctttgtagtcacctttgattccaaacaagttatgatttggtgattgtgcaagtgaactttttccagagtcagattctaaaatagcttgagcaatcataactgatgcatatatatcttggtcttttccaatctgatgcgcatctttagcaattgattgaatgaaatcacgtgtgtcttgactgtcaacaacattaaatgaatcagaagataagtcaccattgtctaattcaggtagttgttggaaaagacttgttgaacgtgtatttgagcgtttaatgtcatcctcaaatgattgtgcaggttttgattgatgttttaattcatcatctgttggtaattgtggattcttgtcggcattatcactttgagatgttttagtgtgacttgtattcttgctcttattgtaatctttttctgttttcttagcgtcctgactatattcatctaatatagagtctaatgctgaatctgtaatactagaatatttcttgttacgttctgagctatcatcattcgcttgagtttgttgttgctcagaagaagattgatttttgtttgtatctacgttttcgccttcttgatcttctttatccatttctccaagtaaatcactgacgtcagaatcggcttgatggttagttgtcttttctttttcatcgtttgatgattcttgatcttgtttagcagacgactgtgattgttcttgatgttgtgatggttgttttgcctgatctgcttggtctacttgatctttttcgtcattagaagaatggcttgtcttttgtggctgttcgtaatctgttatatcagaatcaaaatcaaataaattttgtatgagtgacgttaaactaaaactgtcttcgtatttattcggttcccagtatttagaaaaatctactgactgagacttaaaattatcataaagttgatcaactaaattatcatctttcattttatagttacgatgtgttgagtcagctgataatggtttattagagtctttgtccttgctgtcagaagtgctttttttatcatcagaatcgtgtttagaatcatcgttgttaaattcatctttttcagattgttttgatgtttctttttgtgattgatgttgttccattttatctgaatttgtatttttattagatgaatcttcagcaaaagctgtttgtgtagcgaaggttggcgtgataagcgccgtcgatagtaaatatactaaaaatttatttttcttcatcttatgtgtgctcccttaaaaattatttttagttattgtcataacaaatgagaatttgatataatttatcttatggtttataaagttgacaagcatcaacaaaaatgaattacgccttaatacaaatattatactaatcaacattagaaaaataaatccatttaatcaaattttaatataatatgtgtatcatctttacgtaagcaaaaaaatatgcacatttaagtaatcatctgtacggaaatgtattacaataaaaaagaataatgataattaggagtgtgaaaatgaaaaacgcactaaaactttttatcacggatttaaaaagagttgctaaaacaccaggtgtatgggtcatcttagctggtttagcaattcttccttcattctatgcatggtttaacctctgggctatgtgggatccgtatggtcatacaggacatatcaaagttgccgtagtgaatgaagaccaaggtgaaaaagttcgtggtaagaatattaatgtaggaaataaaatggtcaaaactttaaaaaagaatgatagttttgactggcaatttgtgagtagagaaaaagccgaccatgaaattaagatgggaaaatattatgcaggtatttatataccgaagaaattcacacatgaaatcactggtactttaagaaaacatcctcaaaaggcggatatagattttaaagtaaatcagaagattaatgctgtagcagctaagttaaccgatacgggatcgtcgtttgtgattgataaagcaaataaacaatttaacaaaaccgtagcaaccgctttactttctgaagctaataaagtcggactatcaattgaagataatgtacctacaatcaataaaattaagagtgctgtatatcaagctaataattcattgcctaaaattaatcaatttgcagacaagattattgaactaaataaacatcaagacgatttggatgcttatgctaatcaatttagaagtttaggaaagtataaagggaatgtattagacgctcaagaaaaacttaatgctgttaattcgtctattccggcgcttaatgaaagggctaaattgatacttgcacttgatagctacatgcctaatattgaaagaattttaaatgttgctgctaatgatgttccagcacaatttcctagaattaataggggtgtcgatattgcaagtgaaggtattgatgcagcgagtggtcagttaaatgatgcaaaaggttatttgactcaagctaaagcgagagtgggagactatcaagaagcagctggccgcgctcaagatgtgaacaaccaagcaaatcaaaatctaagaaatcaaacatcaactacaccccaaagcgctataaaatcatcgcattcggaagggaagagtcattcaagcattaaaacagtacctgtgagtcaatcttgctaataaagaatccatccgaattaaaatcttgtggaagtatctgtaacgttttaacctgttcaccagtcgctggattttggaatggttcaaactcaaaatctttatgtctctttaaaaaagtatagatgacattttcgttttccatttgttctattgtacatgttgaatacactattgtaccaccaggtttaatattatctttaacattttctaaaatttgtaattgt

SEQ ID NO: 3735 - DNA, 2962 bp, Artificial Sequence
  Description of Artificial Sequence: synthetic nucleic acid sequence
tgtatgaggcgttgtaccaatcactggattctggcacgtctgtttgctcaccccaaatttgtggagatgcaggtggtaaatcagcataccaatcgtaaaaacttaacatttctccacctaacaaattaataaatcttgctcctgaagcataactaatcatcgacatagcaggaataggagtaaatccagcaatacgatccggtccatctttttttatggtgtataaaatttgagctgcaatgatatctgtggcatctttccaatttgctctgacgtgtccacctttacctcttgcttctttatattgtttggctttttcttcattttctacgatggatgcccatgccgcaattcggtttcctttttgttcttcaagcgcttcggtccataaatctaataatttacctctaatataaggatatttaactcttaacggactatactcataccaagaaaatgatgcacctctcggacaacctcttggctcaaattctggcatatcaggtccacaacttggataatcaatttgttgattttcccatgtaattacgccatttttgacaaatactttccatgaacatgatccagtacagttaacaccatgcgtcgttctcacaactttgtcgtggctccatctttctctatacatcttttcccattctcgacttttatgctctaataccgaccaatttccattaaacttttctgtcggtttaaagaaattcaatccaaattttcccattttattaatcctcccaccatacaaggttatatcctttctcaatgcataggtattgtgtcttatctttattgtacattttttcacaaagccattatattagggaatgtcctaattgatgttagagattccctaaaaaataaggcctacaaattcataatgaacttgtagacccaaatgtttatacatatattgttttaatactcttgtgtttaatcatttcgttatacacgttttgttgagaaatgtggtagctatggtcaaaatcaatcagacattggattccttcatcatataaagtttcagcctttgcaattgcacgttctttatctcccttgattaaatatagatttcccttgtcattcttattattattcaataacgtacgattaatgtcatcaagtatattacctaaaatgcatatgcctggatgaccttctagttgttgagaaaccaattgttcttcaatcgtacttaaatgacctataacaatcttttcattgtagcaggaagcattaaacactattgcaatggggtagtcttcattcgtatatgattcaatttgtttaataatttgacctaatcttttcacacccatataaatagctaaagtgcctccattaatcaagttcctaatatccgtatcgtgattaaccgaatctttaaaatgaccagttgagaaagtcacactcggtgcgatagaacgcatcgttaatcccatattcatagttgctacggcagcacttgctgatgtcacaccagggacaatctcgtaatgaatatgatgattttctaatgtttgtacttcttctgtaattctaccaaaaatcgcaggatctcctccctttagtctcaccacacattgatattgattagctgcttcaacaattttttgattaatctcctcttgttgaatgtgtttacaataaggtttctttcccacattgatcacttttgtttgagaagaagcatactgtaagatgaaaggatttacgagacgatcaaataaaatcacgtcagctgatctaattaaccgttcagcttttttagttaataagtttggattgcctggtcctgcaccgattagatatactgtgccaggataagttatagacataagtaaatatctccatcaataacttctacttcgtatgtctctacacatcctgtatcaggttgttgtacttctccagtttttaaagctattttttgatcgtgtaacggacagtaaacataatcaccacttacagtcccttcagacaacggtccttctttatgtggacatatatttccaatggcatataaatcaccattatctgtgagaaaaatacctatttctttttcgtttacaactacttttttgcctatttgaggaatcatttcattcattgttgtaactttaatcttttctttagctttcattcttacaccttctcaacttcaaagattttttgtgcttctttattttcaacaatagtttcccatggttcattctcaacagcttttttggcttccataattcttaaatacagttctttttgcttttcttgatttaataagacattcttgacattttcaaagcccatacgttctaaccatggtgctgttctttcagcgtaaacacctgtttctctgtaatactgcatgagggcaccacataattgaatcacttcatcttcggtttcaactgtcgttaacaatttacctacagtaacatcagtaccaccattacctccgataaatatttggtagccattttcaacagatatgacgccaaaatctttaacaccagactctacacaacttctcggacaacctgatactcccattttaaatttatgaggtgtatcaatatattcaaatgttttttcaagtcttattcctagtcgagttgtgtattgtgtaccaaaacgacaaaactctttaccaacgcaacttttaacagaacgcgtctttttaccataagcagaagcagaacgcattcctaaatctttccaaacttgtggtaattcttctttcttcaatccatataaacctacacgttgcgaacctgttactttaacaagtggtacgttatactttttagcaacttctcctaatcgaatgagttggtcagcatctgtaacaccaccgcgcatttgaggaatcactgagaaagtaccatcattttgtatatttgcatgatatctttcattagcgaagcgagaatctttttcgtctcga

SEQ ID NO: 3736 - DNA, 2352 bp, Artificial Sequence
  Description of Artificial Sequence: synthetic nucleic acid sequence
atcctgaaggcaatggtattgaagtctatcatgatcgcccttcagaagactggttgtggcgagacggttttgtcaaaatggatacattggaagttgatgtcaatgatttaatgactcaacggtcaaatgaaggttggcaaagttggccggaagaaggaaaaatcgggcatttacatctcaaaacacacaatttagaatctgcttatgaattttatgttgaaaagttagggttcgaacatatatctaatttcccacaagcactatttatgtccactcaaaagtatcatcatcatatagctacaaatacttggcagtcaaataagattagaactcaaaatgaacaaacttatggtttatgtcactttgacatatatcaacctaatgcaaatactactcatgttacctcacctgaaggctttgacattacaattcatggtaacgaaacaaaataaggatgataacttatcgtagttgaatacacaccttattttgaataagttatccaagttaccgacaacttgccttgcccgtagaatttctcggtgaaattctctttgtcggggccccgaaccccaacttgccttgtccgttgaatttcaacatgtacttcgtctttatggggggtgaaagtgtttgatatatggcaggtgtattttctaatggtttgtctatatattaagaaaacctgagacaagattgatgtgtactatacctcacaatgttagaatttaatctaactttgcgttgcactcaatgtctcaggtttttataattttatttatttttcattaattttatttcgcttaaagcttgctgacgtattctatcttcatcttctttaacccagtttggaattaaaaaagcatcaataatagcccaaattaaagtaggaattccaaaagtaaaccaaacagttaataatgttaagactaataatccaactccacttcctactaaattctaacatttcgtcaactttttccttaatttctttcttatttgtcttacttaaaataagtggcattgcaacatttttatagactgatttagaattaagcaaattgaaatgttgaaagatcataccgatatcttttttaatatcacgtaaatctttttctttatatgtatcaatctcatgaccatcaacaataacttgaccatctgatactgtctcaagttgattgactaaccgaactaatgtacttttaccagcaccacttgaatttggaccacctgaaagaatgatacctttaggattcattcgtttaatttcttcaatagaaatttcgtgatcatgtaattcactataaacgcccatctcacggatacgacgcgtaattaactggttatattggctaccaaagtctaaaacaagaatcagctcttgctctttcgccatttccatagtcatgaatctcctttattgtttgattttatgtaaaagtaagagaaacgcgcctgtcaatgccctaaatgatagctttaagtattgtaacgtatcattaagcattgttgttttaaaaattaagcgcgttcctacaaatgattaattcatcacccaaagtttaacactagaaagaatagtttggtgattctttcgtaatttgaacattatgaggatgactttcagctaagccagctggtcccatacgtgtaaattgtgcttcttcacgtaatttttttaggttttctgaaccagtataacccatgccagctctaacgccacccataagttgataaattgtatcttgtaatggtcctttataagctgtacgaccttcaataccttcaggaacaaattttcttggtgttttatcttcttggaagtaacgatcatttgaacctttttccatagcacctaaagatcccatgccgcgataaactttatattgtctaccttggaatacttcagttgcaccaggactttcttctgtaccagctaacaaactacctaacataaccgcatgaccaccagcagctaatgctttgataatatcacctgagaacttaataccaccatcagcaataatagccttaccatgcttacgggcttctgtagcacaatcataaactgctgtaatttgaggcacacctacacctgcaacaacacgtgttgtgcaaattgagcctggaccaatacctactttaacaacatcggcacccgcttcaaataaagcacgtgttgcctctgcagtcgctacgttaccagcgacaacagtaatttcaggatatgtttccttgatgtgtttaacttgattaataacgcctttagaatgaccatgagctgtatcaataattaatgcatctacgccagcttcaactagtttttgtgcacgaatttcagtatcttta

SEQ ID NO: 3737 - DNA, 4434 bp, Artificial Sequence
  Description of Artificial Sequence: synthetic nucleic acid sequence
ccaatgtgctctaaatacacaaaattgttaggtggtgccaaaatatatcttaaaagagaagacttaaatcacactggtgctcataaaattaataacgcgataggacaggcactattagctaaaaggatggggaaaactaaattagtagccgaaacaggtgctggtcaacatggtgtagcaagtgccaccatcgctgctttattcgatatggatcttattgttttcatgggaagtgaagatatcaaacgtcaacaacttaacgtatttagaatggaattgctaggagctaaagtagtgtctgtgtcagatgggcaaggaacactatcagatgctgtaaataaagctttgcaatattgggtgaatcatgtcgaggatacacattatttattaggctcagcgttgggacctgatccgtttccaactatggtcagagattttcagagtgtgattggtaatgaaattaaaagccaaattttaagtaaagaaggacgacttccagatgcgttagtcgcgtgtgttggtggaggatccaattcaataggtacgttctatccatttatacaagatgatgttaaattatatggggtagaagctgcgggaaaaggaagtcatacgcataatcatgctttagctatagggaaaggtaaaccaggtgtattacatggttccaaaatgtaccttattcaaaatgatgatggacaaattgaattggcacactctatatcagcgggactagattatccaggtattggacctgaacattcgtattataatgatattggtcgtgtatcatatgtaagtgctacagataatgaagctatggaagcacttataacattctcaaaagttgaaggtatcattccagcaattgaaagtgcacatgcattgagttatgttgaaaaattagcgccaaatatggatgaaaaagaaattattgttgtgactatttcaggtcgtggagataaagatatggaaacaattaaacaatacaaagaaaacggtggtgaacaaaatgagtaaattattcattccgtatattatgggtgatttaaattttattcatcatttaaaaacattaactgagaatggagcagacattgttgaaattggtgtgccattttctgatcctgttgcagatggacctataatcatgaaagcagggcgcaacgctattgacgagggttcaaacattaaattcatttttgatgaattaataaaaaataaaaatactatttcatctaagtatgtattaatgacttattataatattctaagtgcttatggagaagaattatttttggataagtgtgatgaagctggtgtttatggtttaattattccagatttaccttacgaacttacaaaaaagtttaaaaaagatttttatcatcattctgttaaaataatatcgttaattgccatgaccgcaagtgatgctaggattatgcaaattgcaaagaactcagaaggatttatttacacggtaacaatgaatgccacaacaggtaacagtggggagttccatccagatttaaagagaaaaattgaatatataaaaaaagtttcaaaaattcctgtggttgctggatttggtatcaaaaatcctgaacatgttaaagatatagcgtccgttgcagatggtattgtaattggtagtgaaattgtaaaacgtattgaaatagattcaagaaaagaatttatcacttatatcaaatcaataagaactacgttgaattctttataaaaattaatattaagttaaatcaaagttaagaaaatagatgaaaaatatacatatcaaaaacaatgattactctatgaattaactactatactaatagtaacttcaaaaaattaaatgatcactattgaataatctactactaatgtgggtaaataataatcacaattaatttgaagaggtgtatatattcatgagtaaaaaagttttatttgttttaacaagtacaagtcaatttacagacggtacagaaactggattatggttagaagaagctggagcaccatataatatattgactgaagaaggtatcaatgttgatgttatttctattaaaggtggaaaagtaaatcttgatcctaattctgtttctaatgaatcactgaatcagtatgctaaattcgtgtcacacttaaacgatacacctagtatcgaaaatgtaaatgcagatgagtatgacgctatttatctaccaggtggacatggtactgtatacgattttgccaataatgagaaattagctgatattttacttcaatttaaaaatagtaataaaataatctcttcagtatgtcatggacctagtgcgtttgtaggtgtaaaagatgcaaataatcactatctagtagatggtgtcaaaataacttcatttactgatagtgaagaaaaagcaatgggatttgaaaataaagtaccatttttaactcaatctaaattagaagagcaaggtgcaaattttgtagtgaaagatgactttacatctcacgtagaaaaagacggtcaatttatcactggacaaaatccccaatcaagtgaagacattggtaaagcacttgcaaatgaattaaaataatagtaaataattagtgatatgggcgacattagtgtttagcccatattattttatacataaacagaataaacgagatttaacttttaattttatataaaagttttgcaggataatattttagttttcactacaactattgtatacttgtttagattagaaatataaatagtattaaatgaaccaaatgttaaatataaaaggtgaagtaaaacgacctatttttctaaaaataaaaagaaatagatataaagatataaatgggagttatgaagatgaagtttacgaatttgacagctaaagaatttagtgactttactgatcgtatgacatatagtcattttacacaaatggaaggtaattacgaattaaaggttgctgaaggtaccgagtcacatttagttggaattaaaaataatgataacgaagtgattgcagcttgtttattaacagctgttcctgtaatgaaaatatttaaatatttttattccaatcgcggtccagtaatagattataataataaagagcttgtacattttttctttaatgaattgagtaaatatgtaaaaaaatataattgtttatatttaagagttgacccataccttccatatcaatatttaaatcatgagggagaaataactggaaatgcaggtcatgattggatttttgatgaattagagagtttaggatataaacacgaaggattccacaaaggatttgatcctgtattacaaatccgatatcattctgttctaaatttagcaaacaaaagtgctaatgatgttttaaaaaacatggatggtttaagaaagcgtaatactaaaaaagttaagaaaaatggagttaaagtccgctttttatctgaagaagagttacctatatttaggtcatttatggaggatacctctgaaactaaagattttgcagatagagaagatagtttttattacaacagattcaaacattataaagaccgtgttttagtaccactagcctatattaactttgatgagtatatagaggaactaaataatgaaagaaatgtgcttaataaagattataataaagctttaaaagacattgagaaacgtccagagaataaaaaagcacataacaaaaaggaaaatttagaacaacaactcgatgcaaatcagcaaaaaattaatgaagctaaaaacttaaaacaagaacatggcaatgaattacccatctctgctggcttctttataattaatccgtttgaagtagtttactacgctggtggaacttcaaatcgttatcgccattttgcagggagctatgcggttcaatggaagatgattaactatgcaattgaacatggtattaatcggtataatttctatggtattagtggtgactttagtgaagatgctgaagatgctggcgtagttaagtttaaaaagggctatgatgccgatgttatagaatacgttggtgactttattaaacctattaataaaccaatgtataacatttatagaacacttaaaaaactaaagaaatagattttaagaagggaattatctaattatgaaatttacagagttaacagttaaagaatttgaaaactttgtacaaaatccatcattagaaagtcattatttccaagtgaaggaaaatattgctacacgtgaatcagatgggtttcaagtagtgttattaggtgtaaaagacgacgacaatagagtgatagcagctagcctgttttctaaaatccctacaatgggcagttatgtgtattattccaatagaggccctgtaatggactattcagatttaggtttagtggatttttatttaaaagagcttgataaatatt

SEQ ID NO: 3738 - DNA, 2946 bp, Artificial Sequence
  Description of Artificial Sequence: synthetic nucleic acid sequence
ataattcgttcgtctctatttttaaaattacctacagcaacaattaatataaccaaataaaatgcacttaatggaaccacaaatgttggattaaatatataagttagtattaaacaacttatcatagctattaaaaaggttataaattcttttgatacaacacgaacattaaaaataaaaggtaaggcgaaagcactatagaagaaaaacaaactattcataggattgacactatagacaaaataaaagattcctaaataatgaataaccagtaatgaatataaaatactatcactaaggtatttataaaatataatcatcgtcacatagctgattataaaaatagtacaaacaattaaataagttaagaaattaccacgtttgtcaacaaatatagctaaaatcggaaatattaaatatattaaagtacttaattcccctattctcactccccaacttcttgattccattagtgtacatctcctttcttattcatgaataaagcaatactcacaaagattatacaatagaccacgagatagccaaacgcttctatattcacccctttattttgcgctaaatctatagcaagtagctttaaattatatgttggcatgtgtttagaaatcgactgaagccaatcaggaaacgtgtatactggaaaccatagacctcctaatatagctagtgtaatattaagtaaattggcaaaactacttgctttttgaatatcgttgagttgagcgataatcaatcctaaagtcaaaaataaactaaccccaatccataaagttaatgcagagaatatccattgaaaaacagtcatgtgaacatctttgtaaaaatgagctactgaaaaatttgactggttgaatggagagaatcctaatgataagtaagaaaaaagcattacaaatgattgacgttatagcagatatgtttcctaatgcagaatgcgaattaaaccatagaaatgcattcgatcttacaatagctgtattattatcagcacagtgtactgataatctagtcaatcgtgtcactcaatcattatttagaaaatatcgaacacctgaagattatttaaatgtgagtgatgaagaattacaaaatgatatacgctctattggattatatcgcaataaagccaaaaatataaaaaaattatgccactctttaattgaacaatttaatggtcaaatcccacaaacacataaagaattagagagtctagctggagtggggcgtaaaacagcaaatgttgtaatgagtgtcgcatttggagaaccttctttagctgtcgatactcatgttgagagagtttctaaacgtttgggaattaatcgttggaaagatagtgtaagacaagtagaagatcgattatgtgatattatcccaagagatagatggaataaaagccatcatcaattaatattttttgggagatatcattgtcttgctagaaaacctaaatgtgagatatgtccgctgttaaatgattgtagagaaggacaaaaacgacataaagcaaagataaaggaggcgtgatgatatgattgaaaaacaggatttcaatcatatagaggaccaacttgatcaactagcaagtaataaacaactcaaaacaccagaagctagggaacttttagatagttatttcgatttaattattaattattttaaacaaataaataacatagatgaaattcattttaatcaactcgatacatatccagtagttccaatgaattttgatgaacgctatcattatatggttgcacgtaaacaccattttatgggctatcgtcaaatgaaaacattgaaatcagaattaataaaaatgaatgcatcttatctaattagaaagcaacgtcaacaaaaataaattatacttaattttaattattcgattttatacctatatcaacatttacacttcacatacaatgtagttaatcaaattaattaataactagagaacttagattattattgcacatgctaaatttacttttctaagacagaaaaagctccaatttcattttcttgaaattggagctttaagtttatttatttatgaaactttataatcgaatatagagtttaaattgaacagacgtgtaaatgcattgcctgagttaccttgactggtaccattcgaactattcgagttgtttccacttgatgctgagttagagccaccatttgatgaagaagatgtatcgctacttccatgaacactacggttagtagtattattatcagaatgacctgatacagatagactgtccggtgaacttccttgtacatcattaggctttttgaaatcttcaccatctttagatgagatactagacatcacatcttcatacaagtattgtggataatcttgttctgaatgaccgataaatgaatttgttccatattgtttaaccttattgaagcccatccataccgacatagtatattctggactgaaaccattaatccaaacatctttggcagcattatcaggtaaattatacttttcgtatatttcttgtccatacgtaccagtaccagttttcgcacccatgtttacgcctgacacaccatgtccataagccgaacgatagtattcatatctaatgcgacaacctaccatattacaaagtaatgaaaattaaatggtttaatatattagtatttgcaacttaattatgtactactaacattaaaaccacctgcgacattaattcatgtcacaggtggttttgattcatttatttctctgctttgcgcttctttaacttttccttaagtttgcgatcttgttcttctttacgacgttttcgttcttcgttacgttttcttagtcgctcttcttcttctggatcacgtggtttttttaattgttttgtaaccttttccataagttcttcttcggttaacgcagcaagtggtcga

SEQ ID NO: 3739 - DNA, 3656 bp, Artificial Sequence
  Description of Artificial Sequence: synthetic nucleic acid sequence
gaaattgaggagcgttcccttctatttgaagaaatgaaacattactttattttaaatttcccacaaagacctggtgctttaagagaatttgtcaatgatgtcctcggacctcaagacgatattacaaaatttgaatatttaaagaaaacatcacaaaacactggaactgttattataggtatacagctgaaacatcatgatgatctcattcagttaaaagatcgcgtatgtcaatttgatccttctaatatttatatcaatgaaaataaaatgttatattcattacttatttaagttaattttataaccaaatccgaagacgacgaatatattattaattcgtcgtcttcattttagtatcttattttagaatgtcagtttgttcctcggctaagaaactttcttcacttgagataagcgctcgccctcttgtgtttcattttcgtctcttgttgaaccttgtagctcgactaatttcattactctcgctcccaaattcataagttacaagcgctttctattcctcgatatgtttactttttcatatcaaacactttcttttttaaaactaattttgtataaaaaaagagacctttcggtctcgattaggctcatcgcatccatacgatatttgcctggcaacgtcctactctagcggaacgtcagtccgactaccatcggcgctaaggagcttaacttctgtgttcggcatgggaacaggtgtgacctccttgccattgtcaccagacaaatgaatgattatacattcaaaactagatagtaagtaagattttgcgtcgcaaaacgttttttaaaaattgattaagtcttcgatcgattagtattcgtcagctccacgtgtcaccacgcttccacctcgaacctattaacctcgtcatcttcgagggatcttataaccgaagttgggaaatctcatcttgaggggggcttcatgcttagatgctttcagcacttatcccgtccatacatagctacccagctatgccgttggcacgacaactggtacaccagaggtatgtccatcccggtcctctcgtactaaggacagctcctctcaaatttcctacgcccacgacggatagggaccgaactgtctcacgacgttctgaacccagctcgcgtaccgctttaatgggcgaacagcccaacccttgggaccgactacagccccaggatgcgatgagccgacatcgaggtgccaaacctccccgtcgatgtgaactcttgggggagataagcctgttatccccggggtagcttttatccgttgagcgatggcccttccatgcggaaccaccggatcactaagtccgtctttcgaccctgctcgacttgtaggtctcgcagtcaagctcccttatgcctttacactctatgaatgatttccaaccattctgagggaacctttgagcgcctccgttaccttttaggaggcgaccgccccagtcaaactgcccgcctgacactgtctcccaccacgataagtggtgcgggttagaaagccaacacagctagggtagtatcccaccaacgcctccacgtaagctagcgctcacgtttcaaaggctcctacctatcctgtacaagctgtgccgaatttcaatatcaggctacagtaaagctccacggggtctttccgtcctgtcgcgggtaacctgcatcttcacaggtactatgatttcaccgagtctctcgttgagacagtgcccaaatcgttacgcctttcgtgcgggtcggaacttacccgacaaggaatttcgctaccttaggaccgttatagttacggccgccgtttactggggcttcgattcgtagcttcgcagaagctaaccactcctcttaaccttccagcaccgggcaggcgtcagcccctatacatcaccttacggtttagcagagacctgtgtttttgataaacagtcgcttgggcctattcactgcggctcttctgggcgtgaaccctaaagagcaccccttctcccgaagttacggggtcattttgccgagttccttaacgagagttcgctcgctcaccttagaattctcatcttgactacctgtgtcggtttgcggtacgggcacctgttatctatctagaggcttttctcggcagtgtgaaatcagcgactcgaggaaacaatttcctctccccatcacagctcagccttatgagtgccggatttgcctaacactcagccttactgcttggacgtgcactccaacagcacgcttcgcctatcctactgcgtccccccatcgattaaaacgatactaggtggtacaggaatatcaacctgttatccatcgcctacgcctgtcggcctcagcttaggacccgactaacccagagcggacgagccttcctctggaaaccttagtcaatcggtggacgggattctcacccgtctttcgctactcacaccggcattctcacttctaagcgctccacatgtccttgcgatcatgcttcgacgcccttagaacgctctcctaccattgtccaaaggacaatccacagcttcggtaatatgtttagccccggtacattttcggcgcagtgtcactcgactagtgagctattacgcactctttaaatgatggctgcttctaagccaacatcctagttgtctgggcaacgccacatccttttccacttaacatatattttgggaccttagctggtggtctgggctgtttccctttcgaacacggaccttatcacccatgttctgactcccaagttaaattaattggcattcggagtttgtctgaattcggtaacccgagaggggcccctcgtccaaacagtgctctacctccaataatcatcacttgaggctagccctaaagctatttcggagagaaccagctatctccaagttcgattggaatttctccgctaccctcagttcatccgctcacttttcaacgtaagtcggttcggtcctccattcagtgttacctgaacttcaacctgaccaagggtagatcacctggtttcgggtctacgaccaaatactcaacgccctattcagactcgctttcgctgcggctccacatttgctgcttaaccttgcatcagatcgtaactcgccggttcattctacaaaaggcacgccatcacccattaacgggctctgactacttgtaagcacacggtttcaagttctctttcactccccttccggggtacttttcacctttccctcacggtactggttcactatcggtcactagagagtatttagccttaggagatggtcctcccagattccgacggaatttcacgtgctccgtcgtactcaggatccactcaagagagaatatgttttcgactacaggattattaccttctttgattcatctttccagatgattcgtctaacatgttcttttgtaactccgtatagagtgtcctacaaccccaacaagcaagcttgttggtttgggctcttcccgtttcgctcgccgctactcagggaatcgatttttctttctcttcctccgggtactaagatgtttcagttctccgggtctgccttctgacatgctatgaattcacatgtcgataacatgacataactcatgctgggttcccccattcggaaatctctggatcaacgcttacttacagc

SEQ ID NO: 3740 - DNA, 3304 bp, Artificial Sequence
  Description of Artificial Sequence: synthetic nucleic acid sequence
tttaataaaaaaactcccacctgtctggcgagagtttaatgattggtaactttcattacctagtaaaatctggaacatcttacaatatttcaattttatacgtaatgatgataaacaaactgaagataagttgatatacaatcatttctataatattgaaatagactaacgtatttcatacgtgcgttttattaaattcctttgccaataccgaatccgaagtataggattgctataaaaataactaagacaattctataaatagcaaaaggtactaacttaactttattaattaagtgtaagaatgttttaattgcaattaatccaacaataaatgccgctaaaaatcctaaaatgtagaatggtatgtgtgctaaatgaatatactcataatgttttagtaaagataatccacttgcagctaacataattggtaccgacataataaaagtgaaatcagatgcagctttatgattcaatttcataagaacacctgttgaaatcgttgaaccggatctactaaatccaggccacatagctattgcttgagagataccaatgacaaatgcttggaaataattaatttgatctactgtttgaggatgctgaacagttttagaatacttatcagctataatcatataaatggcacctataaataaaccaattaagactgttggtacactaaataagtatttttcaattaaatcatcaaataaaaatcctaaaatccctgctgggaccatacctactaatacatgtattaaattcagacgtcgtggttttgaacgtctgtctcccgaagtggaaggttcaggtttatgttggccaatatgtaaaatttctaagaagcgttctctaaatacccaggcggccgcaaatactgaacctaactgtataacaactttaaatgtgaatgctgattgagaaccgagaaaattagttgactttaaccacatatcatcgacaagtatcatgtgcccagtagatgaaacaggggcgaattcggtaagtccttctacgatacctaagatgatgccttttattaattcaagtaaaaacatactttacccactttcttatctctattaatttattactagtactcaaaataccatattatcatagcatagaaaatcatattgatggtgtttacaatctaaatactagaccaaagtcttataaatgtattaagttgtgactagaattattctgtgagcgaattgattttaattttttgtaaacactctataatatatgtaggtgatattattgtgaaaaaactaacaaaaatggttttaagttataaattataccccacactcatgttaatcatgagcgtttttttatcttttacggtcgttgcgcaaaacatttcaatttcacactttttaaatcacttactgtattatcaacaacaatctttattattattgttatcagttatttttatctctcttattttaagagcaacatttaatatgctgattcaatttttaggagatcatttggcatttaaagtaaaacatatgcttagagaacaagtgattttgaaaaaaagtgtccgttcaattggtgaagaaataaatattttaactgaaagtattgatggtatcggtccgttctttcagagttatttacctcaagtctttaaatcaatgttgattcccatcgttattattattaccatgtgttttgttcatttacctactgctattattatgatagttaccgcaccttttattccattgttttatgttatttttggacttaaaacaagagatgagtcaaaggatcaaatgacatatttaaaccagtttagtcaacgttttttaaatacagctaaaggtcttattacatttaaacttttaaatcaaacgaaacaatctgagcaacaactttataaagacagtacacgttttagagatttaacaatgcgtattttgaaaagtgcctttttatcaggacttatgcttgagttcataagtatgttagggattggattggtcgcattggaagcggctttaagcttagttgtatttaaccatatcaactttgtgactgcagcgatagcgattattttagctcctgaattttataatgcgattaaagatttaggtcaagcatttcatacaggtaagcaaagtgaaggtgctagcgatgtggtgttttcatttttagaatctgaagataaagctgattctcctacattaaaagtggatgagcaacagtttgaacaagttttaattaagcatgttgattttcaatacgctaatagtaatcatatggctttgaaaaacatttctttttcggtaaataaaggagaaaaggtcgctattgtgggaccgagtggtgcagggaaatccactttagctaagttgcttagtcaatcagtaacacccacacatggaacactttcatttaaccaagcatcattaaatatcggatttctaagtcagcgcccacatatatttgcagattctatcaaaaataatattgcaatgtatgatgatgagatatgtgatgagcaagtgattcaagtgcttgatgaagtggggttaaaagagaaagtactttcattaaaatatggtatctatacttctattggtgaaggtggggaaatgttatcaggtggacaaatgagacgtattgagttaagtcgtttattattattgaaaccagatattgtaatttttgatgaaccagcgataggattagatattgaaactgaaaaggtcatacaacaagtattagagcatcatttttctacaacgacagtgtttattattgcacaccgtgattcaaccattcgaagttcagcacggcgtatatatatcgaaagtggtcatcttataaaagatgattcgataatttctgttacgcgtagtgaggtgaagatagatcaatgaaatcacatattcattttagtatagatagagatttaatatgcgctatcatggtaggtgttttaagcggaattgtaacattagcaatgttctttttaagtggttatatgattactcaaagtgcgctaggtgcgccactttatgcattaatgattttagttgtatctgttaaattgtttggttttttaagagcaattacacgctatatagaaagattactttcacacaagacgacatttacaatgttacgtaatgtacgagttcaatttttaaaaatgctatatccagtcgttccagatatctatagaagatttaattcaagtgatcttattacaaaaatgataagccgtgtagaagctttacaaaacatatatctgagagtatattacccaccgatt

SEQ ID NO: 3741 - DNA, 3355 bp, Artificial Sequence
  Description of Artificial Sequence: synthetic nucleic acid sequence
gaagaactagacgctaatcgtcaatataatcactgtattttataatagcctgagacattttatagtctcaggcatttttaacgtattggagtatctaagtaatctgaaaacttagttatatatcaatatttaactaaattttttgttttgaaagataagacaacacttttaataaatttttgctgctaattctcaaaatgacattcatatatcgataagactgttaatataaatactttatatatatttattatctcatgtgcatcatttaggtaaccattgatagttagtaattggtacaagtttaaataaatttaagtatgatatataattgtttcataattggttacttaatatttagattatttttagaacatttcgatttgaaattaagtgtatagtggaatgtatatatataaaggggtggtgaaatattttgaaagagagatttattaagaaaactcattatttagactatcaatttgatgagcctactgatattaagttaggtttcactactcgagaaaatgggttaagtccttatcctaatcatagttttaatatggcgagatatatcagtgacagtgcacatcatattacacatcatcaagatatcttagcgaatcttattggttatccaagagatgaatgggtttttcctatacaaacacatgatagtcgtatcgttgaagttacaagtgaacataaaggaacaaatattgatgaactaactgatgatttacatggcatagatggaatgtatacttttgattctcacattcttcttactatgtgttatgcggattgcgtacctgtatatttttatagtgaaccacatggatatataggattagcacatgcaggttggcgaggaacatatggtcaaatagtaaaagaaatgctaaaaaaagtggattttgattatgaagacttaaagattgtaattggtccagcaacttcaaattcttatgaaatcaatgatgatataaaaaataagtttgaggaattaaccattgattcaactttatatattgagaccagaggtaaaaatcaacatggtattgatttgaaaaaggctaacgcacttcttctagaagaagctggagttccatcaaaaaacatatacgttacggaatatgcaacttcagaaaacttagatttattcttttcatatcgtgttgaaaaaggacagacgggacgtatgttagcatttattggacggaagtaaagtgaatgaagtaggtgaataatttatggatgttaaagagaatcttgctaagattgaaaaggaaattgatgcaagcattaaaaaaagtgcgcattcagcacaacctcacgtgattgcagtaacaaaatatgttacaatagagcgagctagagaagcgtataaagtagggataagacatttcggtgaaaatcgattagatggattcaaagagaagaaagaatctctaccaagcgatgttaaattacatttcattggttctttacaatcaaggaaagtaaaagatattataaatgaagtcgattattttcatgctttagatcgtttaagtctagctaaggagattaataaaagagcaaatcatgttataaaatgtttcttacaagtaaatgtttctggagaagaatctaaacatggcatagctcttgaagaagtgaatcaatttataaatcaaattaaagaatatgaaaatatccaaattattggattaatgacgatggcaccattgactgatgatttatcgtacataagaaatttatttaaagaattaagacataaaagaaatgaaattcaacaattcaatttagcacatgcaccttgtacagaattatctatgggaatgagtaatgattatcaaatggcagttgaagaaggtgcaacctttgtcagaattgggactaaacttgtaggagaataggagtgagccccccttggctttaaaggatttatttaataatttttttgtagttgaagaagaagaggaagttgaaggacctgaagaacgtgaatcttctagatcacgtgaacgtgttcaagaacgcgaagattacaatcgtaatgagaatcaagcgacaccacaaacttttaacaataagcaacaagcgattaagtctgtacctcaaaagaacactttgagatcgaatacaacttctgaagaaaggaattatcgtatgaataataattcaaaaaataattctagaaacgttgtaacaatgaaccaagcatcacaatcatatgccgctcaggaaagttcaaaaatgtgtctgtttgaaccacgtgtcttttcagatactcaagatattgccgacgaattaaaaaacagacgtgcaactttagtaaatttacaacgcattgatcaagtatcagcaaagcgtattattgattttttaagtggtacggtatacgcaattggtggagatattcaacgcgtgggtactgatattttcttatgcacacctgataatgttgaagtagccggtagtataactgatcacatcgagaatatggagcaacactacgaataaggagttcaactatggatattggtttgctaagtacaattttccgatttattatatttttagttcaaatatattattttggaatgattatatatttctttacttcttgggttccgagtataagagagtctaagtttggagaatttttaggaaagttatatgaacctttcttagaacctttccgtaaaattattcctcctattggctttatagacatttcttctatcgcggcaatcttcgttctagttttattccaaagtggtttagtaaaaatatttaatttaattcttgcatatttatcttaaaatgtgacacgcactaattttataatatttaacataacgaggcaaagtagctagacttctgatgctgtagtatatgctttaacacaacctagtcacgttaatgttaatgaagtaacgataagacctgtttaaatgatgacatttctctatttaaaatagcatttttgtttcatgttacacttaaattgttacgtttgaattcaaccactttacacaaaggatgggatatcaattggataaacgtcaatttgaaattttagatatgctagtgagatttaatactgaaagtccacctggacgtaatacagatccattgcaagatgaaatcgaaacgttacttaaacaactggatttttcaatacagagagaacagttatacgacaatgatagtgtgatagtagctaccttaaaagggcacaatcctaaagcgccaaaactgatattgaatggacatgttgatgtagcttctgtagatgacgatcaatattggcagtatccaccttttaaacttaccaacaaagaag

SEQ ID NO: 3742 - DNA, 3223 bp, Artificial Sequence
  Description of Artificial Sequence: synthetic nucleic acid sequence
acatctagtcctaaaattttatgctttagcatattaattcttagactcttttaaatagtttgaaacgagttcttccataattacatcacggtctatatgacgtatttggtttcttgcttcattttgacgtggaatatatgcaggatctccagataataagtaacccactatttgattaactgcattatatccacgttcttctaatgtacgatggacattctgaagaactgatttgacatcttcctttggaatttcttcataactaaatttcattgttttatcaaaattttccatatacgacactccttaataagcgtattctgactcactttaattctacaccattattcattggagttatagatttttaatgtaatctttaataaagcgtaatgcttctgttattttttcaggttgagttccgccaccttgagccatatcaggacgacctccaccttttccaccaataattggtgtcatgtttttgataagatctccagcttttacttgatttgtaagtgattttggtactgtagcaattacagaaacctttccatcaacttgtccgactaacactataatagtatcttgaagtttagatttaaagtcatccatagttgaacgtatcgcttttggatttggaatttctacttctgttgctaaaactttcaaattattaatcaactcaacctgttcttcaatgttccccatctttagtgatgttatttctttgttgcgttgttctaattgtttaagcagtcctttttcttcttcttgaagttgtttaactttttcaactacttggttatcggatttaacttttaaatgatttttaatattattaaactgtgtttcaatttcttcaagatgtaagaatgcacctttacctgttaaagcttcaattcttctaacaccggcacctgttccagattcactcacaatcttaaagagaccaatttccgcagtattattcacatgtattccaccgcacaattctattgaaaatggtgccatattgacaacgcgaacaatatctccatatttttcaccaaataaagccatagcgcctattgatttggcttcttcaatactcatttcttgaatacggacgtcgatagctctccaaatttcttcatttactctacgttctactaaattaatttcttcttgtgtcataggaccaaaatgtgagaaatcaaaacgtagtctttcaggttctactaacgaaccagcctgattaacatgatctcctaatacttcttttaatgcagcatgtaataaatgtgtagcactatgatttttttgaataagtcgtctatcctctttgttaacacgtgcttctactttcgcgttctgtgttgcttcaccaaattgcacaatacctttgtgtaagttttggccattaggcgctttagttacgtcagttacatttatttcaaagctctcattaccaactgttcccttatctgcgacctgtccaccacttactgcatagaaaggcgtttctcttaaaataaagtaaattgtttctcctgcttcaacatgtttaacttcttcaccattgtatatgatatgagttattaatgattgatagtccgtagtttcatagccaacaaattgactttcatcttgaatattttttagtacttcactttgaacttgcattgattgagaattctgtcgagcttgtctagctcgatctctctgttgttgcatttcctgttcaaaagtaggcatatcaacagacaaattttcttgagttgctaattcttcagttaattctattgggaatccataagtatcatataacttaaaagcatcatgacctttaataacctgatcactattcttcgcttcttttatcagttcatttaaaatcgtaagaccttcctcaagcgtttcatggaagcgttcttcctctgatttaatgacacgtttaataaagttggatttgtctttgacatttggataatatggttccatgatatcagcgactatatcaacaagtttatacataaatggttcattaattcctaatgattggctaaagcgaactgctctgcgtaataatcttcttaatacatatcctctaccctcattagctggtaatgcgccatcagcaattgcgaaagaaatcgttctaatgtggtctgcgataactttaaatgcaacatcttgtgcatcatcaattaaatatttttttcctgaaacatgttctacttccttaattataggcataaataagtctgtttcataatttgttcttacattttgtgagatagacgtcatacgttctaatcccatgccagtatcaatatttttatttggtagtggtgtgtaagtattgtctttattgtgattaaactcactaaacactagattccaaacttctaaatatctttcattttcaccaccaggatacatttcttcagcaggatcatcttttccataagccgatccacgatcatagaaaatttctgtatttggtccagatggtccttccccgatatcccaaaaattgccttctattcgaatgatgcgactttcctctaaaccaatgtcttcatgccaaattctaaaagcttcagtatcttcaggatgaatagtcacatatagcttctcaggttccatgcccatccatttatcacttgttagaaattcccaagcaaattcaatcgcttcatgtttaaagtagtcaccgattgaaaaattacctagcatctcaaaaaaagtatgatggcgagcagtaaaaccgacgttttctatatcgtttgttcgtatagctttttgagaattgacaattcttggttttttaggagtttcgcgtccgtcaaagtattttttcaaggtagctacaccagaattgatccacaataatgaatcatcatcgataggtacaagtggtgcagacggttcaatcatatgtcctttttctacaaagaaattcaaatatttttgcctaatttcactagctttcatttttttcataaataaaaactctccttcatacgtttttgttatcgcagttagatagtcatagttgagtattattcaagaatataaaaacgttcatccacaaagggacgaacgttatcgcggtaccaccctagttataagaattgtgacctatttacatacttgaattttgtttgtctactatttcttatcactttgtatactttatttaactaatatagagtagcattcaataattttgtttgta

SEQ ID NO: 3743 - DNA, 3240 bp, Artificial Sequence
  Description of Artificial Sequence: synthetic nucleic acid sequence
atagatgacgcgaaaaaagctttgaatgagactaaatatcaaactgcaggtaaatataatggaacaacatatgaatttaagcataaagttcaaataagagattattatggttctttagtctatgttgttaatgatcatggtcttccagatcaacgcacggtcttatatgtacatggaggcgcatggttccaagatcctttggaaaatcattttgaatatttagacttactcgttgatgcgctcgatgctagggtgattatgcccgtatatcctaaaataccacacagagattatcgtacgacatttgaattattaacaaaaatatataagcgattattgactaaaattgatgaacctgaaaacttggtcatcattggagattcagccgggggacaaattgcattagcttttgcacaaatgttaaaaaaagagcaactcagtcaacctggccatattgttcttatttcaccggtgcttgatgcgacatttaagaatccagaagcaagaaaatatgaaaaagaagatccaatgcttggaattgaaggcagtaaatatcttgtagagttatgggctggtgatgcaccactagatgactataagatgtctccaatgaatggtgatttagaaggcctaggacatattacacttactgtaggaaccaaagaaacattatatcctgatgcagttaagttctctcacatgttaaatgataaaggaataaagcatcagtttatcccaggttacaatttatttcatatttatcccttattccctatcccagagcgtcaacgctttttagaacagcttaaaaaaatcattgtcacaaaagagttataatcaaatgagatgtggatacttaatgaaagattataattatgtattcccaaaaataaagcgaactcttgttatcaatagtattgataactcgaattcgcttttttaatttgcttattatttttaaatgcttcgtttatgttaatagctttatattcagagtttgcaaatgagtgcgcttttgtattgtttgactcattatttgatgacgtaacatcttcgttactgtttcttgaagtattgttgatacgagagtgatcagtatctaaaacagaattactcatgtctttaccatttaagcttccaataagtataaatgcgaggtaaatactacaaataattaaaataattgctagatagatgccaacagcaagtttaactgacttctccatacctctcctcctaaagtcgtaatatctttcatatataatgtaacatcgttgttttaatctaatgtaaattataagtaaatttattatgacccaactatgataagctataattattgtgattaacgtaatttaattctgtgaaatttaatttgtattcacaaaaaaattgttattatggtatgaatttacataaatttacgttaacataacattgatttaaagtttttaaaactgaatcaatatcgaagtgatagtctactactagcaaaagattaagccatttatagtagatgtcttaaatatgtagaatattaaattaacaaatggttagtttatttatatttgatgatttaaggttatttaactatctttaaaatttacaatttaatattaaaaagatttataagtatcatgatttacatacataagaaaagagaggtaaagcagattgttactcattatagcgtgtgttgcgcttattctttggctaggaattaaagagaagaagcgtcatgcaaatcgacttgaaaaaattccattacgtattaacataaatggaattcgtgggaaatctacgattactcggatggcttacagtgttctacgtgaggaccagtatagagttgttggtaagacaacaggaacagatgcacgaatgctctattggtttactgaaaaggaatatccagtaatcagaaaaccacaaggcgccaacattggagaacaacgagatattattcgtaaggtggttaaacaaaaagcaaatgccctagttaatgagtgtatggctgtaaatccagattatcaaattacctttcaaaatgatttagtaaaagcaaatatcggtgtaattgttaatgtgatggaagaccatatggatgtcttaggaccgacacttaaagatgtagcgcaagcttttactgcaacaattccatataacgggaaattagttgtaatgaaagataactatactagtttctttgcaaaggaagctaaaaagcgtaattcagaactcattgttgtagataaagacgtcataccagaatcatatttacggaagttcgattatttagtatttcctgataatgtagctattgtgttaggaatagcgcaagcagttggtgtagatgaagaaactgcattacaaggtatgttaaatgcaccagccgatccaggtgctgttagaattaaatatttccatgcaaatcgcacaaaaaatgtatttgttaatgcattcgctgctaatgaaccgcagtctacaaaagcgattttaaataaagtggaatcatataattatccatacgataagaaaataatcattctcaattgtcgttcagatagggttgatagaacacaactctttgttgataactttttaggtgaagtcgattacgatgttctcatttgtacaggaaaaagtacacaaatggtgacacagtttatggaaactatgccagaaaaaacatatatcaattatgaaggacgagactttgtagagattgaaaaaggtattctacatgaagctgagaatgcacttgtattttgtgtaggaaacatccacggcccgggtggtagaatagcggaattcatagaagggatagaataaaatgataggttcagaattatatttctccttattcgtaggtgtcgtactcagtttgatatttgctgagaaatttgggattaatccagcagggttagtcgttccaggttatttagctttgatttttgatcaaccgatcatgttgttatcagtattaatcattagttgcttaacttattttatcgtaagcaacggtattagtaagtgggttattttatatggtagaagaaaattcgctgccatgatactgacgggaatggtgattaaatttatatttgatctcttgtacccattgaccccatttgaaatggttgaagtttcaggtataggtgttgtcattcctggtattattgcgaatacaattcaaaaacaaggtgtagtcattacactttctacaacaatgttattaac

SEQ ID NO: 3744 - DNA, 3021 bp, Artificial Sequence
  Description of Artificial Sequence: synthetic nucleic acid sequence
aatatactatgtcggtatggatgggcttcaataaggttaaacaatatggaacaaattcatttatcggtcattcagaacaagattatccacaatacttgtatgaagatgtgatgtctagtatctcatctaaagatggtgaagatttcaaaaagcctaatgatgtacaaggaagttcaccggacagtctatctgtatcaggtcattctgataataatactactaaccgtagtgttcatggaagtagcgatacatcttcttcatcaaatggtggctctaactcagcatcaagtggaaacaactcgaatagttcgaatggtaccagtcaaggtaactcaggcaatgcatttacacgtctgttcaatttaaactctatattcgattataaagtttcataaataaataaacttaaagctccaatttcaagaaaatgaaattggagctttttctgtcttagaaaagtaaatttagcatgtgcaataataatctaagttctctagttattaattaatttgattaactacattgtatgtgaagtgtaaatgttgatataggtataaaatcgaataattaaaattaagtataatttatttttgttgacgttgctttctaattagataagatgcattcatttttattaattctgatttcaatgttttcatttgacgatagcccataaaatggtgtttacgtgcaaccatataatgatagcgttcatcaaaattcattggaactactggatatgtatcgagttgattaaaatgaatttcatctatgttatttatttgtttaaaataattaataattaaatcgaaataactatctaaaagttccctagcttctggtgttttgagttgtttattacttgctagttgatcaagttggtcctctatatgattgaaatcctgtttttcaatcatatcatcacgcctcctttatctttgctttatgtcgtttttgtccttctctacaatcatttaacagcggacatatctcacatttaggttttctagcaagacaatgatatctcccaaaaaatattaattgatgatggcttttattccatctatctcttgggataatatcacataatcgatcttctacttgtcttacactatctttccaacgattaattcccaaacgtttagaaactctctcaacatgagtatcgacagctaaagaaggttctccaaatgcgacactcattacaacatttgctgttttacgccccactccagctagactctctaattctttatgtgtttgtgggatttgaccattaaattgttcaattaaagagtggcataatttttttatatttttggctttattgcgatataatccaatagagcgtatatcattttgtaattcttcatcactcacatttaaataatcttcaggtgttcgatattttctaaataatgattgagtgacacgattgactagattatcagtacactgtgctgataataatacagctattgtaagatcgaatgcatttctatggtttaattcgcattctgcattaggaaacatatctgctataacgtcaatcatttgtaatgcttttttcttacttatcattaggattctctccattcaaccagtcaaatttaggcacctttttaacaacatgtttcatttttggtttgttaaactgttctcttattttctttgaatcgtcaactgttttcacattattctttttccaatttaataaaatacgatcaatatatttaaaactaagtttattttggctaagtgcctcatcaagagcggcttgtataactgataagtcatggtgatcgacatcaatccactgatttaatgtttcaatttcatacggcgatagtggtctgccgaacgattgctcaactatctgaaacaattgcttaaactgctcttttttatcttgttcctcatgttttaagtattgatgttttaataattgatttaatttgtgatagaagggatccaaattcatgtattcagtgaatttaccttcttcgtctttactaacattgagttctaataattctctttgaattaagttttgtattacggaagtaatttgacgaggttccatagttgatcctttttgaagaaattcaatagaaggttgcttattagaagtttcagatgcatataaaagttttatcaaaataactaaatcttgttcatccaaacctaactctgaataatgatcaaacaattctcgtcttataacaacaggtcttgtttttaattgaattagatccataatattactacctcctatttaaaatgaacgtccagccttaaagtgactggacgtttcaaaatggcattttgaacataaatatgaataatcaattatggatataagcgattaagtaaacgtgggaatggggatgtttcacgaacatgttcaactccagaaatccaagctactgttcgctctaagcctaagccaaaaccactatgtggtacgctaccatagcgacgtaaatctaaataatagctataactttcctcatccaattcgtgctcattaatgcgttgttctaataattctaaatcattaatacgttcggaaccaccaataatttcaccgtaaccttcaggcgcaattaaatcagcacataatactgtatcttcattgtctggatttggttgcatatagaatggtttaattttagttggataatttgtaatgaatactggtaaatcatagtgattagcgatggctgtttcatgaggtgcaccaaagtcttcaccccattcaatatcatcgaatccctcttttttcaagaattcgatagcatcatcataagaaattctagggaaaggtgtagcaactttttctagtttagttgtatctctatctaaagctttgagttctaattggcaatgatttaaaacagattgaacaatgtgagacacatactgttcttgtatttctaagctttctgcatgatttgtaaaggccatttctggttcaatcatccagaattcaattaaatgacggcgtgttttagatttttc

SEQ ID NO: 3745 - DNA, 3314 bp, Artificial Sequence
  Description of Artificial Sequence: synthetic nucleic acid sequence
tattaaagatgcatttgctaaagtaaaagaaaacgaagaatcaaaaaaattatttgatgaattccgtgaaactcaaatgagcttccaacaaaaacaaatgcaaggggaagaaattcctgaagaagatttacaaaaagctcaagaacaagctcaagctatagaaaaagatgaaaatatttctgaattaatgaatgctgagcaaaaaatgagccaagtattccaagaaattaatcaaatcatcgtaaaacctttagatgaaatttacgctgactaatagttaatcaatatctactttgattgagcctgggacataataattgttccaggctttcttatttatattttattatttttaaatccatggattcttcatcgactgtcaacaaacagatatggtaaaatgaaagaatataaggtaaagttatttctcatcattcatactgtaaaattttagtttatatactttatgcatcacattaatgtataaacaatcttgtacattttttcaattaactttgcagatattctaaggagaatcaaacttatggttaaatttatacactgtgctgatttgcatttggacagtcctttcaaatctaaaagttatcttagtccaaatatttttgaagatgtccaaaagagtgcatatgaaagttttaaaaacatagtcgacttagctttaaaacaggaagtcgattttattattatagcaggtgatttatttgatagtgagaatcgtacattgcgtgctgaagtctttttaaatgaacaatttgaaagattaagaaaagaacaaatatttgtttatatttgccatggcaaccacgatcctcttacttctaaaataacaagtcagtggcctaataacgtatccgtattttcaaatcaagtagagacatatcaagctatcactaaatcaggagaaacaatttatattcatggattcagctatcaaaatgatgcgagttatgaaaataaaatagacgcatacccatcaagtcaaggtcagaagggcatacatattggtgtattacatggaacttatagtaaatcttcggtgaaagaccgttatactgaatttaggttagaagacttaaatcaacgtttataccactactgggcattaggacatatacaccaacgtgaacagttaagtgacatgccagtcattaactatccaggtaatatccaaggaagacatttcaatgaattaggagaaaaaggttgtctattggtcgaaggtgatcatcttaaactcactacacaattttatcctactcaatttattaaatttgaagaagctacaattgaaactgatcatacatctaaacaaggactttatgatgttattcaatcttttaaagataaagtaagaactgaagggaaatcattttatagattgaacgtacgcattaatagtgaagacattattgcaccacaagatttaattcaattaaaagaaatgattactgagttcgaagaaaacgaaaatcaatttgtttttattgaagatttaaatcttcaatatgttcaaaatgacgaaatgccaatagttaaagagttttcaccagaattacttgatgatgcgtcactttttgattcggcaatgactgatttatatcttaatccaagggcttctaagtttttagatgactataatgaatttgataaagttgagttagtcaatcatgcagaaagacttttaaaggatgaaatgagaggtgaacaaaatgataattaaatcattagaaatatacggatatggccaatttgttcaacgtaaaattgaatttaatcgtcaatttactgagatatttggtgagaatgaagctggtaaatctactattcaagcatttattcactctattttgttcggatttcctactaaaaagtccaaagaaccacgtttagaaccaagattaggtaatcaatatggtgggaaattatcactcattttcgacgatggcattgaagcagaggttgagagaatcaagggaagtgctcatggagatgtcaaaatttatcttaaagatggtactattcgagatgaagtttggctaaataaaaaacttaattacatttcaaagaaaacatatcaaggtatattctcttttgatgttttaggtcttcaagatattcataaaaatctagatgaagagcaactacaagattatttattagaagcaggtgcacttggatcaactgaatttacaagtatgagagatagaattggacaaaagaaagaagaattatataaaaaatctggaaaaaatccaattattaatcaacaaattgagcaacttaaacaattagaaaatcaaattcgaaatgaagaaagtaaacttgatacatatcatcgacttgtagacgataaagataaatcatcaagaagactagaaaatttgaagcaaaatttaaatcaattatcaaaaatgcatgagcaaaaacaaaaagaggttgctctacacgatcaaacacaagaatggaaaaggttagaacagtcgcttaatatagagcctataaattttcctgaaaaagggatagatagatacgaaactgctaaatctcacaaacaatcacttgaacgagataaaagtttgcgagaagaaagattaagcatattaaataaagaggcggagtccatcaatccagtagaccaaaagtatattgattcgtttaatagcctttatcaacaagagactgaaattaaacaaaaagaatttgagttacgttcaatagagaaagatattgctgataagcaacgtgaactagaagctcttcaatctataggtatcgtatttggcattgtattacacctcatatatggtgcagagtctaaaactctcgaacaatcaacagactggtttagtattgttggagatggttatgttgcactattacaaatgattgtcatgccactaatattcatttcaattgttgccgcttttagcaaaatacaaattggtgaaaaattcgctaagatcggttcttatatttttatgtttttaattggtactgtagccattgcagctatcgttggaattttttacgctttgatctttggtttagatgcatcgtctattgatttaggtagtgcagaacattcacgtggtacagaaatttcaaaacaagccaaagatttaactgcaaacactttaccacaacaaattctcgaagtattcccaagcaatccatttttagatttcacaggacaacgtacaacttcgacaattgcagttgttatttttgcaacgtttgtgggctttgcttatcttagagttgcaagaaaacagccggaacatggaagcttactt

SEQ ID NO: 3746 - DNA, 3314 bp, Artificial Sequence; identical to SEQ ID NO: 3745
  Description of Artificial Sequence: synthetic nucleic acid sequence

SEQ ID NO: 3747 - DNA, 2926 bp, Artificial Sequence
  Description of Artificial Sequence: synthetic nucleic acid sequence
cttctgtaataagaacaccaggcatcacagcgtaattagggaaatgtccctggaaaaatggttcattacctgatacttgctttagtcctacacaccttttaccttcttcatactctacaattttatctattagtaaaaaaggttgtctatgtgggataatttgtttaatttgattataatcaaaaatcgtttccatttttaaaacctccgagcttaagctgtaataatattatcgatttacacgttctatgtttgcacctagactttttagttttccatgtaaattgacgtatcctctatctagatgctttaactcagtcacttgcgtagttccctctgcaactaaaccagctaagattaaggctgcagcagctcttaaatctgttgctttaacttgagcaccttgtaaatggctttttccttcaattttagcacttcttccttcaacacttatattcgcattcattcttctaaattctgcaacgtgcataaatctattttcaaaaacagtctcagtaatcactttgtgtccatttgctgttaataataaagccatcatttgagattgcatatcagttgggaaacctgggtgtggtaaagtttttacatctactggatttaaatctccatttgctgtaactcttataccttcttcataatattcaagatctacccccatctcttcaagcttatatattaaactagccatatgttctttaattgcaccacgtacaaatatgtcaccacgagttattgcacctgcgataagtaacgttccagcttcaattctatctggtataattgcatgttcaacaccgtaaagtttttcaacaccatgtatcgtaatggtatcagtacctgcacctgtaattttaccgcccatttcattaatataattagctaaatcaacaatttcaggttctttagcgacattctcaatgatagattttcctgatgccaaggacgctgccataataatattttgagttgcacctacactcggaaaatctaaatgaatatgtgctccctttaatccatctttagcatttgcataaatatttccattttctaaatgaatgtctgcacctaaagcttcaaatcctttaatgtgctgctctataggacgtgttccaatcgcacatcctcctggcaaagcaacaatagcatgccctagtcgagcaagtagtggtcccataaccaagatgcttgctcgcattttactcacatattcataaggggcttcttcatttaaagttttagttgcatcaactttaactgcatttttatctttatcatactctacatttgcattgagtgtagataatacattattgattgtttcaacatcgcttaactctgggacattaactagtttactgtgtccttcagaagcaagtaatgacgctgtaagtacaggtaatacagcatttttagctccttcaacattaacttcacctgttaaacgatttccaccatttattactattttatccatctttaatcctccacttaaaactctaatcagttatacatttcccaacattttaattaaatattcgtcatatgatcatatttaacttataaattaaataacaattacatagttattttatcaagtatttcacttgagttgaatattgcaataaatcaactataaagttactgactgccgtacccagtaaaatagaaataaaaatcatacaaacttgaacttgtaatgggtagccctttttaaaaaattggtctaattttatggaatttaaagcccaataagctacgcaaatacaaacaacatgtaagattaaatgaacaattgcgaactgaccaagataatccatattaagctccttcgtaagattactgtataacattgtacacgaaaagaggcaataaagatacttataaaaatggatattactttttaacattttaaaatttaaaaaaaggttcgatagtcattaaaatatactatcgaaccttttttaattattgtaattctgcaacacgtaaacgattatttgctcgttcaagtgctcttttagctctatttatgtctgtattatcatcatcttcttctaaatgtgattctgctctcgacttagctaatttagctctttcaacatcgatttcactagcaggttcggccgtttggacgataattgataattgatgttgtcttgcttcaataaagccatcacttactgcaataaattcatttccgttgtgaaaattaactttcacatgacctgtttttaatgcagcaacagttggaatgtgaccatacataatccccatttcaccagctgttgtttgtaagacagccatctcaacgtcttcacgttcatagacagaaccattaggagtgacaatatttagtctaagtgtattcattatccatacctcctaattattagacttcaacacccatatcttttgctttctcaattacgtcttccatgctacctactaaacggaatgcgtcttcaggaatatggtcatacttaccatctaaaatatctctgaagtctgcaactgttgttttaacaggtacatatgaacctttttgtccagtaaattgttctgcaacgtggaagttttgtgataagaagaattgaattctacgtgctcgttccacagtttgtttatcttcatctgataattcatccataccaagaatcgcaataatatcttgtaactctctatatttttgtaaagtagattgaacttcacgtgccacatcataatgctcttgacctactactgaaggttccaaagctctagatgtagaagcaagcgggtctacagctggataaatacccatttctgttaatttacgctctaagtttgttgttgaatctaagtgtgcgaacgttgttgctggcgcagggtcagtatagtcatcggctggtacgaaaacagcttgaat

SEQ ID NO: 3748 - DNA, 3055 bp, Artificial Sequence
  Description of Artificial Sequence: synthetic nucleic acid sequence
aggttggaacatccatcgctgctgtggctatgtatatgtcgtaatgctcattgagttgttttacaacttcttgagcatgcggcattacatctaaatttctaaagaatccaggttcttttaaaatatccatgactaacccctcatgctcgggtatcatatgttttaattttttaccgtttaatgattccattttgatatttaaatccgctcgttcattgaccgctttaacaacagcacccaatgtatcagcaagcacttcatccatatcaatggcgattctctgtcgcgtcatgctcttacactccctgttcgtgatatacgtgtttagtatagcaaaattttttccttctgtttaatctatttaactacgatatcacatcttttttaaatcaaaagttatcaaagagtgttagtttaatactcaaaatgttttaaaacttcaatcatcttattattttgttctggtaaaccaatagtaattctaacaccgttagggaataaacgtgtaatacatcctacgtttaacaatgcatcataaagtgcttgacttcttgaagttttaacaaagacaaaattcgcttgacttggtaaaaaatgctgactttgaggaatttgataaaatttatctcgttcaaaactatttttttgtgtcacttctttcaaatactcttgatcttctaaggcagcgattgctgcatattctgaaattctagtaacattaaatggtggacgaatgatattccacttttcaatggcgtcttcagaggctataacatatcctactcttaatccagctaatccatatgccttagaaaaagtacgtaataaaaaggcattgtcaaaatcctcctgtaattttagcgtatctggaaaatcatcagcagtaacgaattctacatatgcttcgtcaattaatacaggaatatcacttgggacacgttttaagaaattaaataattcatcgtgcgaaaagtaagtcccagttggattgttaggattgcataaccaaattaaagacgttttattatcaatttgttgtaacataccatctaaatcaaatccaccatctttgagaggcacttggataacatcagctgattccacaattgcattatgataatattgtccgaaagtagattcactagtgataatcttatctcctggtgataatacggctcttgatatcattagaataacctcatctaaacccgcaccaaataaaatacgagatgcatcaacattaagttgttgacttattgcttcccttaattttggcgatccagattccggataataatataattcatctaaatgagattgaatagccgttttaacttttggacttggaccatatacattttcatttgaagcaagtttatgtaattcacctttaatgccatactgtttttttaaagattctggagaaagccctggcgtatatgctgttaattggtctaattgtttcttcatacataaatcacaccttaaattgactgaaattttaaaaaacttagtacctattataaacaaactcataccttaaaatcaatcacacttctaacattacattttaaattcactatatcggttgaaatagttaaattataaatagctattcgatgtaccatttagacatcgaatagctatcaaatccatctcgaaacgcacaattttattttattaatttttctttttctaagtattctcttgctactttataaggatcctctttcttcactgttaccttatagttcatttcttgcatttcttcatctgtgattctattcgccaatttattgagcggttttttaacttcaggatggtcttttaaatatttttctttaaatagcggtgctccttggtatggaggaaatacatgttgatcatcttttaatactaccatgttatattgttttaattctgcatcagtagagtatgcgtctatgagattaatatctccctttttaactgcagtataacgtaatttaggttccatagttttaacattagaaagattaagatgatacgtttttttaacagctttgtatccatctggtctatcattaaattccaatgtaaaacctggtttaagtttatcttctaccttgcgtaaatcacctattgtcttaatttgatatttttttgcaaagtcacgttttacagctaatgcatacgtattattatatttcatcggtttaagcattgtcatatcatattttttttctaaactagactttgcttgttgatatacatcgttttcttttttagactttaaatcttctttcgttaattcacctaatacagtacctgtaaattctaaataaccatcaatttcatctgacttaagcgcattaaataagaatgaggttttacccatgccatctttgacttctacagtatcatctgtgtcttcttcaataagtattttatacatattcgtaataattgacggttctgaacctagcttgcctgcgaatgtgattttatcacctttttgcgctgccataggtatggcaatagctatgataatcacaattacaattgtccctaaagaaatgagcaattttttatatgataaacgttccatgtatcttaaaataaaatcaaaaataatagctagaagtgcagctggaatagcacctattaaaatgagtgcactattgttacgatcaatgcctaataatattaaatctcctagaccaccagcgcctattaaagctgcgagtgtagcagtaccaatgattaataccatagctgtgcgtattcctgccatgataacaggcattgcaatagggagttcgactttggtcaatcttctaagtggtttcattccaatgcctttagccgcttcaataagagagggatcgacctccttaatacctgtgtatgtattacgtagaataggaagtaacgcatatacaactaaggcgataattgccggaagtctcccaattccgaaaattggtatcatcaaaccaagtagtgccagtgatggaattgtttgtagaacagctgcaatattcatgacgatttctgaaagtttttttgttttagt

SEQ ID NO: 3749 - DNA, 3130 bp, Artificial Sequence
  Description of Artificial Sequence: synthetic nucleic acid sequence
tgccccatcatctgttttaaattgaatacctactgtattatccgtttcattatcgaagaaccctgttacaaaaaatgcataaggtttatttttaataccatgataatcttcaccgttgagcacttttttgattgcagactgacttatagtatttttacgaaaagtttccccataaaaatgtttggttccatgttcgttgacagtcataatttgataattcatttgacctaaatgtttcaaatacgtatctagaggtttaggtttttgtgttctttcatattcacgagcttctttgagtgtacgcataatttttgcatcattagaagctttcaaatgaaagtgataataaatattcgtaaaaagaaaactcattaatgcactaaacaaaatgactgtaattgcatatatagcaattctcgaatataatgttttaaacattttggtccaccctatatccttgacctcttacagtttgaattgatactgatgatttcaatttagataaacgttgacgtaatcttttaatatgaacatcaacagtacgatcatctccttcataatcgaagccccaaattttttcaataatatcatctcgagtgaaaatatgtttaggattagaggctaataaaaataacaactgaaattctttgtttggaagattcatcgtttttgaacccacagtaatttccatgtaagactgatttaatattaagttgccaagttgtaactcgttatcagcattaatttgatatcgtcttaagacagctttaattctaaataataattctttaacctcaaaaggtttagtgacataatcgtcagtcccacttagaaatgcacgttctttatcacttaatgcatctctagctgttaacattatgacaggaatatgataatcatctttcaaagtctgacaaagctcaaaaccatccattccactcatcataatatctactatcgcaatatcaacatttttattttcaagaaaatctagtgatgcttctccacttgtgaaagtatgtgtttgaatactttctctttctaaatgacttgaaacatattgcaataactttttatcatcgtctacgattaagcaattaatcatatgtttacgctcctatactttttaatgattatactacgttaaaacaaattatgaacaaaatcacacttgttcatattgagttcatattttcctcttaaacttaacatataaagaaatgggagaggatatcaatgaatctagacaattcttgttcattcaaagcatcaaccgagcgaatacgcagcgattgcacatcagttgatggcgacaacacatgtgtgttgtgaacaagtagggttcattgaatcagtaaactatgaaaatggggataactatcacttggtaatgagtggaaatgaattttgtggtaatgcgactatgtcttacattcactatttaaaagaacgtttattgatacagcatcaacaatttcaattaagagtttcgggatgttctcatcctgtagagtgtaaagttcattcgcaacattatgaagtgactatgccaaaagtacatcaagttaaggaaagatttgtgaaattaggggaccaacagtttaaagcatttgaaattagatacgatacatacattcattacgtgttgatgtgtgatggtgtagatttagcaatgaaacagcgcgtggaagattttgtcagtgcgcaaacatggcatcaacaatttaaaacgattggcgtcatgctttttcaacaagataaacaattcatatatccactgatacatatacctaaaatagatagcttaatctgggaaaatagctgtggttcaggagcggcttctatcggtgtgttagttaattatctaacagatcatgatattcaagattacctagttaaccaacccggaggcagtattattgtctcatccagaaagtctggacaaaatgaataccaaacaacgattaagtgtcaagtttcaactgtcgcaacaggacaagcatatatagaacaggagacaatgacgcaaatatgaatgatcatacaaaaatagagaaccaattacaatattatttagaacaatttacgtacttacatcaactcgttttggaagatagtcggcatattgttgatttagaaaatttgattgatgaatacagtcaatggatacttcaacctttggcagagcatcactatttaacatggaacgatttagaaacaaaaatgagcttaaccaagaagcttcaagaggtatcagcaaaatgtgtgaaacaagtagaagtcattcgcgcacaacgtttgttgaatggtagggcgaccacgtcaggttatttcgaaaatatagagcattgcattaatgaagaattcggaagatggcaaattggaaaaaatgacaaattattactgattggttcgggtgcatatcctatgacattgattcaagttgctaaagaaactggcgctgcggtcattggtatagatatagattcggaagcagttgatttagggcaacgtgtcgtcaatgtactagcgccaaatgaagatatcgttattagtaatcaaacagttgatcaattagaagacatccaatctgtgacacatattatattcagttcgacgatacctatcaaatatgacattttgaatgaactttacacattgacgaatgatgaagttgttgtagctatgcgatacggtgatgatataaaagcattgtttaattatccatctcaagcaactgacgaaacacagtggcgatgtgaagaactacaaacacgaccgaagcagatttttgatattgcactttattgtaaagtggcatcaaaagttggtgttgaacatgtctaaaatattaatggttggtagtggaccggtcgctattcaacttgctcgactatgtcatttacatggagaacatatagttgatatggtgagtcgcgttcatgcatcaaccaaatctaagagagtctttgatgcttatcaacgtgacggctttttttcagtaatgactcaaaatgatgcacatcagtgtttttcaggtaagtttacggttagacatttttttaaagatgttaaagatattactgaatattatgacgtggtgattttagcatgtactgccgatgcgtat

SEQ ID NO: 3750 - DNA, 3068 bp, Artificial Sequence
  Description of Artificial Sequence: synthetic nucleic acid sequence
ccatatttattcgcctcctttgataaaaatgctacactagtattataaatacaattgtagacatcgatagattacatttcaatttattcgttttatagagtgagggtttaatttgtacaatatactatcatacgctatgagtcatgcatttaactacaaaaccaataaaagtatctataatattttaacaggcaagaagtcacaccaaacgtttttcgatgcgtcaagccaacaacttttgtcattatatcatagtttacctaacttaaagtattcaacttttgagcaatttatactccaaaaggatgattttaaaaaatcaattcaagtaaaaatacatccacaatacacttatgatagtctcactcaaacctttagttgcatacaattacttatccaaacgttatctcatacacgcaaggagtcaaatacatttattccaatcgttcaaaatacctatatccaacaaagggttaaacaactttatcatcaggtcattgaatcaaatcaagtatcaaatactatagacgaaatatatttattatttgagaatttaaataataaatataaccatacatttcttcattattatttacaaggatatgaggaatccatgtatactagacaacaaataagtttaattgagagtataccacaatcagaattatttgaacgagaaatgaatgaactgattgacatattgaatcaattaaaagattcaacgaaatatccaatactttctcaagctatcattctttcaccattactaacaaatacatacttaagctatcaaaagttaaaatctggtctcaatttaaaagaaattgctcaattacaaaatgtaaaacttaacacaattgaagatcatattctagaaatgtatattaaaggttatttgatagactatacattatttataaataaaaaagatattctcgaatttataaactactatcaaaaacatcgcggtgaacgattaaaattttataaagaacattttactgattggacttactttcaaattaagttagttatagtaggaatagaaagaggtgatttaattgctgaaagataatttaaaggaatggtttggttttgatgaatttaaagaggggcaagaagaaattattgatagtgtccttcatggaaggcatacacttggaattttaccaactggtagcggtaaaagcttatgttatcaactccctacatatatattagaaaaaccgacattaattatatcaccactcatttcgcttatggatgatcaagttatgcaaatgaagttaaaaggtgaaacacatgttgcatgtgtacattccggcatggacgaagtagaaaaaagagacaatattaaacgactaagtaaaagtcgatttatttatttaagtccagaatatatactgcaacctcataattttaagtacatcgctcatatcaactttggattaatagtattagatgaagcgcactgtttatcagagtgggggtatgattttagacctcactatgctttagttggtaaaattattcatcattttatcaaaacaatataattgaaataaaaaagagtctggacatccatctaccttgtgtccagactcttaatcatgctcatagtattttattgattcaatcatcatcttatttatatcttttcaaacctttttgatttcaaaatcgataatgacactatcacttgagaacgaattccatctcatttcttatacatttgatatcgtattttctttctcatttatcatttctataatttcattattttcatttaacacagctacttttggtgagtgatctaccatttcatcttcatttaattgtgcatagccagtaaatgagttttcataaattcatttactggcatctttatttacaatacttcgttttgttggctcgctttcttaggggacagcttcagcctgtagtcttcagcttgtcctgttccctcaagagtctcgccaaaatactttgtgtttatatgtaattttattttgaaatacttaaaaagtaaggacctttcgtataatttaataaataccaataaacaaaattaacgaggtgtcttatgtataaagactataacatgactcaacatactctactaatggaaacttcagttcttatccccacaaatgatatttcacgacatgtaaatgatattgcagaaacaattcccgatactgaattcgatgaattcagacatcatcgtggcttaatataagaaaagtaacagctcaacgagttgaaaatcatcaaaaaattataaaaaagacaattcctatattatttcaatagaaattgtctttatttacttatcttggaactttttgtcccagcctttttcctacgattagtcaagtacttataattaaaataagcattacttaactaaaccgttcattttaatttttttgaataaggtgttaaactatatttgattgtacgtttggctaatgtggtgacatttgataatcgtacaatttatgattcattacaagataatgaattgtttttaataatcgatttatacaagcaatgatggcagtcttatgaggtttctcattaggctgctttcttagtttgtagtaataatcgacgacatgattgtcataatgatgctgccctcttattatattcataatcacccaaaataaaagttttctcgcttttttattaccacgcttgttgatggtatctctacagtgtgtatgacctgattgatatcgtttgatatcaatgccaacaaaagcattgagttgtttatttgatttaaatcgcttaatatcaccaatctccccaataatcatagctgtgcttagcttaccaataccaggtatcgaatgaatattttcaaaataatcgagttgttgtgctaattgaatcatggcatcatctaattgtttgagatgatgaatagattgttttaattgttgaataagtaagcgtaatttttcgactagaaaggaatgtctatcgacactaggatagctttcttgagcaatcacccttaattgaagtgcatattttgtagctttatccattgacattcc

SEQ ID NO: 3751 - DNA, 3881 bp, Artificial Sequence
  Description of Artificial Sequence: synthetic nucleic acid sequence
attatttttctggaatcttcatttattaacgtacaaacgtaattaggtgttatatctttattaaatgtaatatttaatggtgaagtttctacttctacaggatgccaaataccttctaatgtatggaaccaacaaatttcttgatattttgaatcgtcacttacgatgtttatgttgttgtaattatgcataagcacacctttctatattaataaccataaattgatgcataccattcatagtgatcgccatttgatactggaatgatattactatgtgcatcttgagtcatgagaccattgtcccatgggttccaaattaaaatgactttttgtccgttgttaactttagcattaccagccacagccatggcatgtccagcgtgaataccatcgcttgattcaacacgcttacctaatacagctataccttgattattagttgttaattggtctacttcattatatgaagtcattctattaagatattgagtatttctgccttgtgatctaccaaaacgaagcatctcgttagatgttagtcctgtaaattggaagtcgtgacctcttaaattaggatgtaaatatctcattactgattctgcattatatcgatttgtattatatgtggcattgaatagtgctgacatggtatagccggcacaccaactattatacccttgtgtttctcgtattctgaaattctttaattgatttacatattctgcgtacatttcatttcgtgtactttgatattctaaagttggttttgttactgatgcagtttgtttaaaatcatttaaatctttaggtttagtggattcagtggcattttcatatgttttttcattattacgtggcgttttaagcacaagtgtcactttaccatcttcagtaagtgcaaaatatccttttgtattagtcaaaattgttatcttttgatttttatattggtttaatattttagaaagaaatggagaaacattaatggaataattgttttgctgttttgaagctttagaatttgaaggattaggagaaattgttactacataaacgacatctccttttttattgagcactggataataataattgccgtcgctttccttattaaatttataaattttaaaaggttcaccaagtgtatacgatgttgctttgtggttggaagctttatctaataaagctacacgagataaatattgttcttcagcaagtttgcgaactgcatctggaacgtctttattactgacagtgactttagttgttttttggtttgcaccattcttttgtggtaacgagtcggcgtgagcactattgaaaaataggccaagtgctaaacttagcgtaaaagcaagcataatggtaatcatataacttaattttttcttcataaaaagtactcctttacaaaagtttttgcaactctttcacatcgaatataacatttattttaaaatataattcatttatttcctaaacgttaagttataatacttatacgttaaaaatataaattgaacaaaattaaattgatataaattataatggaataatggatggatatagtgacatgatgtctatacttttaacacgactatgaagcaaatgtttataattatcacttctaattattatcaagtgctcatgcttcttcatcatgtgtaatgaaaaacattttcaatatgttatcaatcatttttaatattgtgtatacacataataattatatgtaagtattgattatttttaataattcaaaatgtaaagtttacaaagttttaataaataaactaaagtaatttatatttttatgttaatatatacataacagttatattttcatcttttataggggaaaaaacttatagaggtgatttttttgaaaaataataatgaaacaagaagatttagcattaggaagtacacggtgggagtcgtgtcaatcattactgggattacaatatttgtcagtggtcagcatgctcaagctgctgaaatgacacaatcatcatcagattttaacgaacagtcacaacaaacagaacaagttgaacacaaagaagatacaactcatttatcatacgaattgaatcaagagggtgacacagctagccaatcaaagactaatcaagagaaccaatctgatgaaaatgtacaaaaaaagaataatcaaactcaacaagattcaacacaaacgtcaccattaaatgaccaagaacaaactttaaaggggcaacaatcaaaagacaatcatgttaccccaaattcacgtcaggatacatatccaaaaggccaaaatcaagatgataaaggcaaacaacagtttaaagataatcaacactcacaaacagaacatcaacctaatactcaaaaccaaaataatgatcaagattcatcagataaaaagcaacacccatctgatcaaactcaagccccatcttcaaaaggaacacaacctaaacaatcacagtctataggagatagagataaaacagtaaaacaaccatcttctaaagtacacaaaataggtaatacaaaaactgataaaacagttaaaacaaatcaaaaaaagcaaacatcattaacttcaccacgcgttgtgaaatcaaaacaaactaaacatatcaatcaacttactgcgcaagctcaatataaaaatcaatatccagtcgtgtttgtacatggatttgtaggtttagtcggtgaagattcattcagcatgtacccaaattattggggtggtactaaatataacgtgaaacaagaacttacaaaattaggttaccgagttcacgaagccaatgtaggagcatttagcagcaattatgaccgtgctgttgaactgtattattatattaaaggtggaagagtagattatggtgcagcacatgctgcaaaatatggtcacaagcgttatggcagaacatatgaaggcatcatgcctgattgggaaccaggtaaaaagatacatcttgttggacatagtatgggtggccaaacgatacgcttgatggaacattttttaagaaatggaaatcaagaagaaatagattatcaacgtcaatatggtggtacggtatctgatttgtttaaaggtggacaagataacatggtgtctacgattactacattaggaacacctcataatggcacacctgctgcagataaactagggtcgactaaatttatcaaagatacaattaatagaattggaaaaattggtggaactaaagcgctcgatttagaactaggtttttctcaatggggcttcaaacagaaacctaatgaatcatatgctgaatatgcaaaacgtatagcgaatagtaaagtttgggagactgaagatcaggctgtaaatgatttaacaactgttggagcagaaaagttaaaccaaatgacgacattgaatcctaatatcgtctatacatcatatacaggtgctgcaacacatactggaccattaggcaatgaagtgccgaatattagacaattcccactattcgatttaacaagtcgtgtgataggtggagatgataataaaaatgtcagagtaaatgatggcatagtacctgtgtcttcttcactacatccaagtgatgaagcatttaagaaggtaggtatgatgaacctagcaactgacaagggtatttggcaagtgagacccgtacaatatgattgggatcatctagatttagtcggcttagatactactgattataagcgaactggagaagaattaggtcaattctatatgagtatgataaataatatgttgaaagtcgaagagttagatggtattacacgtaagtagcgattaaaagaacgataatagcctcattagatgtatgattgcggtacatttaatgaggttttttg

SEQ ID NO: 3752 - DNA, 3532 bp, Artificial Sequence
  Description of Artificial Sequence: synthetic nucleic acid sequence
ggcattcacttcattaccatttaaaataaggcaatcttcagtaaaatcagggtcaaatgtcacttttgtttcagtataaaatctatctaaggtaactgataaactattattcataggaataatgtaagtttcatcagctttcccccaatacttaatcatagaagtggtattgtcatggtcatccgtgatatgacaaatgaacataatcttgatcaaatgaaaaaagattttatagcaaatgtatcacatgaattacgtacgccaatctctttattacagggttacactgagtccatagtagacggtatagttaccgaaccagatgaaatacgtgactcattagcaatcgttttagatgaatctaagcgacttaatcgtttagtcaatgaattactaaatgtagctcgtatggatgctgaaggattatcagttgagaaggaattacaacctattcaacaccttcttgataaaatggagtctaaatatcgcatgcaaagtgaagaattaggtttaacaatgacgtttgattctaataatgacgaacaattatggaactatgatatggatagaatggaccaagtgttaactaatttaattgataacgcaacaagatatacacaagctggtgattctataaagatttctattgatgaagattcagatttcaatattttaacaataactgatacaggcactggtatagcaccggaacatctgaaacaagtatttgaccgtttttataaagtggacgctgctcgaaaaagaggtaagcaaggcaccggattaggacttttcatttgtaaaatgattattgaagaacacgggggacgtattgatgttgagagcgaattaggcaaaggtacttcatttattattagactacctaaatcaaaacaaattagttagaaactgaaaagtatcataaattgtcagtttcaatgattcttttgaaaacagagaaattataacgcaatacatcaaaaataatatatgaaaaacgcctgcgactcagagtgatgtctcaggcgtttttttgtatataatcagtagataactaaattgaacataaatttaattatcattttatttgaataacttctacaagtttaaagacataatttcagaatcaataaagcctatttatttatttgtaaatattttatgtgttaaaacttaaattcatgttatatattgatttcatattttgttattaatgtcaaaacattatattaaccgtaagcagaaatattgagtttttaaaactaatcatgtaatataaatttaaaataaaattgatatattcatcttcggggtagggtgtaattcccaaccggcagtaatctaagcctgcgacgacaacgtattaatttttgctttgtcttgattcagtgagagtctgaagccgacagtatagtctggatgggagaagatggaggttttttgttgttcaaatttcctccttttctaagtaagatgaatggaaggagaaaattatatatgcaacaaaacaaacgtttgattacaattagtatgttaagtgcggtagcgtttgtgttaactttcatcaagtttccattgccatttataccaccgtatctaactctcgattttagtgatgtaccgacgttattagcaacattcctcttaagtcctattgctgggattatcgttgcactcatcaaaaatattttaaattttctattcaatataggggatcctgttggaccagtagctaactttttagcaggcgtcagctttttgctatcatcatactatgtttatagaaaaagaaaaaataatcgttctttaatttatggattaattacaggtacaatcgttatgactattgttttgagcatcttaaattattttgtgttacttccattatatggaatgatatttaatttaggtgatgtgcttaataacgtaaaaattgttattgtgtctggagtcataccttttaatttaattaaaggcataatcatttccattatatttgtgctgttatttagaagattaagacatatcatcaaataaaaaacatttaaaaccttttttatttatctattataaagacaatgttcatattcaaaattggacattgtctttatctttatactattactgaagatataaagaaagtgtaactcataaaaaatttaacaatagtgagcgtaacgttttaaggtattatgtttttaaatttcttatcaaatagaacactggttttaaagagccatataaaatgtcatcattagttcctaataaacaaccccaaatgaatcatattaaacaattcatttggggatcaattcatctaatagctgattattttattgtttatggctagttaccttaaaaattaattctcatacaaattgtatactataaatagtaataaatcatttagattaatttttatgtattctaagaatcatatattattcaaatttcagtgcgtcaccatcaaatggttcgtcttcaattttgattgagtcagtaggacaaccttctagcgcatcttccatatcttcatataactcttcaggcacttcagcagtaccttggttatcgtcaaggattacgtatgcaataccttcatcatcgtaatcatatatatctggagcagctgcaccgcaagcaccgcatgctatacatgtatccatatcaacgattgtatattttgccatatttattcgcctcctttgataaaaatgctacactagtattataaatacaattgtagacatcgatagattacatttcaatttattcgttttatagagtgagggtttaatttgtacaatatactatcatacgctatgagtcatgcatttaactacaaaaccaataaaagtatctataatattttaacaggcaagaagtcacaccaaacgtttttcgatgcgtcaagccaacaacttttgtcattatatcatagtttacctaacttaaagtattcaacttttgagcaatttatactccaaaaggatgattttaaaaaatcaattcaagtaaaaatacatccacaatacacttatgatagtctcactcaaacctttagttgcatacaattacttatccaaacgttatctcatacacgcaaggagtcaaatacatttattccaatcgttcaaaatacctatatccaacaaagggttaaacaactttatcatcaggtcattgaatcaaatcaagtatcaaatactatagacgaaatatatttattatttgagaatttaaataataaatataaccatacatttcttcattattatttacaaggatatgaggaatccatgtatactagacaacaaataagtttaattgagagtataccacaatcagaattatttgaacgagaaatgaatgaactgattgacatattgaatcaattaaaagattcaacgaaatatccaatactttctcaagctatcattctttcaccattactaacaaatacatacttaagctatcaaaagttaaaatctggtctcaatttaaaagaaattgctcaattacaaaatgtaaa

SEQ ID NO: 3753 - DNA, 3782 bp, Artificial Sequence
  Description of Artificial Sequence: synthetic nucleic acid sequence
tccattcatttttagcatcttcatattgcttttcaagtttagattgcttatctcttaaattagcggcattttcaaattcttgagcatgaactgcagcatctttttcattttttactttatcaatttcttgttcaatctcttttaaattacttggcgttgtatgacttttaagtctaacttttgaacttgcctcatcaattaagtcaatggctttatctggcaagaaacgatctgaaacatagcgatcactcaatttagcagccgcttctaaagcttcatctgagatattaattctgtgatgagcctcataacggtcacgtaatccttttaagatttcaatcgtgtcttcaactgtaggttcatccacttgaattggttgaaaacgacgttctaatgcagcgtctttttctatatttttacgatattcatctaatgttgtggcacctatacattgcaattctccacgagctaaagcaggttttaaaatattagatgcatcaattgctccttctgcgccaccagcgccaactaaagtatgaagttcatcgataaatagaataacattaccagcttgatggatttcctccataacttttttcaatctttcttcaaattcaccacgatatttagtgccagctacgactgtacccatatctaatgacattacacgtttgtcttttaaagtttctggtacttcatttttaacaattgcttgcgcaagcccttcagcaattgctgttttaccaacaccgggttcaccaattagcacaggattatttttagtacgacgacttaaaacttcaattacacgagtaatttctttatctcgtcctacgactggatctaacgttccatctttagcaataacagttaaatctctagctaatccatctaaagtaggcgtgttattagacttattagcttgcgcatttttattactcatttctggacttcctaaagcttttacaacttgggcacgtgctttagtaatatttaaatctaggtttgcaaatacacgtgctgcaacaccttcattttctctaattaaacctaatagtatatgctctgttcctacaaagttatgatgtagctttcgagcttcatccatagacagttcaattactttttttgctctcggtgtataatgtagtgtgcccatttgctcttgaccgtgaccgataagtttttcaacttcttcgatgactttatcttcagtaatattaaaacttactaatacctttgctgctataccttctggctctttcattaaaccaagcaaaagatgttctgttccaatattagaatggttcaaacgaattgcttcctcttgtgcatgtgccaacacacgttgtgcacgctctgtcaatctaccaaataacatgtataaatacctcctattttatatgttctcttaataaatcagctcttttttcatttactgttctattatcatcgtcatctattaaaaatggtgactgtattgctaccattaattcattaaatttaaaattttcaagcaaaatataattcaaatcaatacctagtttcacttcgctcaaacgatatgaggcttcttccatagaaataattctactgttttgtagtacacctaatgatcgataaactctatccagtgtctctacagaattgtgtttatcaagtctttctcttatttgcttttcttcatttataatttgatttacaacttcagttaagttatcgataatgtcttcttctgttttccctagtgtaagttggtttgaaacctgataaatgtgaccatatacttgtgacccttctccgtatatacctcgaattgtaaatccaaaacgattaattgtttgtgcaattctgttcattcttttcataatggagagtccaggtaaatgtaacatcacacttgcacgcattcctgtaccaatattagtaggacaggtagttaaatatcctaaatgctcatcataactaatgtctaacgctttatctaattcatcatcaattttagaagcgcgttgatataaatcctttagcgataaatcagttcctagagcctgtattcgtatatgatcttcttcgtttatcataacacttaccgattcatcatcatttaacattactgctgaagcaggttgtttcactagttcaggactcacaagatgtttcgcaaccaatttcattttactttgttgatccatcgtatctaatcgatttaaagttaagttggaaagcgcatcttgaacttcatttatcactcgatatccttcttgctctgaagggaacataagtgggtggacatggttttcaagatttctagctaatcgaattctggaagaaataataacaggtgtctcctcagacatcttcatccactcactaatattagtatggatattactcatcatgagacacctcgctctcactttttaaagctttaatttcatcacgaacaatcgctgcctcttcaaactcttgaccatctatcaatttatttagatattttgatttttcttcaatttgcttttttattgcaagtttcttatacgatgattgtggtgtttttcctacatgttcaaattgaccaccttgaacacgttgaactatatcaatgatgtcttctttaaacgtagcataacaatcagcacacccaagcttaccaacatgtgcaatatccttaagtgtcatctgacacgttgggcattttttttcttctttaaatgccatctcatgaaaattaataccatgttttgcagcaaggtgttgaagtatctgtttcactacaaatgcttcttctatatcgtcttggtgtgtatgatacgtattatcatcgttagaatgtaaccaggggttttctccttgggcacatactgaacatacccatttttcatgcgtactatctatacctttaacagtaagtttaacttccgcttcattaaaatggcaattttcacaaagcaattttaaacacctcacctaacctagtaataattaataactggtagtaatcgttttaagatattagctctaataatatcgcgtgcaacaacatccatttttaaagtttctctatcaataatggtctgtatcattttagcttctctttcattgatcaaacctttatctaacaaaccatctatgacataatacccttgttgttgagaaatagatggacctattaattgtagtaagtgattaatataacctgtagcatctttattttcaattttagtgattcgaatgtaaccaccgccaccacgtttactttctatttcataaccatgttcattagtaaaacgtgtcttaataacatagttaagttgagaaggaacacaatcgaaacgttgagcaatatgagcgcgttgtatttctacaacatcttcatctgcttcttcaaataaccgcttaatgtattgttctatgatgtcggacatattgtgcatagatatcacctcttttttgaccttctttgactatattatatgaccatctttgacctttttcaaccaatttgattttaaaatttcaaattaatgatgttagcgtgttcattttgttgtatgatagaaaatagaaaaaatttaaaggaatgaagaaatatgcatattgtgattgggatattaggaatcattttctttttagcactcgcagttttatttagttcagacagaaaaaatattcgctggcgatatgttggattgctattagtaattcaactaatatttgcatttatattacttaaaactaatttgggaatttcagttttagagcacagtggcgatgatatc

SEQ ID NO: 3754 - DNA, 3173 bp, Artificial Sequence
  Description of Artificial Sequence: synthetic nucleic acid sequence
acgcatatagaaatcaaacaggtgatatgactgaaccatatacgattggtggaggaacatatgcgagaaatttagataagggtgtcgcatttggtgcgatgtttgcagattcagaagatttaatgcatcaaaaaaatgagtatataactaaaaagcaattgatcaatgcaacaagtatttatttagaagctatttacgctttatgtgtggaggattaatttatgacaaaagtttttataaatggtgaatttgttaatgaagaggatgctaaggtttcatacgaagatcgaggctacgtgtttggggacggaatctatgaatatatacgggcatatgatgggaaattgtttaccgttaaagagcattttgaaagatttttaagaagtgctgaagaaataggactagatttaaattatactattgaggaattaattgaattagtacgccgattattaaaagaaaataatgtagtgaatggcggtatttatatacaagctactcgtggtgctgctcctcgaaatcattcatttcctacaccacctgtaaaacctgttattatggcgtttacaaaaagttatgatagaccttatgaagaattagaacaaggagtttatgccattacaactgaagacattagatggttacgttgtgatattaaaagtttaaatttattaggaaatgtattagctaaagaatatgctgttaaatataatgctgcagaggctatacaacaccgaggtgatattgtcactgagggtgcatctagtaatgtttacgcaattaaagatggagtgatatacacgcatccagttaataattttatattgaacggaattactcgccgtgtcataaaatggatagcagaggatgaacaaataccattcaaagaagaaaaatttacagtagaatttcttaaaagtgctgatgaagttatcatttctagtacttctgcagaagttatgccaattacaaaaattgatggtgaaaatgttcaagacggacaagttggtactataacacgacaattacaacaaggatttgaaaagtatattcaatcgcatagtatttaaaatttttaaatttatagtttgaggatgaaaatttaaaataattgtcttatttcaccgtaaatctgatcttataatgtgttataatttataataaagcgatttagaaatcaaagagacattagactagtaaaatgtatctttttgtttctgatttttagttgaaatgtaaccctaaaaattataaaatcttttatgagtgataaattatgaacggattaaataagtctgattaagatgggactaagtattgacttaagtagctcacataaactgttaacaaattaaatgtaaagtgtaaaaaacaaacgctttgtaaaaattagaatatatggctcacgaaaaactatttcttgagccattttctagttgaaagtgaggtgaacgtgttggagcagttttatcagttagggtggacacttgattcggcaggaggagcttctggtgaagcatatatggctgaacaagatggacaaaaattatttttaaaacgaaattcaaatccttttattgctgcgctatctgcagaaggaattgtacctaaacttgtttggacgaaacgtattgaaacaggtgaagtagtaacagctcagcattggaaaaatggcagagaattaaatgaagatgaaatgaaccaaacaagagtcgctgaactactacataaaattcacggttcaagacctttattaactatgctaaagcgtatggagatggaacctattacgcctgacattatgttgaataaaattaacgcatcactttcaagagaagttttgacacatcatgttgtgagaagagctttaacttaccttgaagatcatataccgaatttagacgcacgtttctttactgttgtacatggagatgttaatcataacaactggttattatcagatcgggatgaactttaccttgtggattgggaaggtgcaatgattgcagacccagcgattgacattggtatgctgctttacaattacgttcctcaaaacaaatggtctcagtggtttaaaacttatggcgttgaagaaagtgtcaatttgaataaacgtatgaaatggtacacagttattcaagcaataggtcttattcaatggtatgaagaacaaaaacgctatagagatatgaatacatggctgaaatttttaaatgaagtaatgaatagtaacttatttatataaggagtaattaatgatgagagttcgttacaaaccgtgggccgaagattatttaaagaaccatcctgatttagtagacatggatggtgctcacgcaggtaaaatgtctgagtggttcgaaaaagaacaaccgatttatattgaaattggttcaggaatgggacaatttataacaacattagcagcacaatatccagagattaattttgtatcaatggaacgtgaaaaaagtgtcataagcatttttaaatgctaattcattaggtccatatccttctgtaaatctattgggaatataccaccccacctgagcgccaagtagacgtaaagtagacactagaattgtagtagatgtaacaccatctgcatcatagtcaccatatactagtattcgttcattttgatcgatagctaatttaatacgatcaatggctttttgcatatcacttaataacatataatcatgactaatgttagtgccttcaaatagattttgaatctcctgattatccacaatatttttactctctaataccttttttactataggtgaaagtttaaattgatcactgctactctcacttataaaggtattcggttgagttatatcccaattatattttgatttaatcattataatcgtcctcatttctaccctacatatacaagtacacatcctaataggagtactagtaaaaagccaattttttcaaaaaatatatagtaaaaattagcaataatcattaaagcagtaaaaataatcaacatttcagttgatatatatttgcgtgtcatatttcgccacctttctatgctacagcactcatatgatatataaagtggaatgcttcttcagtagttattttcattctagattgtaaatttatatccgcttcaattctcgcataataagactcagcatcattta

SEQ ID NO: 3755 - DNA, 3941 bp, Artificial Sequence
  Description of Artificial Sequence: synthetic nucleic acid sequence
aagactattcgtctcaggctatttttgtgctttgcgtcatgttgcatatatgaattcttattaatatatccaaattacattcatagcttagcaatttctacacagtaatgcatttcgtgacaatcaggacattgaagctttcttgttttaggtgtatgtgatgctgttacaaaatgaatgacactaggattaaacacatggtggcaattaggacagacatatgaaacattctttttatactttttcgttaaccaaagtgaatacatagctaccacaggcatcatcgacaagaaaggctttttcctttgagttacaattgaggtgatcaaaccaccatattgtaatgaaccaatcagagctatacttaaccataatttctttctgacacctttgagtctatgagattcttccatataaatagctatatcttgtaaataatgaattggagaaattgaattttgatgaacatagcgttgaatttgctctattttacataccttgttttctttatctgttattgactgttgtatttcatgctttttgatttgaagaaacgtgtaaagagatttcattgatgaatcatcttttaataacactttaatttctttaattgtgcaacctatttccttaagtagtaaaatcagttcaagtttctccacttccttatcagtgtaaaagcgtctgttagtttcagtagtatagtttggcgataaaattccttgtttatcgtaatactgaatagtgcgtgttgacacatggcatttatgagctatatctcctgaagtataaatcgacatagacatctcacctcctagtcaaagcatactcgataacgttacgtcactttcaacaattttattcatttttagacgtccggacgtcttatttttttgaaatccacgctttaatttcatctaccacgccagtttgtccatccgattgggtttctaaaacacttgggaaatcgatatgaccaattcctggataaataacttctttagtttctccacctaacgccttaaacttttctaacgtagcttgagaatccgtataaggaataatttgatcttcttttccagacataaataatattttcggaaattgtttaatctcatcgatatctggtaaataatctgtattaatcgtgtaaatcatatccgtaattatagttttaataggtgcaataaattgtaccaaatcaagtgcgttttccttttgtgcataaatcgttttatctagtatatattgaggaagatttttcactgccttaatttcatcttttaacactgctctcttactctcactagtgaataatcgtgctaacatacttgcatctggagtaattttcgctgcgctatgtaaataaataagatgagagactggtaatgtattatacttaagtaaccgtgtcgcaatcattcctcccattgaataaccgacaatactcagttcttttatttgttgctccttaacaatttgcgttaatacatcatatatacgtgcagcgtaatcatctaatgtatgtgtgtcacgatctaaatctgaacttctaccacgacttggacaattaataaatattaatttgtaatctctgaagtaaggttcgaacatcgtcataattttatatgttaaaagtgcaccatgaataaatacaatcacatcatcagcttggctatctcctgcgtaggcaacttcactatattctccctcaaattgtttaagtggataaactttagttgtaaaattttgcttaatcatatacatcctcttattcttaatacattaattaatataataatatcatataatttaattttttataattatactaatcatatgtccatcctctttatgttactacatatttaaaactgatttttctatttaaatagatttaaacaatttgaatcataccaatagtcttaataaaaaattaatattatcctcataattaattaacattttattactattcttaatattaggaaacgaccgttgcttataaataatttatacgttttgcacaacatcatttacattttcatcatctagggaggcatttcatggttatttcaaagaaattagcatttatcactataggtatcttaatatgtattcttttaagttcacctctgatcgatcaacagatttcaaattatttcatgaatcaagattcaattttcggtactttatttcaaaactacggtttatttccacctacgctcatattaattatttcaactgtaattttaaattattatattttaactacatttcaaaataaattagcaaaaacgttaactttgattttatcttttatctttacgttgataaaaaccaatgaattcgtgtcagaaaccgctcaatatatgttatctacatcagaaaacatcaaaaatcataagccaatgggtatggcaaataatgaaggaaacgctggaaatgctttatctttaggaatgagtttttttatttctttgattatcattataattatcactattatttgttatcagttttggttaaaacatacaaataaccaagaacttgatcatttattcaaagtttcacttattagctttatgattttatttattggattagaactcgttgatagcttgaaacatttatggggacgttttagaccatatgaaatcactgacaaagctggacatttcactcactggcttacaataaatggaaacactggacatagttccttcccttcaggacacactggaaatggtgcatttctaatgtttatcgcattttactttaaaaaattacgcactcaaaaaatagtgtttagtatcggattatgttatagtattttaatggcattgagcagaattcgtattggtgcacatttcactagtgatgtaacaatgagcttgcttattatgttttcactcatggttattgcagattttatcattaatcaagtcatatctatacataaaaacaagctaagtaaagtctagaattaaaatattaatcataatttaaatgaaataatatagtaaacggtaattttctttgtattaacaagaaaattaccgttttttaattcctcctatatgatttaaaacaaaaactcacactacttctctcgatttgaaatttctgaatgtatttgttgcattttactttctacatttgtaatttctgatgcacattgttctaatagtcctttatatttttcagtgtctgtatcatttttataacgaattttgtgttctaaacttgcccacatatccatgccgattgtacgaatttgtatttctactggtgttacttctactgaatctgctaaaaatactggaatagatacgacgatatgtaaacttcgatagccgttttctttaggatgtgtgatataatctttacgttttaataatttaacatcttcttgtcttaataacattttttcaatgacataaatatcgtctaaatagttacatacgacccgtatgccagcaatatccataatgttatctttagcactttatgcacttacttcaaatcctttacgattcaactttttaactaaactgtgcatctcttttactcgtcgttccatatgatgaattggattgtgtttatattgatagttaaagttatcatctaaaatacttaattttgtacttatttctttaagtgctgaagaatataggtggtccagttccacaaatccaactaatgtattaaatgcttcatcatcatctttaaaatgttttaagctatttttgaattcgtctcgtaaatcttcgatataaagtgcaggctttctctctacatacatctttctcaacctccaatttctcttcaaacccattatagcgaattaaaatttaatatagaaactttatgtcatattacagttttatcatatatcatttatagataaaaaaacctgagacaacaataattgtctcaggtaa

SEQ ID NO: 3756 - DNA, 3650 bp, Artificial Sequence
  Description of Artificial Sequence: synthetic nucleic acid sequence
tattgaagatgaaattacaataattcgacgaggaaagaaaaaatatttcatggttaattaccaatcataaatgaaaaaatttgattgaatcatttcacaatgttttctatatattataaaaattaaaagatttatttaaaaaggaataactataaaagtaaaactctgagtatctcttactatgaagtatactcagagtttttacttaaaatcgatcaactataatatattaaaatcaataaacgtaatatgaaaattttttattgagcaaattgactttgtgattgagatgattcagatgcagatgcttgtttttttaattttacattaatgtcttgtgtcttaccatctctgataacttttagagtaaccgtttcacctggttttttgctctcgtataaataagttcttaaatctgtatcatcttttatttgtttaccatctattccagtaataatatcaccctttttaatggcattttcactgtctactttagctacataaacgcctttgtctttatgagtatgtagttctttacgatagttttcaggaatatcacttaaatttataagacctataccgattgaagggcgttcgattttaccatgtttaacgagttgttcgatggtcactctaacttcattactaggtatagcaaaacctataccttctacttgtgctgccgcaattttcatggaattgataccaacgagatttccgttaatatccactaatgcaccacccgaattaccgggatttattgcagcgtctgtctgtaaaacattaactttagtattaccagcagaagtattggcgtcaattgtacgttcgctagctgaaataattcctgatgtaacagaatttgcaaattctaatcctagaggattacccattgcaaaaacactatctcctgtttgaacttttgacgaattagcaaattgaattgcttttattccttttgtatcttttatttttagaacagcaatatctgttagggcgtctttacctattaatttggcatctacttgttttgaattatgtagttgaactttaatttccgaagcaccatcaacaacgtgattatttgtaacgatatatgcggaaccttcacttatttgataaatcacaccggaaccaattcccgcttcttttgatttagatgccttaccgttgaataaatcatcaaggtttgtagatttttgcatgtttatcacgccgacaattgcgggagaaacgtctttaatcatgtcatgtactgatttgtattgattacttttaccatctaactgattgccaccatgactatttgaaacttgatgaacagtagcactttcattgttaaaaccatttttatttaggagtttaccaatacctaagacgagaagtgctccaataattccagcgattattgcaacaataattgttttaatccatggaaaagtgtgtcgcttctgtgaagaattacgatagtggtgttgattcttttcttgttctgacatttgttacctccataatttgtagtctgtattactattatgtatcgtttgtataaaatttgctagcaatcaactatacgactttaggagtattatcataaatgatattgttgcctttaagatatagaagaatcattgcttgatacaaataattttgttgttatattgatatgtatttcagtgctatagttatctaatgactaaagaaaacatattcctcctcactttcgaaatgattggcaaactgaactgctaattttaatctttctgctattgatgcagaaaaagtttgttctccttctttaatagctatatcgtgaatatccaaaacgccttctataatttctttccaattcttatcttccgctgccaatgttactgcataagcaatcatactagctccagctattgcaacatcacttgtgtgagtagcttcactaatttccttaacataatttacaagctctactttttgatctttagaaaataaagtaccaataggagcaattctcatagccgacccattagttaatgcattttttgtatataattgggaatcctctccttgtattattgcagttaaagctgctttagaacttgggccaagaatattatttttaaatgcgtttgtagcattggcccattcaatcaattcgtctgctatgattttttttgaaggttcaaaatgatttttatttagcgcatcaatgattagtagtgattgtgcagtatcatccgtaaactgtcctttggtaaaatttctggctaccttattttcataagggccatctaaaaaagttgtgattttcccaaaaaaatctttaactttgttgcgattccataattctgaaggcatacctaaagcgtctccaatagcttggccatataaagttcctaatattttatctttcattataaaactccattcttgtccacttatacgtacgagttaattttttattttaaagcgcttacattttattgttaaatcttaattgtcaatatactgtgataatttaaagttgaaattgggagaatatataaggttctgttgcaaagttgaatttatagtataattttaacaaaaagaagtcttctgtatgaactatttcagatataaacaatttaacaaagatgttatcactgtagccgttggctactatctaagatatgcattgagttatcgtgatatatctgaaatattaagggaacgtggtgtaaacgttcatcattcaacggtctaccgttgggttcaagaatatgtctcaattttatatcaaatttggaagaaaagcatcaaaaagcttattacaaatggcgtattgatgagacgtacatcaaaataaaaggaaaatggagctatttatatcgtgccattgatgcagagggacatacattagatatttggttgcgtaagcaacgagataatcattcagcatatgcgtttatcaaacgtctcattaaacaatttggtaaacctcaaaaggtaattacagatcaggcaccttcaacgaaggtagcaatggctaaagtaattaaagcttttaaacttaaacctgactgtcattgtacatcgaaatatctgaataacctcattgagcaagatcaccgtcatattaaagtaagaaagacaaggtatcaaagtatcaatacagcaaagaatactttaaaaggtattgaatgtatttacgctctatataaaaagaaccgcaggtctcttcagatctacggattttcgccatgccacgaaattagcatcatgctagcaagttaagcgaacactgacatgataaattagtggttagctatattttttactttgcaacagaaccagaataagcatatatattcagggtatatataagtaatagacatctaaataatacgtaataggaggctggtgtagatgttcaaaaatatattattaccctatgatttcgaaaatgattttagtgctatccctgactatttagaaaaagtcaccgatgaagattcagttgttgtaatttatcacgttgtaacagaaaatgatcttgcaattagtgtcaaatattataataagcataaaaaagatattattagagaaaaagaaaaaaaacttactccatttttacgtgaattagaaaaaagagatattcaatataaaatagatgt

SEQ ID NO: 3757 - DNA, 3391 bp, Artificial Sequence
  Description of Artificial Sequence: synthetic nucleic acid sequence
tatatgcaccattacggtaggccgctctacttatcaaatgcattccaaccggagatgtaagattgataaaaactagtgataataataatctgacactgaaaaaacctgaattcacaataaaatagatcagtacaccaactacagttagtaatactgacaatgtagaacttttcgttgaggcgtgacttcttagaaagacatcttgaaattttacaatccctatataataaataatatcgaatgattccagttactcaacttgtagaagttaaagacatattttgttaaaataaataagtatttaaaaagaaaaatataggagtttggttatgaaaactacgattaaacaagcgaaaaaacatcttaaccaagaagtaacaattggtgcttggttaactaataaacgttcaagtggtaaaatagcgtttttacaattacgcgatggtacaggatttatgcaaggagtagtagtaaaatctgaagtagatgaagaaacatttcaactagcaaaagatataactcaagaatcatctttatacatcacaggaacgattacagaagataatcgttctgatttaggctacgaaatgcaagttaaatcaatcgaaattgtacatgaagcacacgattatcctattacaccaaagaatcatggaacagaatttttaatggatcatcgtcacttatggttacgttcaaaaaaacaacatgctgtcatgaaaataagaaatgaaattatccgtgcaacatatgagtttttcaatgaaaatggcttcactaaaattgatccacctattttaacagcaagtgcaccagagggaacaagtgagttattccatacaaaatatttcgatgaagatgcattcttatcacaaagtgggcagttgtatatggaagcagccgcaatggctcacggacgtgttttttcatttggcccaacttttcgtgcagaaaaatctaaaacacgccgtcatttaattgaattctggatgattgaaccagaaatggcctttacaaatcatgcagaaagcttagaaatacaagaacagtatgtgtctcacattgttcaatctgttttaaatcattgccaattagaactcaaagctttagatagagatacaactaaactagaaaaagttgctacacctttccctagaatttcttatgatgatgctatcgaattcttgaaaaaagagggattcgatgatattgaatggggtgaagactttggtgcacctcatgaaacagccatcgctaatcactatgatttaccagtattcattacaaattatccaactaaaattaaaccattctatatgcaaccaaatccagacaatgaagatacagtattatgtgctgatttaattgcgcctgaaggttacggtgaaattattggtggttccgaacgtattaatgatttagaattattagaacaacgcattaatgagcacgaattggatgaggaaagttatagctattatttagatttacgtcgctatggtagcgtaccacatagtggttttggcttaggcttagagcgaacagtagcttggatttctggagttgaacatgttcgtgaaacatccccattcccacgtttacttaatcgcttatatccataattgattattcatatttatgttcaaaatgccattttgaaacgtccagtcactttaaggctggacgttcattttaaataggaggtagtaatattatggatctaattcaattaaaaacaagacctgttgttataagacgagaattgtttgatcattattcagagttaggtttggatgaacaagatttagttattttgataaaacttttatatgcatctgaaacttctaataagcaaccttctattgaatttcttcaaaaaggatcaactatggaacctcgtcaaattacttccgtaatacaaaacttaattcaaagagaattattagaactcaatgttagtaaagacgaagaaggtaaattcactgaatacatgaatttggatcccttctatcacaaattaaatcaattattaaaacatcaatacttaaaacatgaggaacaagataaaaaagagcagtttaagcaattgtttcagatagttgagcaatcgttcggcagaccactatcgccgtatgaaattgaaacattaaatcagtggattgatgtcgatcaccatgacttatcagttatacaagccgctcttgatgaggcacttagccaaaataaacttagttttaaatatattgatcgtattttattaaattggaaaaagaataatgtgaaaacagttgacgattcaaagaaaataagagaacagtttaacaaaccaaaaatgaaacatgttgttaaaaaggtgcctaaatttgactggttgaatggagagaatcctaatgataagtaagaaaaaagcattacaaatgattgacgttatagcagatatgtttcctaatgcagaatgcgaattaaaccatagaaatgcattcgatcttacaatagctgtattattatcagcacagtgtactgataatctagtcaatcgtgtcactcaatcattatttagaaaatatcgaacacctgaagattatttaaatgtgagtgatgaagaattacaaaatgatatacgctctattggattatatcgcaataaagccaaaaatataaaaaaattatgccactctttaattgaacaatttaatggtcaaatcccacaaacacataaagaattagagagtctagctggagtggggcgtaaaacagcaaatgttgtaatgagtgtcgcatttggagaaccttctttagctgtcgatactcatgttgagagagtttctaaacgtttgggaattaatcgttggaaagatagtgtaagacaagtagaagatcgattatgtgatattatcccaagagatagatggaataaaagccatcatcaattaatattttttgggagatatcattgtcttgctagaaaacctaaatgtgagatatgtccgctgttaaatgattgtagagaaggacaaaaacgacataaagcaaagataaaggaggcgtgatgatatgattgaaaaacaggatttcaatcatatagaggaccaacttgatcaactagcaagtaataaacaactcaaaacaccagaagctagggaacttttagatagttatttcgatttaattattaattattttaaacaaataaataacatagatgaaattcattttaatcaactcgatacatatccagtagttccaatgaattttgatgaacgctatcattatatggttgcacgtaaacaccattttatgggctatcgtcaaatgaaaacattgaaatcagaattaataaaaatgaatgcatcttatctaattagaaagcaacgtcaacaaaaataaatta

SEQ ID NO: 3758 - DNA, 3185 bp, Artificial Sequence
  Description of Artificial Sequence: synthetic nucleic acid sequence
atggtaactgactcagataaaatgatagctgaattagaacgtccatatatattagtaacggataagaaaatttcatcattccaagatattcttccattattagaacaagttgtgcaggctagtcgaccaattttaattgttgcggatgaagtagaaggcgatgcacttactaatattgttttaaaccgtatgcgtggaacatttactgctgtagcagttaaagccccaggatttggtgatcgacgtaaagcaatgttagaagacctagcaatattaactggtgctcaagtcattactgatgatttaggtttagaacttaaagatgcatctcttgatatgctaggtactgctaataaagttgaagtgactaaagatcatacaacagtcgtagatggtaatggtgatgaaaataatattgatgctcgtgtaggtcaaattaaagcacaaattgaagaaactgattcagagtttgataaagaaaaattacaggaacgtttggcaaaactagctggcggcgtagctgttatcaaagtaggggctgcaagtgaaacagagcttaaagaacgtaaattaagaattgaagacgcattaaattcaacacgtgcggcggtggaagaaggtatcgttgctggtggtggtactgcgttagtcaatatatatcaaaaagtaagtgaaattaaagcagaaggtgatgttgaaacgggtgttaatatcgtattaaaagcattacaagcacctgttagacaaattgctgaaaatgcaggattagagggttcaattattgttgaacgtttaaaacatgctgaagcgggcgttggtttcaatgcagcaacaaatgaatgggttaatatgttagaagaaggtatagtagatccaactaaagtaactcgttcagcgttacaacatgcagcaagtgtagctgctatgttcttaacaactgaagcagtcgttgctagtattccagagccagaaaataatgaacaacctggaatgggtggcatgccaggtatgatgtaaatattttattgattttagacatcaatataagtatttaatttaaattactatcaagcctctcaaaagttgaatagacttttgagaagcttttttaggtatttcgcatttcatccaagtgcacaacaatcatcaaaatatgctgctaaagtcattttagaagctgcaacaaaagcaggtgctcctaaagattgtattcaatggatagaagtgccatcaattgaggcaactaaacaattaatgaatcataaagatattgctttagttctagcgactggaggctctggaatggtaaagtccgcatattcgacaggtaaacctgcattaggagtcggtccaggtaatgttcctacttatattgaaaaaactgctcatatcaaacgtgctgttaatgatatcattggttctaaaacttttgataatggtatgatttgtgcttctgaacaagtcatggttgttgataaagaagtatacactgacgtcgttaaagaattcaaattacaccaaacatattttgttaataaaaatgaactacaacaattagaagatgccatcatgaatgaagataaaactgcagttaaacctgatatagttggtaaatctgctgtagatatagcgaaattgtcaggaattagtgttccagaaaaaacaaaattattagtcgcagaaattgatggaattggaaaagattatcctttatcacgtgaaaaattatcacctgtactcgcaatggtaactgcaaaatcaacaggacatgcactacaaatttgtgaagacatattaaaatttggtggtttaggtcacactgctgtaattcacaccgaggatagtcaattacaacaaaaattcggtctaaaaatgaaagcttgccgtgtattggtaaatacaccttctgctgtcggaggaattggaaatatgtataatgaactcattccttcactcacgttaggttgtggttcatatggtagaaattctatttctcataatgtaagcgcagtagacttattaaatattaaaacaatagcaaaacgtcgtaataatatgcaatggtttaaactcccacctaaagtttattttgaagaaaattcagttatgtatttgacagagatggataatgttgaacgtgtaatgatagtttgtgatccaggaatggttaatattggttatactgatatagttgaacaagtgctgagacgccgagaaaaccaaccacaaatcaaagtgtttaacgaagttgaacctaatccatcaactcatacagtctataaggggttagaaatgtttataaatttccaacctaatactattattgcactcggtggcggttcggcaatggatgcagccaaagcaatatggatgttctttgagcatccagaaacttcattttttggggcaaaacaaaagttcttagatattcgtaaacgtacttataaaattaccaaacctaaaaacgcaaaatttatatgtataccaacgacatcaggaactggttctgaagtgacaccttttgcagtaattactgatagcgagacacacgttaagtatccactagcagattatgcgttaactcccgatattgctatcgtcgatccacaattcgtattaagtgtacctaaagatgttgccgcagatacaggaatggatgttttgacacatgccattgaatcttacgtctctgtcatggcttcagattatacaagaggcttaagcttacaagcaataaagttaacttttgattatctaaaatcatcagttcaagaaaatgacaaacactcacgagattgatcaaacgctttatgatcctctggatttgcactgactacagagctgaaatctgaatcaggttcacattgtgatgcaactaactcaaattgattaaagttaagagaagataagatgtcaggtacaactggcacactcgtaccatgcaagcttgtaaagacaactttcaaatcagactgtggaatagttccaactaagtcttgtacgtttttgaaataatcttctctaacttcgctcgggactgaatgaattaatgtttgttgttcagtagttaaactaggtaaattaatatgaagcggatgacctaacttatcgatatatgtgcttagtcgtgcggaatcgtcggttgataattgagcaccatcttctccatacactttgattccatt

SEQ ID NO: 3759 - DNA, 3608 bp, Artificial Sequence
  Description of Artificial Sequence: synthetic nucleic acid sequence
ggtggacgacaaccgttgtgtggtactggagtaacgtctctgattgcagttacttctaaacctgcagattgtagtgcacggatagcagattcacggcctggaccaggtccttttactgttacttctactgttttcaaatactctcgctcccaaattcataagttacaagcgctttctattcctcgatatgtttactttttcatatcaaacactttcttttttaaaactaattttgtataaaaaaagagacctttcggtctcgattaggctcatcgcatccatacgatatttgcctggcaacgtcctactctagcggaacgtcagtccgactaccatcggcgctaaggagcttaacttctgtgttcggcatgggaacaggtgtgacctccttgccattgtcaccagacaaatgaatgattatacattcaaaactagatagtaagtaagattttgcgtcgcaaaacgttttttaaaaattgattaagtcttcgatcgattagtattcgtcagctccacgtgtcaccacgcttccacctcgaacctattaacctcgtcatcttcgagggatcttataaccgaagttgggaaatctcatcttgaggggggcttcatgcttagatgctttcagcacttatcccgtccatacatagctacccagctatgccgttggcacgacaactggtacaccagaggtatgtccatcccggtcctctcgtactaaggacagctcctctcaaatttcctacgcccacgacggatagggaccgaactgtctcacgacgttctgaacccagctcgcgtaccgctttaatgggcgaacagcccaacccttgggaccgactacagccccaggatgcgatgagccgacatcgaggtgccaaacctccccgtcgatgtgaactcttgggggagataagcctgttatccccggggtagcttttatccgttgagcgatggcccttccatgcggaaccaccggatcactaagtccgtctttcgaccctgctcgacttgtaggtctcgcagtcaagctcccttatgcctttacactctatgaatgatttccaaccattctgagggaacctttgagcgcctccgttaccttttaggaggcgaccgccccagtcaaactgcccgcctgacactgtctcccaccacgataagtggtgcgggttagaaagccaacacagctagggtagtatcccaccaacgcctccacgtaagctagcgctcacgtttcaaaggctcctacctatcctgtacaagctgtgccgaatttcaatatcaggctacagtaaagctccacggggtctttccgtcctgtcgcgggtaacctgcatcttcacaggtactatgatttcaccgagtctctcgttgagacagtgcccaaatcgttacgcctttcgtgcgggtcggaacttacccgacaaggaatttcgctaccttaggaccgttatagttacggccgccgtttactggggcttcgattcgtagcttcgcagaagctaaccactcctcttaaccttccagcaccgggcaggcgtcagcccctatacatcaccttacggtttagcagagacctgtgtttttgataaacagtcgcttgggcctattcactgcggctcttctgggcgtgaaccctaaagagcaccccttctcccgaagttacggggtcattttgccgagttccttaacgagagttcgctcgctcaccttagaattctcatcttgactacctgtgtcggtttgcggtacgggcacctgttatctatctagaggcttttctcggcagtgtgaaatcagcgactcgaggaaacaatttcctctccccatcacagctcagccttatgagtgccggatttgcctaacactcagccttactgcttggacgtgcactccaacagcacgcttcgcctatcctactgcgtccccccatcgattaaaacgatactaggtggtacaggaatatcaacctgttatccatcgcctacgcctgtcggcctcagcttaggacccgactaacccagagcggacgagccttcctctggaaaccttagtcaatcggtggacgggattctcacccgtctttcgctactcacaccggcattctcacttctaagcgctccacatgtccttgcgatcatgcttcgacgcccttagaacgctctcctaccattgtccaaaggacaatccacagcttcggtaatatgtttagccccggtacattttcggcgcagtgtcactcgactagtgagctattacgcactctttaaatgatggctgcttctaagccaacatcctagttgtctgggcaacgccacatccttttccacttaacatatattttgggaccttagctggtggtctgggctgtttccctttcgaacacggaccttatcacccatgttctgactcccaagttaaattaattggcattcggagtttgtctgaattcggtaacccgagaggggcccctcgtccaaacagtgctctacctccaataatcatcacttgaggctagccctaaagctatttcggagagaaccagctatctccaagttcgattggaatttctccgctaccctcagttcatccgctcacttttcaacgtaagtcggttcggtcctccattcagtgttacctgaacttcaacctgaccaagggtagatcacctggtttcgggtctacgaccaaatactcaacgccctattcagactcgctttcgctgcggctccacatttgctgcttaaccttgcatcagatcgtaactcgccggttcattctacaaaaggcacgccatcacccattaacgggctctgactacttgtaagcacacggtttcaagttctctttcactccccttccggggtacttttcacctttccctcacggtactggttcactatcggtcactagagagtatttagccttaggagatggtcctcccagattccgacggaatttcacgtgctccgtcgtactcaggatccactcaagagagaatatgttttcgactacaggattattaccttctttgattcatctttccagatgattcgtctaacatgttcttttgtaactccgtatagagtgtcctacaaccccaacaagcaagcttgttggtttgggctcttcccgtttcgctcgccgctactcagggaatcgatttttctttctcttcctccgggtactaagatgtttcagttctccgggtctgccttctgacatgctatgaattcacatgtcgataacatgacataactcatgctgggttcccccattcggaaatctctggatcaacgcttacttacagctacccaaagcatatcgtcgttagtaacgtccttcatcggcttctagtgccaaggcatccaccgtgcgcccttaataacttaatctatgtttccaccatattttgaattgttattcaaaataaatagctaaaactagttattaatcttgtgagtgttctttcgaacactagcgattatttatgaattcaagcttatttaaaactctattcactcggttttgcttggtaaaatcttacttacttatctagttttcaatgtacaaagaatgttaataaacattcaaaactgaataca

SEQ ID NO: 3760 - DNA, 2631 bp, Artificial Sequence
  Description of Artificial Sequence: synthetic nucleic acid sequence
ctgtgtatgcggatgaaaatactgcaaaccaaaatcaaggaacatcaccaaaaacttcacagacagcacctacaaataatactgaaaatacagatgccacagccataacaacagatcaaaataataatgatgaagaagaatacgatgcgtcatatgaacttccaattctttatgtaactgtctggctagatgatcaaggaaatattattaaagatgctgtggaagatgctaaaacccctgcttcagaaaggcaaccggtgaaaattcctgggtaccaacattatagaacttctgtgagtgacggaattactaagtttatttatcgtaaaattagcactgcacaatcacctatagttgaaaataatcaacaagataataatacaaataaagttgttgaaacaaccaatcaaaataaagatgaagtgaatggaaaagaacaaaatcaagcaaatacttcagtaacaaatacacaaattaccaaaaacgagaaagacgaagacacaaaaacactaaagaaagataaagacgagaaagaatctaaagacacaaaaacaccaaagaaagacaaagaaaagaaagacataaaaactccgaagaaagatagagaagagaaaaaaccagtaataccaaaaagcggcaaagacgagaaagacacaaaaataactaagaaagacaaagaagacgaaattacaacaacttccaagaaagataataacaatgatgtacaagataaattaccggaaacaggtaaaacaaacgatattcaaaatcctgctttaataatgttacttgctggtttaggtttattaggattatttagaaataaaataagagaatagttagtcatagagtgtggatgtacaatccacactttttctatattaaaaacttaaagaatagggtggcgagtgtagttatttgataaataatcattgtagaaaaatcacagatactcaacttcgagataatggagatagaaatcaaaagtcaaaaactaatgtactgagtatcaatttattcgttttagcttttgtacttaaatcacacaaaaagaaaacaataaattattaaagtgtcgactaacgaaattgtgaatattcttaaaaattatatccgaagaaaataataattaatatttttttgtacatataatgtcatatcaaattaaattaaattaaaaggttttatcacatagttttcaagagcataaaaatcaagataagaatagaactaggattatgaatgctctctattcataatcccagccccttaaacttatttaatatcatcaattgcattagcaatagactcaaagacataaggaatatcttctttttctacacaactaaaggcaatacgaatatctgtactatttaaagcaataataccaattgaatagttattaattaaatgtttacgtaattcttctggatcgacttgatttaatttcaatgacataaagtatcctgaattaaagtcataggcttgccaatatttggcatatttattatcatacactacttgtttagttacttcgtagcgttcttttaaaatattgatattttgatcgatttctttatcaaattgctcatgatatttaagtacatgtttgattgcactttgagaaggtagtggagaacttgaaatattgctacgaattaatccttttactttagcttctagcgcattttttaacgtttcataatcaattccaaacgtcataaagccaactcggaacccccaagagaagaattctttagtagctccatccaaacgcactggtaaaaggttagaagatttcacctgtgttaaagccgtgaaaattgactgttggtaaacttcttcataaaataacccatagtatgcatcatcgacaacagttactactttagtacctttattagctagttcttcaattgcatttacaatagtattaacttcttttttatttggtgtgtaaccagttgggttattaggataatttaaaataataatcactttgtcttttttatattcttttaatgtttttacaagttcagatgtagtgaagtgacctgagtcatcaaaaatagaatacgtattgatatgagcaccgtgacgtgtgctaaatacaagtttataattaccccagttgtgtgtcggtaataagacggtatcatctgtatctacaaataaatcagctactagagaaagaccgtgcgtgagagcatttgtaacgatgggacgagagatagatttagactttaagtcgggattttctttaagcatttttttctgccataaatcacgtaattcctctacaccttgaggaggtgcatatgggaaaatttcatccggtgtaaggtcattaaacatttggttaagtgaatttgcgtacattttaccttcttttttggttgccataccaatagtagcattatatgttgtgcgttttgcttcggcagattgcgataaaattccttttggataaaacatatctttacctaattgtgacatcatatctaatacttctggacttgattgctttatttcatcattcaatttttgggctaatggattcatcattgtcttaacctcttttcaataatgtgtttatatatatattatcttgtattgctttaaagataaagg

SEQ ID NO: 3761 - DNA, 4210 bp, Artificial Sequence
  Description of Artificial Sequence: synthetic nucleic acid sequence
agcatagcagcagcaccgtcattgataccggatgcattaccagcagttactgatccatcttttttaaatgctggacggagttgtgctaacttatcaattgtcgtttgaggtctaatgccttcatcttgagaaataattagggggtcgcctttacgttgtggtacctctacaggtacaatttcagcatcaaatacaccagcttgttgtgcacgtgatgctttttgttgagaatcgaatgcaaattgatcttgttctttacgactaatctgatactgttcaactagattttcggctgtgatacccatatggtaatcattaaacttatcagttaaaccatcagctatcatactatcttctaaagtttgatttcccattttaaaaccgaaacgactatttttaagaagcattggagattgagacatactttccatgcctccagcgataacaatctcattatctcccgctacaatagattgataggcaagttgaatcgcttttaatccagaaccgcaaactttatttacagtaaaagaaggtaccgcttctggcacaccaccatgaatcgcagcaatacgagcaggattttgtccttgacctgcctgtaatacgtttcctagaataacttcattgatttcattaggatctatttgactatgttctaaaatttgacgaataactgttgcacctagttcataggcaggtatatccttaaatacaccaccaaacacgcctataggtgttcgatatgcttcagctaatactatgcgtgacatgtcatattcatctccttaatataacttatacttttctaaaaatgagggaagaagcaaaccttcttttcttattgtcattatatttggatattcaaatctattatttaagagtttatctcttaccttcattgtatttaaatgagtattacatactttaattgcagtaaacacattccacattatattaccaaatttacatagaaaaattccattatgatctatcatcatcaaatgcatcactttctttctaagcaatgatcaattttaatttcataatcactctcacttcactaaatatagttaatccattgttgtaaaaaaagaggaaaccataaaagaaatactcatgtctatacaaacggggtagtctaaccgtcccacttaacacaagtcatctttataagatttccttaacatctactattatatctacgatgatttacatttctaaattttattatgcaatcagtacttactttcctttatatttgtcacccatgcttcataatagaagcaagtaatctaaacttacctttcctatcaattcactggtaaagtgttttttagaatcaccaaaatcattgataatagattaagaagccatatttaatcgtcttgatgtcccatagacttttatgaataagtataaaacaatcgccattgttaaaaaacagttgagacatatcatctattattttgattatttattcaaaacacgaaatcattgatttatttgcactatttttccgaaaatgaatcctatcaacgtatatgtataaaaattacattaaaagattttgactaaaaccctgatttattcaacaaccttttaatatagatgaaagttatttattttgatactgcttaatcgcatcttgtatcgtatcgtgtaaactaggttcttgtaaccaatgttggaacttttccataatttcctttggagtcgtaatgttttcaggaaaattaatatctttcataccttcaaacaaatctccaaaatgacttttttcaccttcaaaattcttcataaaacgataaaagctcaataccctaacctcctatattttgcaacaataggtatatattaccaaaatgaaggcatttacaaaatacatttgtttaaatttaagtaaaaaattaatagttgaggtcttatttatatgttaaaagtatttcttttttaaaaactaataaattttattaaaacttgtattactaaaaatcaattttatacaatccctaaaaagtctattatttttgtcattttgactaatatacttgtcataatgacaaatatattatatagtttatatgtaaggaagtgatacaatttgcgcaatagacttaaagaattacgagcccgtgatggatataaccaaacagagcttgctaaaaaagctggaatatcacgacaaacggtgtctttaatagaacgcaacgattttacaccatctatattaaccgcaataaaaattgcaagaatctttggtgaacctgttgaagatatctttattatggaggaggaagacttttgaaaataaaaaggtatgcacttctatgtttattaggaggattagttggaggcatcatcggatacatcataggagctattaactgggagaagttatttaattatgcacagttcgctaactttaaagttgtgctttatacaaccatcgtagcatcattaataaatattatacttactgtgtatttatttatagtccaaaacgcgtcacttcactataaagctaaaattgacgcaaatatttcagatgatttagcagatacatatgaaaataaatcatacatcaaatcattgaaagtaagatttatttacacaatgcaattaattgtcgcttttattgcaattttaatacccgtcataggaaatgcatctgagaatcacatcgctctaataatgattcctttcattattacaatcatttcatccataatgattgggatattttatagaaaatttgatgctcgataccctaaattaggagagaaacgttacactgaaaaagcatttaatattatggacgaaggagagtgatacatcacactcgtttccttgtataaagtgcaccagcagaatattgtattactttttataggaattatgaccctggggatattctcaataactacaggcatgaatcaatcactaggcataattttgtttatcattttatttatctataattcattgggatatttactgaaagtcagtaatttttataaatcagaacagaaatcctaaaactaatttaaagaaaaggagtaaattatggaaaacttattagaagttcagcaactcaataaatcatataagaattcagaattccagcttactgacatcacattctctgttaaacctggcgaggtagtgggtttaattgggaaaaatggttcaggtaagtctaccctcattaatacacttgtaggaaatagacataaagataatggttcactgaaattcttcgataaagaggtgacagagaacgacttcaaatataaagaacatttaggtgtagtttttgatgatttacgtgttccagataaattaactctacaatctatcaaaatattaatgtggataggatgagaagacatgttcaagaacaacaaaagtattgaagatacttatgcaacaaaacctattattcagaatatcgttggtcaggcacaaatcaaacaagtgatggcgaaacaaacacccatgagatatacgttgaaagctatcatggctggttttctattatcaatagttacagtttttatgttagcaattaaaacacaattcgcttcaacgcataatgacgggttaatcaatttgatgggagctattgcgtttagtttaggtctcgtattagttgtgttaaccaattctgaattattaactagtaattttatgtatctgactgttggttggtattataaagcaattagtgtaagtaaaatgatatggatttttattttctgttttataggtaatatcttaggtggatttattttatttttcctcatgaaatatgcacatgttatgacgccagaaatgacagatagtttaacagcattagtacataaaaaaacagtagaatcgacttggttaaatattttgattaaaggtatattttgtaatttctttattaatatcggtatttttatttcaatgcagtttaaagagggactagccaaagcattctttatagcttgtggagtgattgtctttgtatttatgggttacgaacacgttgtttttaacgctggattatatgcaggtatgatgttctttaatatggatggattatcttggttgggtgtgctaaaaaatattgtttttgcattccttggaaactatatcggtggaggtatctttattggattagtgtatgcatatttgaacggtaaacgtgacagcctccaaccat

SEQ ID NO: 3762 - DNA, 3285 bp, Artificial Sequence
  Description of Artificial Sequence: synthetic nucleic acid sequence
cctgttgctaaaaagtaacgtagactatcagcgccatactcgtcaataacatccataggatcaacgccattacctaatgatttactcattttacgcccatcttcagctctgactaaaccgtggagtaatacatcattaaatggtcttctatcagtaaattctaatccttggaaaatcatacgggctacccagaagaaaatgatatcataaccagtaactaatgcatttgtcggataataacgtttaaaatcatcagcatttgtatcaggccatcctaatgttgaaaacggccaaagtgcacttgagaaccatgtatctaatacatcctcatcttgtatccaattctcgatgtcttcaggtgcttcttcaccaacaaagacttcacctgtatctttatgataccaagcaggtatttggtggccccaccatagttgacgcgaaatcgtccaatctctaatttcttccatccagcgattgaatgtattttcaaatctacctgggaaaaagtcaattctatcttttgtattttgattatccaaagctctttgtgccaaaggtttcatttttacaaaccattgtgtagacaaataaggttctactattgcaccagaacgttcagaatgtcctactgaatgtgtatgttcttcaatttttataacaagatcttgttcttttaagtctttaacaagctgatttctacaatcaaatctatccatccctttgtatttatcagctttatcgttcatcttaccatattcatccatgactataatattttctaattgatgtctttgaccaatttcaaagtcattaggatcatgtgccggagtaactttcattgctcctgaaccaaattcaatatcaacgtattcatcagctaaaataggtaactctcttcctacaataggtaatataactgttttaccaatcacatctttatacctttcgtcatttggatttacaacaatagcagtgtcacctaacatagtctcaggacgtgtagtagctatttctatatatccattcccatcagcataaggatatttaaaatgataaaaagcaccttggacatcttcatgaatgacttcaatatctgataaagctgttctagctttagggtcccagttaataattctttcaccacgataaataatacctttattatataaatcaacaaatacttttcttacagctttacttaaaccatcatctaacgtaaagcgttctctactataatctaaccctaagccaagtttagcccattgttgtctaataaatgttgcatactcttctttccaatcccatgcttgctgtaaaaatttttctcttcctaagtcgtgtctagatataccttgttcattaagttttgcttcaacctttgcttgagttgctataccagcatgatccataccaggcagatataaagtatcgtatccttgcattcttttcattctagttattatatcttgtaaagtagtatcccatgcatgacctaaatgtaatttacctgttacattagggggcggaattacaattgtatatgcctctttagatttatcttcagatggtttaaagtaaccattacttacccattcctcataacgacccttttcaacttctcttggatcatattttggtttcatttccatatgtctacctcctaaaaaataaaaagaacatccatcctataaaaaataggacggatgttctgttccgtggtaccacctatattcaagaagaaataattcattcttttcttcaagcacttaagtctctgattaacgctcatacacgcttctacctacttgtcgtctatgtttcaatagaagttataaaatagggctaccttcagacttaatcatttacatattcacagccaccatatgctctctttaaaatgatataaacttactcttcccaaataatatattcttttactcatttatattataatggatattaaaataagtcaatgtattggagatgaaattatgaatgaatgtgcttttaacacaactgatcctatctatatagagtatcatgattattattggggacaaccaatctatgatagcaaagaattatttaagctaatggctcttgaatcacaacatgcaggattatcatggttgacaatattaaagaaaaaagaatcgtatgaacaggcattttacaactttgaacctcaatttatcgcacatatgactgaacaggatattgattatttaatgaaattcccaaacattattcataatcgtaaaaagttagaagcaattgtgagccaagcgaagggatatttaaaaattgaaaaagactatggtagttttagtaaatttttatggtcttatgtaaatcatcaacccataaatatgggttataaaaaacctagagatcgtaaaaaagttgatcaaagagctactcaattatcaaaagatttaaaagcatatggttttaaatttttaggtccagtaaccgtgttctcattcttagaagctgctggattgtatgactcacatcttgaaggatgtcctttcaaaccaaatcatgagtgaagcatagacataagttgcgctgcggatattcaaacaatatgagtttttcacgcatactaaaagtttacaacgtttaatttatctagattttacttttaagtaattacaattactcgcaaatattttcgaagttttatttaaaaatgtataacttaagtcattaaaatcatttattatttaatttaacattaataaaataaccaattagtggcgcaatgacaaataatataaaaaatattctaaaaatgtgatagcttgaaatcatcgctacatcagctccagtagccatagccactaaaactatttgactcatacctcctggtgctgctcctaaaaacaattcattgatggattcattagtaatcaaatgtattcctattatcattataaacgttgtgactatgagcattatattttgaaaggctattgctattgcaattcttccctttaaatcactcattaagttggcaatctgtaatccaatacgtatcatataaataagttgcgctgtggctaacaaccaatgatctagtgaaaatgttaaatgtgttgtcatattccatataattaaaactattataggtgctaataattgtttagtggggaagttaatttttgacattcctatatagatgattcccaccattgagaataagatgattatttgccatatatttaaagtctgagaaagtgtgggtacttccattgtagtatgattcatttcatgatcctt

SEQ ID NO: 3763 - DNA, 3354 bp, Artificial Sequence
  Description of Artificial Sequence: synthetic nucleic acid sequence
tttaggtttctatgcaccaacagcaggacaagaagcttcacaattagcatctcagtatgctttagaaagtgaagacttcattttacctggttatcgtgatgtgcctcagattatttggcatggcttacctcttacagacgcattcttattctcaagaggacacttcaaaggtaaccaattccctgagggagttaatgcacttagccctcaaattattatcggtgcacaatatattcaaactgccggtgtagcgtttggacttaaaaaacgtggcaaaaatgcagtcgcaattacttatacaggtgatggtggttcatcacaaggtgacttctatgaaggaattaactttgcatctgcatacaaagcacctgcaatttttgtaattcaaaacaataactatgccatctctacaccacgtagtaaacaaacagctgcagaaacattagcacaaaaggctatttcagttggtatccctggaattcaagttgatggtatggatgctttagctgtttatcaagcaacattagaagcacgtgaacgtgcagtagcaggagaaggtcctactgttatcgaaactttaacttatcgttatggaccacatactatggctggtgatgatcctactcgttatagaacttcagatgaagatgctgaatgggagaaaaaagacccattagtacgtttcagaaaatatttagaagctaaaggtctttggaatgaagacaaagaaaatgaagtggttgaacgtgcaaaatctgaaataaaagcagctattaaagaggctgacaatacagaaaaacaaactgttacttctctaatggatatcatgtatgaagaaatgcctcaaaatttagcagaacaatatgaaatttacaaagagaaggagtcgaagtaagccatggcacaaatgacaatggttcaagcgattaacgatgcgcttaaaagtgaactcaaaagagacgaagacgttttagttttcggtgaagacgttggtgttaacggtggtgtattccgtgttactgaaggtttacaaaaagaatttggcgaagatcgagtatttgatacaccattagcagagtctggaattggtgggcttgcactaggcttagcagtgactggcttccgtcctgttatggaaattcaattcttaggattcgtttatgaagtatttgacgaagtagctggtcaaattgctcgtactcgtttccgttcaggtggaactaaaccagcgcctgttacaattcgtacaccttttggtggtggcgtccacactccagagttgcatgctgataatttagaaggtatcttagctcaatcacctggtttgaaagtagttattccatcaggtccttatgatgctaaaggattattaatttcttctattcaaagtaatgatccagttgtatatctagaacatatgaaattatatcgttctttccgtgaagaggttcctgaagaagaatacaaaattgacattggaaaagccaatgttaaaaaagaaggtaatgatattactctaatatcttacggggcaatggtacaagaatcactaaaagctgctgaagagttagaaaaagatggttattcagttgaagttattgacttacgtactgtacaaccaattgatatagatactttagtagcatcagttgagaaaactggacgtgctgtagttgtacaagaagcacaacgtcaagctggtgtgggtgcacaagtggcagcagaattagcagagcgagcaattctttcattagaagctccaatagctcgagtagccgcatcagatacaatttatccatttactcaagctgaaaacgtttggttaccaaataaaaaagatattatagagcaagctaaggcaactttagaattctaattattaaaaaagcaaacgtaaaaatatcaatcaaataaagtttacatttagttgtaaggttttccttaccttacaacttttgtataaattttcaataatttaaatacgtaaatcttaggaggacaagaacgtggcatttgaatttagattacccgatatcggggaaggtatccacgaaggtgaaattgttaaatggtttattaaagccggcgatacaattgaagaagatgatgtattagcagaagttcaaaatgataaatctgtagtagaaattccttctccagtaagtggtactgttgaagaagtgttagtagatgaaggaacagtggcagtagtaggagatgtcatcgttaaaattgatgcacctgatgcagaagaaatgcaatttaaaggtcatggcgatgatgaggattctaagaaagaagaaaaagaacaagaatcaccagtgcaagaagaagcttcatcaactcaatcacaagaaaagacagaagtagatgaaagtaaaactgttaaagcgatgccgtcagtgcgtaagtatgcacgtgaaaatggtgtcaatattaaagctgtaaatggttctggtaaaaatggacgaatcacaaaagaagacatcgatgcatacttaaatggtggtagttccgaagaaggttcaaacactagcgcagcatctgaatcaacttctagtgatgtcgttaatgcttctgcaacacaagcattaccagaaggcgacttccctgaaactacagaaaaaatacctgcaatgcgcaaagcaattgctaaagcaatggttaattctaaacacactgcacctcatgttacattaatggatgaaattgatgtgcaagaattatgggatcaccgtaagaaatttaaagaaattgctgctgaacaaggtacaaaacttactttcttaccatatgttgttaaagcattagtttctgcacttaaaaaatatccagcacttaatacttctttcaatgaagaagctggagaggttgtacacaaacattactggaatattggtattgctgcagatacggataaaggattattagtaccagtagttaaacatgccgatcgtaaatcaatattcgaaatttctgatgaaattaatgaactagctgtaaaagcacgtgatggtaaattaacttcagaagaaatgaaaggtgcaacatgcacaattagtaatatcggttccgctggtggacaatggttcactccagttatcaatcacccagaagtagctatcttaggaattggccgtatcgctcaaaaacctatcgttaaagatggagaaattgtagctgcaccagtgttagctttatcattaagctttgaccatagacaaatcgatggtgctactggacaaaatgctatgaatcacattaaacgcttattaaataatccagaattattattaatggaggggtaaaaacatggtagttggagatttcccaattgaaacagatactattgta

SEQ ID NO: 3764 - DNA, 3627 bp, Artificial Sequence
  Description of Artificial Sequence: synthetic nucleic acid sequence
aacagtataatctttatctacaatatgaacaagcttgtcgttatgatttaaagcaagtttaatagctgtacctccaaaacctgcaatccatgtaaacgaaattagaggaggaataatgagtacacctacgacaaattctctaattgtacgtcctcgagatactcttgctacaaagcccccaataaaaggggaccaagaaataacccaagcccaatagaaaacagtccactgttgaatccaactatcatctcctgagtatggatttacgcgtaaactatattctataaaatgctgcaaataatcagaaattgctagtgtgtatgattctaaaataaattttaaatctccaaaaatcaaaataaatataagtaaaatagcacctaataaaatatttaaattacttaaccattttacaccgtgatttaagccagttaatgaagatcctaaaaatatggctaccatcaaaatagtaattaagattttagtgaaattattattaggaacatcaaagagatggtttaatccaccaccgatttgcataattcccaaaccaatcgacgtagcaattcccatgacggttgcgataatagctaatatatcaataatattcctgaaaggacgtttataagcttcaccaaaaacgggttccatagctgttgaaataagcccgttacgttgttttctaaattgaaagtatgcaacgattaatcctgaaattgcaaatattgaccattgtgaaataccccaatggaagaatgtatatcccatcgcaacacgtgctgattcttcagagtgatctgcaatttttccagggaagggtgaatggagataatgcgttaaaggttctgcaacaccccaaaagactataccgacgccaagacctgctgaaaataacatgccaatccaagatagcatggaaaattctggttcttcttcatccgaaccaagtttaaatcgaccatatctagaaaaagctaagaatattaaaaatacatctaaaataaagacaatgataaggaatagccaaccaaaccaatttgtaatccaatcataaacgctctgcgcatacatcccaaatgctttaggaaagatacccgcaataagagtaataacaacaataattaaaacagagatagtataaacaagcgtattgtttatttttcgtttgtttttcattttaatatttttattcatccctttttaacttgcaaagtatttgtttaaagtatacagataattagaaatattttcaaaaatactttttggatttaaaatgattttataataaagagattttgatttagagaagtctgttgtatatgataaaagtatgatattaacgagatgggtgacaaaatgtataaatatttaaaaagaaatcgattctcaacgcagacttcaattataaaaaatgacgctcagcaacctgttggtatgatatcgaaagtgtataaaaattttattcaaaaatgtattggttatttgaccttaggtttaaaattaaatcaatatgagatatgtgatgtgaataataatagtgtagcttatattaaggtatcgcgatatatggagaaaaaacattttaaagttgaatatcatgattcaaaaggtaggcagtgtgaagcgttatttgataagcaaagtaatggttatgaggagacgtatggaatattaaaaattgacggtataatattaaatattcatgctaatgagaaacatcatactactatcaaagatataaagcgagatacacaaattgcgagttggaaacaaattggtgattatgcttatgcagaagggaatgatgggctatttaaagaacatcaattactctatattcttatcatgcacgcttttgctaatacatatgtgagcaaacgtcaaacgagcttgatgttcccagggccacctgtttaaagtacatacagaatgattagtgaactaagagactattggatttctcctaatgcgatcttgttatcttcaacgaagtcgatagctttgattgcttcagttaatccttttacgatatcttcaacggacattgaagattgttgagaatgattgattgtttgttcaggaatcaaaggcacgtgtataaatccaaataataagtcagggtaaaaatggtctgccatatatccgagttgatataagatatgattacatacaaatgttccagcggaattagatagtctgctaggaagaccagccttttgaattgccattgtcattcttttgataggtaaattagaaaaataagcaggtgcgccatcgtgacgtataacttgatcaataggttggtgtccttgattatctttaatgcgtgcgtcatctatatttatacctacacgctcaggagtgatttcactacgaccacctgcttgtccgatagctagagcaacatcataatttttagattttaacactttagcaatcatatccgcagagtcatgaaatactgtaggaagtatcaatcgatcaattttatgacagccaattttagtttccaaatggctaacagcctctagtgcagaattaattttttcatctccaaatggttcaaatgctgtgactaatatttccatgcaaacactccttaagtagacttattatattatttattttaaaactatcagtgatataaatgatatcaacatatgccattttgcgtattctttatgtcaaaaaacagggttaaaagttattatagatatttaaatcatataaaatacgcctttatatgtgaaatgttaaactcacaataaaggcgtgtttgaattatgcatgtgtgtgttcaggcacatctttgaaattatttaaacgacgttgccattcttcattgctaatatgatgacgggcaacgtagcgattgcgctcatgttttgcacaatcatacgaacatgcacctaaatatttttcttcattttcttcagaaacaagaatttgtttattacattcagggtttgcacaattaatataacgttcacaaggtgtaccatcaaaatgctctttgccgatgactgttttatcaatttgattcacatcgacactaatacgttcatcaaatacatacatcttaccatcccaatatagccctttagtttcagggtctttaccgtatgtagcaataccaccatgcaactgacctacgttttcaaatccttcttttactaaccaaccagaaaatttttcacaacgaatgccacctgtacaatatgtgacaatattttttccgtcgagttgttctttattattacgcacccattcaggtaagtcacggaatcgtgttatatcaggacgaatagctccacggaaatgtcctaaatcgtattcataatcatttcgagcatctaatataacagtattttcatcttctagtgcggctttaaattctttaggagaatagtatttaccggtaatttcacgtggattaatatcttcttctaagtcaagtgcaacaatttcacgtcttggacgcacgtgcatctttttaaacgcatgactttcagcttcatcaattttaaaagttaaatcagcaaaacgactatctgcatgcatatgctctatatatttatcagtatcttcttttgttccagataatgttccattaatgccttccgttga

SEQ ID NO: 3765 - DNA, 4086 bp, Artificial Sequence
  Description of Artificial Sequence: synthetic nucleic acid sequence
attgatacgacttcaggaagaccttcagcatttccgaacgacattttgaataacatcgaacgttattataatatagaaaatgtggagacgacatctcaatatataggtcatcgtatcggcatcaagaaaaagccaaaaaggaaagagtaatacaacttagaatttagatgaatatgatttaaggactcttttgtgccttgttcttacttagtttactttgtataacatcacaatgagtccttattttttaacaaattgaattacctatagaaaggaatggacatatgttaagtattaaaaacttatcaaaggtctatgcaggtggtaaaaaagctgggtaatgactccaacttattgatagtgttttatgttcagataatgcccgatgactttgtcatgcagctccaccgattttgagaacgacagcgacttccgtcccagccgtgccaggtgctgcctcagattcaggttatgccgctcaattcgctgcgtatatcgcttgctgattacgtgcagctttcccttcaggcgggattcatacagcggccagccatccgtcatccatatcaccacgtcaaagggtgacagcaggctcataagacgccccagcgtcgccatagtgcgttcaccgaatacgtgcgcaacaaccgtcttccggagactgtcatacgcgtaaaacagccagcgctggcgcgatttagccccgacatagccccactgttcgtccatttccgcgcagacgatgacgtcactgcccggctgtatgcgcgaggttaccgactgcggcctgagttttttaagtgacgtaaaatcgtgttgaggccaacgcccataatgcgggctgttgcccggcatccaacgccattcatggccatatcaatgattttctggtgcgtaccgggttgagaagcggtgtaagtgaactgcagttgccatgttttacggcagtgagagcagagatagcgctgatgtccggcggtgcttttgccgttacgcaccaccccgtcagtagctgaacaggagggacagctgatagaaacagaagccactggagcacctcaaaaacaccatcatacactaaatcagtaagttggcagcatcaccaaaaagctgtagataatatgaccatagacattgaatcaggagactttattgcatttattgggacaagtggtagcggtaaaacaactgcccttagaatgattaatcgtatgattgaatctacagagggagaaattaccattgacggtaaaaatatcaaagagcttaatccggttgagcttcgtcgcagtatcggttatgtcatacaacaaatcggcttaatgccacatatgacagtgaaagagaatattgttctcgtaccaaagttattaaaatggtcacaagagaaaaaggatgagaaagcgaaagaacttatacgcttagtagatttaccagaagaatatttagatcgatatccttcagaattatcaggtggtcaacaacaacgtattggtgttgtaagagcactcgcagctgaacaagatattattttaatggatgaaccgtttggtgcactcgatccaatcacaagagatacattacaagacttagtcaaaaaattacaacaacaattaggaaagacattcatttttgttacacatgatatggatgaagcaatcaaacttgcagataaaatatgtattatgacaaatggacaggtgattcaatatgacacgccagataatattttacgtagtccagcgaatgatttcgttagagactttattggtcagaatcgcttaattcaagatagacctaatatccgtacagttaaagatgcgatgattaaacccgtgacagtacatgttgaccgttctcttaatgatgcggtgaatattatgagagagaaaagagtcgatacgatatttgttgtcggcaatgatgagcatttattgggttatttagatattgaagatattaacgaaggattaagacatcataaagaacttatagatacgatgcaacgagatatttatagagtacgtattgatagtaagttacaagattctgttcgtacaattcttaaacgtaatgtacgtaatgtacccgttgttgacagtgataataaaacattattaggccttgtcacccgagctaaccttgtagacattgtttatgacagtatttggggagagttagaatcgggtaacaatgataatcattctgggattgttgaacccgagtccacaggagttgagacaccatgataaagtttatttcggaacatagtggtatgttatttgcaaagacattcgaacatttgtacatatcgatagtggcattggttattgcaatgattgtagcggttcctttaggcattttattatctaaaaaggaaaagctttcgaaagtgtcattgacgatagctggcgttttacaaacgatacctacattagcggtattagctttaatgattccattatttggtgtaggaaaaacacctgcaattatagcgttatttttatatgtattattaccaattttaaataatacgattataggcattcaaaatatagattccaaccttagagaagcaggacgtagtatgggaatgactaactttcaattgatgaaagatgtggagttgccactcgcattaccattaatacttagtggaattaggctgtcttctgtctacgttattagttgggcaacattggcaagttatgttggtgctggtggtttaggtgattttatctttaacggattagcgctatttgaaccgagtatgattattactgcaactattcttgtcactgctattgcacttattgtagattatgttttatcactgattgaaaaatgggttgtacctaaaggattaaaagtttccagataatcattgaaggaggataatatgaagaattataaaaaatatctaattgttttagtattatgtctaacagtgttatctggatgtaacttacccggtttaaaaaatagtcattcagatgacgatgttagaatcacaagtttaggaacaagtgaatcacaaattatatcgcacatgctgagattacttattgaacatgatacaaaaggtgaaattaaacctaccttaattaataatttaggttcaagtacgattcaacataatgctgtcacaagtggccaagctaatatgtcaggtacgcgttatacaggcactgacttaacaggggcgttgaaagaagatccgattaaagatcctaaaaaggccatgaaagcgactcaagaagggtttaaaaagaaatacaatcaaaccttcttcaattcatatggttttgaaaacacatatgcattgatagtaacaaaagagacagctaagaaatatcatttagaaactgtttcagacttagaaaagcatgctaaagatttaagagtaggtatggatagttcatggatggaccgtaaaggtgacggttatccagcatttaaaaaagaatatggctatagtttcggtacggtaagacctatgcaaattggtcttgtctatgatgcactgagttctggcaaattagacgttgccgtaggttattctacagatggacgtatttcagcatatgatttaaaagtgttgaaagatgatcgtcgattcttcccaccatacgatgccagtccacttgcatcagatcaattgttaaaagagaagccagagctcaaaccgattgttaaaaaattagaaggtaagatatcaacagaacaaatgcaagaattaaattatcaagctgatggtaaagggaaagagcctgcaacagttgcagaggacttcttgaaaaaacatcattattttgaagacgatgacaataaaaaagataaacagaaaggtggtcaataaacatggaagggaatttaatacaacaactcgttcactactatcaaatgaactttggctacctatgggaattgtttgttaatcatttgttaatgtctgtttacggtgttttactagcatgtttagtgggcatacctcttggtatcatcattgcacgatttggtaaattatcaggtgttattatcactattgcgaatattattcaaactgttccggttattgctatgtta

SEQ ID NO: 3766 - DNA, 3668 bp, Artificial Sequence
  Description of Artificial Sequence: synthetic nucleic acid sequence
ggggaggcatttttccatcaaatatttggtgattttatagaagaactaggggatttatttgaaggaggaacttattaaaatatgaaatattgcagtaattgtggtcaacctcttcgagaaggtgtaaaggtgtgtacaaattgtggtacgcctgtgagaaatgatggacctaattataaacattcagaacaacgttattctcatcaacaaccacgttccaataagagtaataaaaaaacttggttgattgttactatagtgttagccattatcattgctttggtagtaatctttactatagctaaaaatcaaatgtctccagaaaaacaagcgactcacattgcacatgctatcaaaaaagacgatgctaaatcattatctaagcaattaacatcaaacgatcatcgtttaaatgaagaagaagcacgtgcgtacttaaagtatattaaagcagaaagtgatttaaagcatgttgctgacaaagttgaagaaaacaccaaagatattaaaaataatcactataacaatttatctgtagatgcaaatgataataatattttaaatatatctaaagacgggaaaaaatatgttttttttgataactatcaatttaatgttcctcaaaaaacaattacgctcgtttcaagtgatagtggtgaaattacttatgaatttaacggggataaacatcatatttctgtagaagaagatgacgataaagaattaggaacatttcctatcggtgattataatttaaaagcatcaaaagacatggaaggtaaaaattttaaaggcgctttcacttcccatgaaaacaataagatccatatcgaataaagcagcgatggtggcacttgctacaccatgttgaccagcacctgtttcggctactaatttagttttccccatccttttagctaatagtgcctgtcctatcgcgttattaattttatgagcaccagtgtgatttaagtcttctcttttaagatatattttggcaccacctaacaattttgtgtagggggtatattatcaaccacgttaaatttaatgcaatcataataaaagcaccaaatgccattaaaaatcatatgaactcattaaactaaaaactaaagataagctaatccaccaaatgtgttttattgtcttttatgcttttattttgtctttttttaattaataatattccacacactagccaagatataaaagtaatcatatttaaacttaatattgcacctataatataaaatacaccacttgctatagtattagtttttttcttcatcatacctataattccaaaaatgattgaaaaaattgcaacgatgaatataaccaaaaatccaacactaaaaacatgctgtgcggcttctgcactatgaactgttgtttcaccattaactgttgtagtaaaattagcatccatcgctccagtaattgaaaataccaagaaaactaaaaacaatagactagaaaaactttgtaaaatgattcctatcaatgatgttatattaattgctttattcatcataattctcctttcattttctacgtatatccttacaatcaggtttatgttctttaatataatctttaggatttatatctcgtttatagtagactttctttccctttatttcatatgcaacataaaatagttgctctttatttttgaataatttataactaataataatcaattttccgtctttaaaaacgtatctatttactttttctttttcaaattttggtctaactttttcacttttatgggccatttcttgatgtgttttttcttgaatttttaatatcttttttatttcatcatgatattgaatattattatgttgattttttgcccccttattacatccaactactgttataataagaattaacaaagttaagatgaatattttttatattatcacttcatatttaataatatacacataaaaaaagagattaaatatatatattcaacctctttttataaattactggagcaatttaatgatgttgtaccccaaagctacaacagctacaattatagaaatctgtaataattgtgccccttttttctcatcatattttttgtatttaatactacaaatgatactacctacaccaagtaatggaataattactgatgtaacaataaaaatccatgcccacacttttagagccttccctgttttttccataaatgttctatcctcctgttaataactataacaataactgtttataatcaccgttactctcattatatgaaattcccattcattttcatataataaattaaatataattatattttttcataatagaactatcttttaaatatattgtaaactgaaattcatgtcgtaattatctttaaaatgataaataacacaatgataaaaagcgatttaatagtgatgaaagaaaatttttccttttgatccataaaatgaaatcaatgataaagtaagtaatagagactagcataacaattatgagaatagtttcgatttcttacacattcatttgaataatgaaaaagaacaaaatggtgaacaaccttttgcaaatccacgaaacgctgctgcaggctctttaagacaacttgactctaaactagctgcgaaaagaaagttaagcgtcttcttatatagtgtgaatgacctaaccgagtttaatgcaacaacacaaagtgaagcgctagaggaattggaccaattaggttttaaaactaaccaagaacgtgaacgagtatcagatattgagggcgtacttaattatatagagaaatggacaagcaaaagaggatctttatcttacgatattgatggtattgttataaaagttaacgatttatctcaacaagaggaaatgggttatacgcaaaaatctccaagatgggcgattgcttataaatttccagctgaagaagttattacaaaattattggatattgagctaagtattgggcgtacgggtgttgtgacaccaactgcaattctagaacctgtaaaagtagctggtactacagtttcaagagcctcacttcataatgaagatttaatacatgaaagagatatacgtatcggagatagtgttgttattaaaaaagccggggacatcatccctgaagttgtaaaaagtattttagatagacgacctaacgaatcggaaatttatcatatgccaacacattgtcctagttgtggacatgaattagttcgtattgaaggagaagttgctttacgttgtattaatccaaaatgtcaggcacagcttattgaaggacttatacatttcgtttcaagacaagcgatgaatatagatggtttaggtactaaaattattcatcagctatacgaaaatcagttaatcaaagatgtcgcagatattttctatttgaaagaagaagatttattaccattagagcgaatgggaaagaagaaagttgataatcttttattagcgatagaaaaatctaaagaacagtcattagagcatttattatttggacttggtattagacatttaggtgtaaaagctagtcaagtacttgctgagcgatatgaaacgatggatcaactttttaaagtaactgaaagtgaattaattgaaattcaagatattggagataaacttgcacaatctgttgtctt

SEQ ID NO: 3767 - DNA, 3709 bp, Artificial Sequence
  Description of Artificial Sequence: synthetic nucleic acid sequence
acgtaaatcagcattatcatgacgtagtaataatcgatattccgcacgtgaagttaataatcgatacggttcatttgtacccttagtgactaaatcatctataagtacaccaatatatgcgtctgaacggctgagtattttttcacctgtacctaaaacattaccagcagcgttaatacctgccatgattccttgtcccgctgcttcttcatatcctgatgttccattaatctgacctgcagtatacaagtttttaatcgcttttgtttctaacgttggccataattgagtaggcacgattgcatcatattcaatagcataacccgcacgcatcatatctgctttttcaagacctggaatggtttctaacatttgacgttgaacatgttcaggtaaactagtagataatccttgcacgtatacctcattcgtattacgtccttcaggttctaagaaaagttgatgtcttggtttatcgttaaagcggacaaatttatcctcaattgatggacaatatctaggacctgtacctttaatcataccggaatacatagcagataaatgtaagttatcatcaatgacttgatgtgtatctccatttgtataagttaaccaacaaggtaattgatctaaaataaattcggttgtttcaaaactaaacgctcgacctatatcatcacctggttggatttcagttttagaataatcgatggttctcgcatttacacgtggtggtgtacccgttttaaatctaacgatatcaaatcctaattttcttaaattatccgctagagttacagatggtaattgatggttagggccactagaatattttaagtttcctagtataatttctccacgtaagaatgtacctgttgtaataatgacagctttagaacgatattctgtaccaatattagtacgaacacctttaacttcattatcttctataatgagttcatcaaccataccttgcatgatgtctaaattatcctcattctcaagtacacgcttcatttcttgttgatataatactttatctgcttgagcacgtaaagctctaacagctggacctttacctgtattaagcatacgcatttgaatgtgagttttatcaatagtttttgccatttgtccacctaaagcgtctatttcacgtacaacgattcctttcgcaggaccacctacagatggattacatggcatgaaagcaatattatctaaattaattgttaacatcagtgttttagcaccccggcgagctgaagctagacctgcttcaataccggcgtgaccagcaccaatgactactacatcatattcttgaaccactcttttacctcccaaaagtcataaaatcttgaattttagacgtcttaccgtcttgtttatatttttatatcattattttcctaaacaaaattgactaaatagttgatctattaattcatcactcgctgattctccaataatttctcctagaatttcccaagtacgtgttaaatcaatctgtaccatatccattgggataccagactcagcagcatcaatcgcatcttgaattgattgtctcgcttgtttcaacaatgaaatgtgacgtgaattagatacataagtcatatcttgattttgtacttcgccaccaaagaataaatctttaatttgtatttctaattcatcaataccttcttgtttaagcatcgatgtttgtataagtggcatatcaccaatcatctctcttagttcgctaacatctaatcgctgttctaaatctgttttattaatgattacaataacatcctcatttttaatgacttcgaataaagtttgatcatcttccgtcagaggttcattgttattaagcacaaataaaattaaatctgcttcacttaaagctttcctagaacgttctacaccaatcttctctacgatatcttcagtatccctaatacccgcagtatctacaagtcgtaacgggacacctctaacattgacatattcttctaacacgtctcttgttgtaccagcgacctcagtcacaattgctttattatcttgaataaggttatttagcatcgaagacttcccaacattaggacgtcctacaataactgtagataacccttctctcattattttaccttgtgctcctgtttcaagtaactgattgatttcttctttaatacgcttagactgttctagtaagaagtccgtcgttgcgtcttctacatcatcatactctggataatcaatgttaacttcaacttgggcgagtatctctaatatggattgacgttgtttcttgattaagtcacttaaacgtccttctatttgattcatcgcaaccttagaagctcgatcagttttggaacgtataaaatccataaccgcttctgcttgagataaatctatacgaccatttaaaaatgcacgttttgtatattcacctggttctgccatacgtgcaccataagtcatagttaactctaatatacgattaattgttaaaataccaccatgacaatttatctcaataatatcttctcgtgtgaaagttttaggggcacgtaatacagacaccatgacttcttcaactgtttcatttgtttctggatcaataatatgaccgtaatttattgtatgcgtctcaacttcagataactttttcttacctttatataagatatctccgatttcaatagcttgtggcccagataatctcacaattccaatagcaccttcacccatcggtgttgaaatacttgtaatcgtatcaaaatccataagagtctcgcctccttattaatgtaaaaattcattataacattgtaatttgtttcttttaaaaaagctaataaactgttcaacattcatatgtaagacttcggtttgtgtaacgttagacttcggtttctctaagtcccctgccctacttaatctttttattaaacacttttgcaattttaagcacatgctctaaactactttgaatctccagtgtattcatatcttttgctggttgcctcgcaataactataatatctttagcgataatattttgcttatgcactttaaaattctctcttatcgctcttttaattctatttcttgtaacagcgttgcccagtttttttgagacacttattcctaagcgaaaatgttttaaatctctatttttataggtatagacaacaaattgtctatttgcaacagacttcccattcttgtatatcgcttgaaagtctgaatttctcttaatacgatatgctttttccattaaacatcactcgcttattctaatctattcattttaatagtaacaattatctattaacaaaacatacgtatatattattttgaaaatgatatcagaacaatacttaaatatcattttattatttaaacaaaaaaaagaccactgatgattcagtgatcttatgcagataaaactttacggcctttacgacgacgacgcgctaaaactttgcggccatttttagtgctcatgcgttttctgaaaccatgaactttactatgtttacgtttatttggttgataagtacgttttaccatgcaaaacacctccatctgaattcaattaccaatatttccaacttcctacctagaaattggttcatataaatagataaattaacgaagtatttattagcttcaattactaacatacttcatctgagcaattgctctc

SEQ ID NO: 3768 - DNA, 3643 bp, Artificial Sequence
  Description of Artificial Sequence: synthetic nucleic acid sequence
tacatcaatttcatcaatgacacctgctttaacataagaagcttttgcggagccattttccccaccttcttcagcaggacatcccaaaacgactactttaccaccaatttcatcgacgacttcttttagtgctactgcagcaagtacgctagcagtaccaataatattatgcccgcatgcgtgaccaagaccaggtaaagcatcatattcagctagaaatcctataaccggtccagtcatatcagaatcatacgttgctataaatcctgttgcatgtcctgcaatatccgtttcgatttcgaatcgatttgctcttaattggtcaattaatgttctcgatgcaaaaatttcttcattgcctaattcagggcgttcatgaatacgatgacttatttcaacataatcatatttattattttctataaaatctaatatcttttgtttattatgcattgtatctaactccctttgaaactttgcgtatcaatcattcttttttaattattacttattttatcggattgaatattggttgtcattaatttttacacaattttcttacaatttaaaagacaacagtctattagtttagaaaaattgtaaatgtattagagtattgttacaatctatttattgaattaaacaaaaaattgctgtagagcaataaggaggataaatgcatgactaaaatgaatgtagaaagctttaatttagaccatactaaggttgttgcaccttttattcgtctagccgggactatggaaggtcttaatggtgatgtcatacacaaatatgacattcgtttcaaacagcccaataaggaacatatggatatgcctggtctacattccttagagcatttaatggcagaaaacattagaaatcatactgataaagtagtagatttaagtcctatgggttgtcaaactggattctatgtttcatttattaatcatgacgactacgatgacgtattaaatattatcgatcaaacattgcatgatgtgttaaatgctagcgaagtcccagcttgtaatgaggttcaatgtggttgggctgcaagtcattctttagaaggtgctaaaacaattgctcaagcatttttagataaaagagagcaatggaatgacatctacggagaaggtaaataattaacaatacaactaagcataaaagcttaattaatatcattatggagaaatgtcgaatgaatcttcccttcgatgtttctcttttttataaaaaagccttctaaaatactaactagttagcattttagaaggtcttattttctgtaaaaattataattttttaatggctttaataagcacaaattgcaatggtaatctcgaataaagtgcccatttaggtagttctttgtcacctaatggcaatcctttacgagccatataaatatttgctgggaacactgctaacaagaataaattaataccctttttcaaccatgatgctggtcttttaataagcaacatgataccaaaaaagatttctataatacctgttaccaatacagcagttttttgtaaaggtaaataatctggaacaatatttctaaattgtctctctctagtaaaatgtaaaacaccagctgttccaaatgctagtcctaataagaatcttaaaactttcattgatgctcaacccccatttcttttaaataactttttccatatttaggtaattctacgttgaagttatctgctattgtaacaccgatagagctaaatgtcgtgtcttgtgaaagttcatgataatctttaattttcggactaaacattaaaagtggaatgtattcacgtgtatgatctgtacctttagcaattggatcattaccatgatcagctgtaataataactaaatcatcttctcttaaatgattcattaattcaggtaaacgaagatcaaaatctttaattgcttgagcatagccttctttatcacgacgatggccatacaatgcatcaaaatcaactaaattaaggaaactgataccttcaaaatctttttttacaacttcaatcaattgatccataccgtccatattatttttagtacgtatagcttctgtcacgccttcaccgtcataaatatcgttaattttaccaatcgcgattacatcataaccattatctttaaggctattcatcaccgttcgtccaaatggttttaacgcgtaatcatgtcgattagaagttctagtgaagttaccaggttctccaacatatggtcgagcaatgattcttcctattaaatatttaggatcttttgttagttcacgaactttttcacaaatctcgtaaagttcttcaagtggaatcacgtcttcatgtgcagcaatctgtagaactggatcagcactagtataaactattaaatctccagttttcatttgatgttcgccccactcgtcaataatctgagttcctgaagcaggtctatttgctacaaccttgcgtccagtcattgattcaatctctttaacaagctcttctgggaaaccatttggataaaccttaaatggttgcattatatttaaccccataatttcccaatgtccagtcattgtatccttacctactgaagcttcacttagtttggtataaaatgcacctggatgtgtaacttttgaaacaacaggaagcggtgcaatatttcctaatccaagttgttctagatgtggtaacttttgcttaaatccttctaaagtatgctttaaagtgtgtgatccttcgtcattgaatgccgctgcatcaggaccttcgcctatacctactgagtccataactattagatgaattcttttgaacggtgtagtcatcatttacatctcctactcggttattattttatgaattaaggttggagcttcgcccttactctcaatagtaatactattgtctagtttatataaaatatcatcgatctctttggtgttggtatgaatagttaaaatattttcacctttctcaacatgttctcctacttttttatttaacacgatacctacacctaaatcaataacgtcttcttttgtttgacgaccagcgcctaacatcattgaagcaacgcctatctcattagctattatttcagttatataaccatcttttttagctttaaattcaacttgatatttcgcgctaggtaacttttcaggagaatccacaatagagtcatctcctccttgattcgatagaaatgttttgaatttgtttaaagctttgcctgtttttatagcatcgattagcatctgacgcgcttcatctaaagatgttgcttgttcagctaagacaaccatttgagaaccaagtgttaacacaagctctgttaggtctttcggcccatttccttttaatgttgcgatagcttcttttaattcgagcgcattaccaattgcatttcctaaaggttgactcatatctgaaataatagccatcgtattacgacctacattattaccaattcttaccatcgcatgcgcaagcgcttcggcatcatctagcgtcttcataaacgcaccactgccagttttgacatctagaacaattgcatctgcgccagcagcaattttcttactcattatggacgaagcgattagaggaatagaattaactgtcccttt

SEQ ID NO: 3769 - DNA, 3867 bp, Artificial Sequence
  Description of Artificial Sequence: synthetic nucleic acid sequence
cagtaaatactgcccatcagaatttacatggacaacaaaagttagaacaagcacaaagtagtgctaatacagaaatcggtaacttaccaaacttaactaatactcaaaaagctaaagaaaaggaactggtaaatagtaaacaaactcgtacggaagtacaagaacaacttaaccaagctaagtcactagatagttctatgggcacgttaaaatcattagttgctaaacaacctacagtacaaaaaacaagtgtttatattaacgaagatcaacctgagcaatctgcctacaatgattccattacaatgggacaaactataattaataaaacagctgatccagtacttgataaaactttagttgataacgcaatcagtaacatttcaactaaagagaatgcactgcatggtgaacaaaaattaacaactgctaaaacggaagcaattaatgcacttaatacattagctgatttaaacacacctcagaaagaggctattaaaacagctattaacactgctcatacaagaactgatgtaactgcagagcaaagtaaggctaatcaaataaatagtgcaatgcacacgttgagacaaaacatttctgacaacgaatcagtaacaaacgaaagtaattatattaacgctgaacccgaaaaacaacatgcctttactgaggctctaaataatgctaaagaaatagttaatgaacaacaagccactcttgatgccaattcaattaaccaaaaagcacaagcgattcttactactaaaaatgctttagatggtgaagaacaattacgtcgtgctaaagaaaatgccgatcaagaaatcaatacgttaaatcaattgactgatgcgcaaagaaatagtgaaaaaggtttagtcaacagttctcaaactagaacagaagttgcttctcaattagcaaaagctaaagaactaaataaggtgatggaacaactgaataaccttatcaatggtaaaaaccaaatgataaatagcagtaaatttatcaatgaagatgcgaaccaacaacaagcatattcaaatgcgattgcaagtgcagaagtgcttaaaaacaaatcacaaaaccctgaattagataaagtaacaattgaacaagcaattaataatattaattctgcaattaataatctaaacggtgaagctaaactgactaaagctaaagaagatgctgttgcttcaataaacaacctaagcggattaactaacgagcaaaaaacaaaagaaaatcaagccgttaatggctctcaaactagagaccaagttgctaacgttttacgtgattcaaaggcattagatcaatctatgcaaacattacgtgatttagttaacaatcaaaatgtaatacattcaacaagtaattattttaacgaggattcaactcaaaagaatacttatgataatgcaattgataatggctcgacatatataactggtcaacacaattcagaattaaataaatctactattgatcaaacgattagccaaattaacacagctaaaaatgatttacatggtgcagaaaagttacaaagagataagggaactgctaatcaagaaattggacaattaggttatttaaatgaccctcaaaaatctgctgaggaatccttagtcaacggttcaaatacacgttctgaagtagaagagcatcttaatgaagctaaatcattaaataatgcaatgaaacaattaagagataaagtagctgaaaagactaatgtcaaacaaagtagcgattacattaatgattcaactgaacatcaacgtgggtatgatcaagcacttcaagaagcagaaaatattattaatgaaatcggtaatccaacattaaataaatcggaaattgaacaaaagttacaacaattgactgacgctcaaaatgcgttacaaggttcacatctattagaagaagctaaaaataatgcgattactgaaatcaataaacttacagcattaaatgatgcacaacgtcaaaaagcaattgaaaatgttcaagcacagcagacaatcccagcagttaatcaacaattaactttggatagagaaataaatactgcaatgcaagctttacgagataaagtaggccaacaaaataacgttcaccaacaaagtaattatttcaatgaagatgaacaaccaaaacataactatgataattctgtacaagccggtcaaactattattgataaacttcaagatccaatcatgaacaaaaatgaaattgagcaggctattaatcaaatcaatacgactcaaacagcgttaagtggagaaaataaattacacactgaccaagaaagcacaaatagacaaatagaaggtttatctagtttgaacacagctcaaatcaacgccgaaaaagatttagtcaatcaagctaaaacaagaacagatgttgctcaaaagttagctacagctaaagaaataaattctgctatgagtaatttaagagatggcattcaaaataaagaggacatcaaacgtagcagtgcatatatcaacgcagatccgactaaagttacagcttacgatcaagcactacagaacgcagaaaatatcatcaatgccacaccaaacgtagagcttaataaagctacaattgaacaagcgctatcacgcgttcaacaagcacaacaagatcttgatggtgttcaacaattagctaatgctaaacaacaagctacacaaactgtcaatgggttaaatagcttaaatgacggtcaaaagcgtgaattaaatctattaattaattcagctaatacccgtacaaaagtacaagaagaattaaacaaagcaactgaatcgaaccatgcgatggaagctttaagaaacagtgttcaaaacgttgatcaagtaaaacaaagtaacaattatgtcaatgaagatcaacctgaacagcacaattatgataatgctgtcaatgaagctcaagctacaatcaacaacaatgctcaacctgttctagacaaattagctatagaacgtttaactcaaactgttaacactacaaaagatgcattacatggtactcaaaaactgatacaagaccaacaagctgctgaaactggaatacgtggtttaacgagtctcaatgaacctcagaaaaatgctgaagtagctaaagtaactgcagcaacaacacgtgatgaagtgagaaatattcgtcaagaagcaacaacattagatactgcaatgcttggtttacgtaaaagcattaaagataaaaacgatactaaaaatagtagtaaatatattaatgaggatcatgaccaacaacaagcttatgacaatgctgtaaataatgctcaacacgttatcgatgaaactcaagcaacgttaagctcagatacaatcaatcaattggcaaatgccgtaactcaagctaaatctaatcttcatggagatactaaactacaacacgataaagatagtgctaaacaaacgattgctcaattacagaatttgaattcagctcaaaaacatatggaagattctttaattgataatgaatctacacgtacgcaagtccaacacgatttaacagaagctcaagctttagatggtttaatgggtgccttaaaagaaagtattaaagataatactaatattgtttcaaacggtaattacatcaatgcggaaccatctaagaaacaagcatatgatgcagctgtacaaaatgctcaaaatataataaatggaacgaatcaaccaacaattaataaaggtaatgtcactacagcaacacaaaccgtgaaaaatactaaagatgccttagacggtgatcatagattagaggaagctaaaaataatgccaatcaaacaatcagaaatctatctaatt

SEQ ID NO: 3770 - DNA, 3074 bp, Artificial Sequence
  Description of Artificial Sequence: synthetic nucleic acid sequence
agtagccagatctaggtttcgaataaatgaaaccctcatctacaagtaattgatatgcatgttctattgtagtgtggctaacagataaatagttacttaactgtcgtttagatggaaatctatcatttgattgatattgaccttcgataatttgattttttaacttttcatataacgataaataaagtggttgatttactttcaattaactgacccctatctttatgtacaaattgaacctttttaaatatcagtttatctcgtaaaatatatttaatcaataagaaaaggggtaagtagtatgtctaaaatagtaggatcagatcgagttaaaagaggaatggctgaaatgcaaaaaggcggtgtcattatggacgtcgttaatgcagaacaagctaaaattgctgaagaagccggagctgttgccgtaatggcattagagcgtgtaccatcagatattcgtgctgctggcggtgttgcacgtatggcgaatcctaaaatagttgaagaagttatgaatgccgtatcaattccggttatggctaaagccagaattggtcatattacagaagctagagttttagaatcgatgggtacacggtttcaagaacccaacatactacaaacgaatttcaaaaggcgagagtaaagctgacttgttttttatacggatttaaaatccaagagtctggacagtctacttctctctataactataaaaaatagctatgaaaaaatctatcgtcatagatttcttcatagctaatcttagtatgttttattttacaaattaatattttgctagattaagacgtaggtttaacaaccttaaaatcaagttctttattgtcatttaaatctactttaattattgtaccttcaggtagactttctttaatcatcatacgtgcaattggagtttctatttgtcgttgaacaaagcgttttaatggtcttgcaccaaattgtggttcatacgcttcttcacctagccattttttcgcttcttctgtcacttcaattgagatatgttgatctaataatctcatatttaattgtgttaaaattttatctacaatcatactcatatcattaactgataatggtttaaataacacgatgtcatccatacgatttaatatttcaggtttgaagtatgcatgtagactgtccataactgctttctctgtatcatcactaatttcaccagcatcttttacattttcaagtaatacttgtgaaccaatattactagtcatgatgataatggtatttttaaagtcaacacttctacctttagaatccgtaagacgaccttcatctagtatttgaagtaatacattaaaaacatcgctatgtgctttttcaacttcgtctaacaaaataactgagtatggattacgtctaactgcttcagttaattgaccaccttcatcgtgacctacataacctggaggtgcaccaattaaacgtgatacagcatgtttttccatatattcgctcatatcaattctaatcatatgtttttcagaatcgaaaagtgatgaagcaagcgattttgctaattcagttttacctactccagtaggtcctaagaataagaaacttccgattggtctattcggatctttaattccagcacgtgctctaactactgcgtctgatactaaatcaactgctttatcttgacctactacacgtttgtgtaagatgtcacttaaacttaatagcttttctctttctgtttccacaagtttagatacaggtatacctgtccattgactaactatgtcgcctatttcttcatctgaaacgacttcacgaatcattctttcactatcttcgccagtttcatcttgaaaggcttcctcaaatttttgcaattctttttctaattgcggaattgtaccatattgtaattctgctgctttttcaagattaccttctgtttgtgcatcttcaagagcttgacgactactatctagttcagcacgtttttcttgtactttagcaattttttctttttcttgttcaacacgtgattttaaagaggattgtttttctttttcattagataattcctcttgaagctcttctaaacgatgtttacttgggttatcagattcatttttcaaggcactttcttcaatttctaattgcattactcgacgatttacttggtctaactctgttggatttgatcccatttctgtacgtattgtcgcacacgcttggtcgactaaatctatagctttatctggcaaaaatctatcggtaatatatctatcagatagctcagccgctgcaacaagtgcacggtcttgtatacgtacaccatggtagacctcataacgttcttttagaccacgtaaaattgatattgtatcctcaacatcaggttcactgaccccaactttttggaaacgacgttctaatgctgaatctttttcaatatattcacgatattcatttaatgtcgtagcactatacaatgcaattcaccacgcgcaagcattggtttcaacatgtttcctgcgtccatagcaccatcagttttaccagcgcctactaacatatgaatttcatcaatgaataagatgattcgaccttcagattcttttacttctttcaatactgcttttaaacgttcttcaaattcacctctatattttgcacctgcaactaaggcacttaaatcaagctcgaaaatcgttttatcgagtaatgattctggaacgtctttacgtacaattcgttgtgctaaaccttcaacaattgcagttttacctacacctggttcaccgattaaaaccggattattttttgtttttcgacttaatatacgaattgtattacgtatttcttcatctctaccgatgacagggtccattttaccttgacgtacttcttctacaagatcacgaccatatttttctaaagcttcatagtttacttctggattttgagatgtcacatgatttccccctctaactttagttataatttcttttatcacttctactttattgccgacccatttttgagtagtttcatcagtatctatggctgcacgt

SEQ ID NO: 3771 - DNA, 3247 bp, Artificial Sequence
  Description of Artificial Sequence: synthetic nucleic acid sequence
aacgttcttctatcaattgcaataattatttcctttccaaactaaaaagtcgttgtaaagtggctataagtcatctccctcattcacgcacattacaacgacatgttatatataaattaaaacatttcagaaacaactttttgttctaagaaattaagtaagtaatctggacttcctgttttagcatctgtaccagacatcttgaatccaccaaatggatgataacccactactgcagctgtacaacctctattcaagtaaaggttacctacatcaaattcattcacagccttaatccaatgttcacgatgattagtaattacagcgcctgtcaaaccatagtcagtatcattagctacttcaatagcctcatcaaaatccttgaccttaataaagcctacgactggtccaaaaatttcttcttgcatgatacgatccgcagattgtagtccggagaaaatcgttggttcaatgaaataaccggtagaatcatctgttccaccaccagtctctagtttgccttcttttttaccaatttcaatataatttttgattttatcaaattgtttttgattaattactggccccataaatgtgttctcttcagtattacctaaagttaatttttgagttaattgaattgctttttccaatatttcatcatgtacgtcttgatggactatgacacgagaacacgcagagcatttttgaccagagaaaccaaaagcagatgtaacaattgcttcagccgctaaatctgtatctacattattatctacaactatcgcatctttgccacccatctctgcaataacacgttttaaaaactgttgtccttcttgcactacagcactacgttcataaatacgtgtacctgtagctcgggatcctgtaaatgtgacaaaatgtgtatctttatggtcgactaaataatctccaatttcttttggatcaccaggaacaaaatttacaacaccttggggtaaacctgcttcttctaatatttccattaatttataagcagtcaaaactgtatcctcagcaggctttaataatacagtgttacctgcaacaacaggggctaaggttgtaccagccataattgcaaatggaaaattccatggtggaattgtcacgcctgtaccaataggtttataaaaatagcgattatgttcaccttctctgtctaatactggcttaccatctgcaagttccatcattgatcttgcataatattctataaaatcaataccctcagctgcatctccaactgcttcatcccaaggcttgccggcttcataaaccataatagcggaaatttcctcttttcgacgacggataattgcggctacacgtaacagtaattctgcacggtccttatgcgaccacttcttccatgattgatacgcatgatttgctgattcgaaagctttttcaatatcatcttgcgttgctttagacactttcgcaatgagctgtgatgtattcgcaggattcactgaattaaaagtatcagttttagtaagtttttctccgttaatcacaagtggtatatcttgtcctagttgcgcttttactttccttaattcttcattaaaacgctcaacatttgtctgtactgaaaaatcaataccaggttcatttttgaaaggtactaccattctaattaccccctatgaatttatcatttctaccatcctttgtgcataaaggtatgacttgtcatcttcttttattttaaagatttttcttcgccataacctttgtattattttactatgtaagcttatatatttgcaaacgctttcattttaaagtaactgacttttagaaccgtataactctcgctttctataaataaatttacagttttaacattatctatgtttaaatatctcatttaacttatgcttatcaagggaattttttaaaattaatcgcttcatggccttattcttacgttactatcattgaacgtaaacatttattcgattattgtatagacgtctaatagaatcaaatctattaaaaatgatactcttttcacccatcttctcgtcatattacatctataaagtcgtttaatttcaactaatcttttctcaaaaatttagcactacttagaatgctaaacatcagctccaagtagcgctattaattttattaagatgtgataaaatcgccaccattgacatgaatgacttgaccagtaatataggaactatctgcatgtgttgctaagaagacataagaaggtgcaagttctgctggttgtccacgacgacccatcggcgtttcgtcaccttgatgttctactttttcttcatcaaatgtcgcaggaattaaaggtgaatagattgggccgggcgcaacggcgttaacgcgaattcccttttccattaaagtagtagcaagagaacgggtaaacgatactatggcaccttttgtagctgaataatcaatgagatgccccgatcctctatatgctgtgacacttgtagtgtttataattgtatctccttcagataggtaaggtactgctgattgggataaaaacatcataccaaaaatattcgtcataaaagtttctttcacttgttgtggagtgatatcttcaaaatgatcgcgtggaaattgcacgcccccattatttactaatatatttaaactaccgaagtcatttatgacatctttgattaacttttgagattgcttttcatcttttaagtcatgagcataagctttagcttttacacccatttcttgaagtcgattaactgtgtcttcggcatcttgatgttcgtcataataaccaatagcaacatttgccccttctttagcatatagtattgctatcgcacgtccaatacctgaatctcctcctgttattagagcaactttattctctaactttcctgctgctttatattcttctaattctgcaatgggtttaggttccatatccgcttcaatacctggttgtctattttgagtatatcctttgattttgttgtgaaattttaataaattcacttttcattacctcactttatgttttacatttaaattcccataaagttttatcatcaaacacgtacagtaattatattagaaaatctaatatgctattgtttaatcaaactaagggatgagtcaatatccattctatagacgcatgtttatcatcataaaaaaatgtacactcatatataattcaataaaggagttgtatcctatgagaaaaata

SEQ ID NO: 3772 - DNA, 3937 bp, Artificial Sequence
  Description of Artificial Sequence: synthetic nucleic acid sequence
tatgaagctggaatcgctagtaatcgtagatcagcatgctacggtgaatacgttcccgggtcttgtacacaccgcccgtcacaccacgagagtttgtaacacccgaagccggtggagtaaccatttggagctagccgtcgaaggtgggacaaatgattggggtgaagtcgtaacaaggtagccgtatcggaaggtgcggctggatcacctcctttctaaggatatattcggaacatcttctacgaagatgagggaataacgtgacatattgtattcagttttgaatgtttattagcattcaaattatataatgggcctatagctcagctggttagagcgcacgcctgataagcgtgaggtcggtggttcgagtccacttaggcccaccatttatttgtacattgaaaactagataagcaagtaagattttaccaagcaaaaccgagtgaatagagttttaaataagcttgaattcataaataatcgctagtgttcgaaagaacactcacaagattaataactagttttagctatttattttgaataacaattcaaaatatggtggaaacatagattaagttattaagggcgcacggtggatgccttggcactagaagccgatgaaggacgttactaacgacgatatgctttgggtagctgtaagtaagcgttgatccagagatttccgaatgggggaacccagcatgagttatgtcatgttatcgacatgtgaatttatagcatgtcagaaggcagacccggagaactgaaacatcttagtacccggaggaagagaaagaaaaatcgattccctgagtagcggcgagcgaaacgggaagagcccaaaccaacaagcttgcttgttggggttgtaggacactctatacggagttacaaaagaacatgttagacgaatcatctggaaagatgaatcaaagaaggtaataatcctgtagtcgaaaacatactctctcttgagtggatcctgagtacgacggagcacgtgaaattccgtcggaatctgggaggaccatctcctaaggctaaatactctctagtgaccgatagtgaaccagtaccgtgagggaaaggtgaaaagtaccccggaaggggagtgaaagagaacttgaaaccgtgtgcttacaagtagtcagagcccgttaatgggtgatggcgtgccttttgtagaatgaaccggcgagttacgatctgatgcaaggttaagcagcaaatgtggagccgcagcgaaagcgagtctgaatagggcgttgagtatttggtcgtagacccgaaaccaggtgatctacccttggtcaggttgaagttcaggtaacactgaatggaggaccgaaccgacttacgttgaaaagtgagcggatgaactgagggtagcggagaaattccaatcgaacttggagatagctggttctctccgaaatagctttagggctagcctcaagtgatgattattggaggtagagcactgtttggacgaggggcccctctcgggttaccgaattcagacaaactccgaatgccaattaatttaacttgggagtcagaacatgggtgataaggtccgtgttcgaaagggaaacagcccagaccaccagctaaggtcccaaaatatatgttaagtggaaaaggatgtggcgttgcccagacaactaggatgttggcttagaagcagccatcatttaaagagtgcgtaatagctcactagtcgagtgacactgcgccgaaaatgtaccggggctaaacatattaccgaagctgtggattgtcctttggacaatggtaggagagcgttctaagggcgtcgaagcatgatcgcaaggacatgtggagcgcttagaagtgagaatgccggtgtgagtagcgaaagacgggtgagaatcccgtccaccgattgactaaggtttccagaggaaggctcgtccgctctgggttagtcgggtcctaagctgaggccgacaggcgtaggcgatggataacaggttgatattcctgtaccacctagtatcgttttaatcgatggggggacgcagtaggataggcgaagcgtgctgttggagtgcacgtccaagcagtaaggctgagtgttaggcaaatccggcactcataaggctgagctgtgatggggagaggaaattgtttcctcgagtcgttgatttcacactgccgagaaaagcctctagatagataacaggtgcccgtaccgcaaaccgacacaggtagtcaagatgagaattctaaggtgagcgagcgaactctcgttaaggaactcggcaaaatgaccccgtaacttcgggagaaggggtgctctttagggttcacgcccagaagagccgcagtgaataggcccaagcgactgtttatcaaaaacacaggtctctgctaaaccgtaaggtgatgtataggggctgacgcctgcccggtgctggaaggttaagaggagtggttagcttctgcgaagctacgaatcgaagccccagtaaacggcggccgtaactataacggtcctaaggtagcgaaattccttgtcgggtaagttccgacccgcacgaaaggcgtaacgatttgggcactgtctcaacgagagactcggtgaaatcatagtacctgtgaagatgcaggttacccgcgacaggacggaaagaccccgtggagctttactgtagcctgatattgaaattcggcacagcttgtacaggataggtaggagcctttgaaacgtgagcgctagcttacgtggaggcgttggtgggatactaccctagctgtgttggctttctaacccgcaccacttatcgtggtgggagacagtgtcaggcgggcagtttgactggggcggtcgcctcctaaaaggtaacggaggcgctcaaaggttccctcagaatggttggaaatcattcatagagtgtaaaggcataagggagcttgactgcgagacctacaagtcgagcagggtcgaaagacggacttagtgatccggtggttccgcatggaagggccatcgctcaacggataaaagctaccccggggataacaggcttatctcccccaagagttcacatcgacggggaggtttggcacctcgatgtcggctcatcgcatcctggggctgtagtcggtcccaagggttgggctgttcgcccattaaagcggtacgcgagctgggttcagaacgtcgtgagacagttcggtccctatccgtcgtgggcgtaggaaatttgagaggagctgtccttagtacgagaggaccgggatggacatacctctggtgtaccagttgtcgtgccaacggcatagctgggtagctatgtatggacgggataagtgctgaaagcatctaagcatgaagcccccctcaagatgagatttcccaacttcggttataagatctctcgaagatgacgaggttaataggttcgaggtggaagcgtggtgacacgtggagctgacgaatactaatcgatcgaagacttaatcaatttttaaaaaacgttttgcgacgcaaaatcttacttactatctagttttgaatgtataatcattcatttgtctggtgacaatggcaaggaggtcacacctgttcccatgccgaacacagaagttaagctccttagcgccgatggtagtcggactgacgttccgctagagtaggacgttgccaggcaaatatcgtagctgccgggctacaaagtaaggctaaattggctgtaagtaccgaagcagttaatgcgcgtttaggctgaattcgtgctttttgtgcagttttcgctatgataggttcaagtgaaagagctatatttgcagtaccaattccaaaaacaaagacaaagacaatcattggcgctataaatataattgattttggaaagcgttcaatcacacgtgatgcaatgtatactaaatagtcaataccaccagtggc

SEQ ID NO: 3773 - DNA, 3830 bp, Artificial Sequence
  Description of Artificial Sequence: synthetic nucleic acid sequence
attatattcagtacgtcgtctaaccactgttttttggtgttctaagtaatggataagtgcttcttttaaattgattagtttaggtctaccattcactaaagcaatcatattcacaccaaatgatgtttgtaatggcgtttgtttatataaattatttaaaataacactcgcatttgcatctttacgtacatcaataactactcttacacctgtacgcaaacttgtttcatcacgtaaatctgtaataccgtcgattttcttatctctaactaactctgcgattttttcaatcatacgcgctttattgacttggaaaggtatttccgttacgacaatacgttgacggccaccaccacgttcttctatttcagcacgagaacgcatttgaattgacccacgacctgtttcataagctcgacgaataccacttttccctagtactaaaccagctgtaggaaaatcaggaccttgtatgtcttccatcagctcattaattgtgatgtctggattcttacttaaactgagcacaccatcaataacttcagttaaattgtggggaggaatatttgtagccatacctacggcaattcctgccgcaccatttactagtaagttagggaaacgtgcaggtaagactgacggctctctttcattaccatcatagttgtcaataaaatcaattgtgtctttgttaatatcacgtaaaagttctaatgttattttagtcatacgtgcttcggtataacgcattgcagctgcaccgtcaccatccatagagccaaagttaccttgaccatctacaagtggataacgataactaaagtcttgggccattcttaccattgcttcataaattgaagaatcaccatgagggtgatatttacccatgacatccccgactatacgtgcagatttcttataaggtttatcgggcgtcataccttgttcatttaaaccataaagaatacgacgatgtactggctttaatccgtctctaacatcaggtaatgcacgagaaacgataacactcatagcatagtctaagaatgattcacgcatttcactggttatatttcgttcattaattcttgattgaggtaattcagccatcaagagatcctccttcaaaagttcagttcatagtgtctagaaatctaggttggcataaactgcattgtcttcgataaattgtctgcgattttctactacatcgcccattaacatttcaaatgtttggtctgcatcaattgcatcttcaagtctcacttgcaacatagagcgatgttcaggattcatagtcgtttcccataattggtctgcgttcatttcaccaagacctttgtaacgtgcaattgaccattttggtgacgggtttaattcttgtttcaacttgtctagttctctatcgttaaatacataatatttttgttttccttgtgttagtttatataaaggcggctgagcaatataaacgtagcccgcttcaattaaaggtctcatgaaacgatagaagaatgtaagtaataacgtacgtattgttaatctatgcaagaataaatcgacgccacgttgtttttgtttaccaaacaattgttcagcgccaccactaatagcacctgaaagtccattacttttaccttcttggagtaatacaacagtcactaatgcaatacaatctataattaataaaacgatgattaatgtatgcataaaaattgtcctccgttcattatatacgaaagaaattataacacatctttattgatgtaatcaaacttctatctattgaaagtacttttacgtgtaatagaaacaactagcatataaattgctagaattatagatccaatcactacaattaaaattggtaaaactgcaagtacattttttacatctaaaataccttgaataaataagtaaagatttacgagtgtaaatagtgcattagaaatatatacggcaaacataaaccaccataaatatggatggcgattccagaaagcaacagtacctgctaagtaagctaaaatatacataattccagtgtatcggtcactatttaaaatgtttttcactgctgtatctgatgttttttgaccagctaaagataaaattgatttagctgttgattcatctaatacaataaagtggtgtatgataagtaaaatacaaaacactaatgaacttatcgcaattaaacgtccagttcttatttctttagcatttgagtctgtcataattgtactccttttacaaaattactcacatcattatatcagtttacattaataatttaaaatgtacttaactaaaaaagcccgttgcagcttcaactctgcaacggacaattcaattaagatattaaataataagcgtgaactcttataaaaattaaagagatattatttatctaaattgtagaaagatttaattccttcaaatttagctgtttcgtataattcatcttcaatacgtaataattgattgtatttagcaatacggtcagttctagataatgaacctgttttaatttggcctgcatttgtagcaactgcgatatcagcaattgtagtatcttcagtttcaccagaacggtgagatacaaccgcagtatatccagctttttgagccatttcaatagcatcgaatgtttcagttaatgtaccgatttggtttactttgattaagattgagttaccaataccttgttcgatacctttagataaaatttcagtgttagttacgaataaatcatcaccaactaattgaactttatcaccgatacgatcagttaattgtttccaaccttcccaatcgttttcatccataccatcttcaatagtgatgattggatatttaccaattaattcttctaagtagtcaacttgctctgctgcactacgtttagcaccgtgttcaccttcgaatttagtgtaatcataaacaccattttcatagaattcagaagaagcacagtcaaatcctaagaatacatcttcacctggtttgtatcctgctttttcgatagctttaataatagtttctacagcgtcttcagtgccttcaaatctaggtgcgaaaccaccttcatcacctactgcagtttctaaaccgcgttcacttaagattgatttaaggttatggaagatttctgcaccccaacgtaatgattctttgaatgactcagcacctacaggtaaaatcatgaactcttggaaagcaattggtgcatctgagtgagaaccaccattaacaatattcatcataggtactggcaattgtttaccattaaatccacctaaatatttatataatggttgacctaataagtcagcagctgcacgagctacggcaatagaaacacctaaaatggcatttgcacctaatttacctttgttgtgtgtaccgtctaattgaatcatcattttatcaatagatacttgatctaaaactgaaaattcaccttcaacgatttctggtgcgatcatttcgttaacattttctaccgctttagtcacacctttacctaaataacgtgatttatctccatcacgtaattcaactgcttcatgttcaccagtagaagcaccagaaggtactaatgcacgtccgaaagcaccactttcagttaatacttcaacttcaactgttgggttaccacgtgagtctaagacttcgcgagcgtaaacatctgtaataattggcatgtttaatatctcctttaattatattatatgactattatagcctttttctaaacttttataaaatgataatacatataaaaccaagaaaatttgaacatctatacgttgctgtaaattcttaat

SEQ ID NO: 3774 - DNA, 3202 bp, Artificial Sequence
  Description of Artificial Sequence: synthetic nucleic acid sequence
tatgttcttcgtagttgatattataacattttttatcagaacacacgcaaaagattatttattagtacaaaaaattgcacgtcatctatttttattttctgtcacctttctgtgttaaaaaaacactaacgaaatatttactatgatacaacatttctacgaataatcgattttatccgaatcagctgcacacaaaatctaaaaatattaaaatgtatgtgatgaaatttaacaatatttaaaaatgataatacgtgacatcaatatggtgattcaatttatcaaactcactatcatgtaaatgttttatgactttattgatacaaaataaactgtcgattgatgtattctaaaagaatttctattcgtaatataatagctgtcaaaccacaccttaaaacataatctttgccataaaacttttgaatagtagcatccaccaaatacaatgcatttacatccacacattcgtgaaagacgaggttaataaattatcaaaatagaaaaaagcagcaagatattttctcattaaataatatcttactgctgttcttatagatttatgtcttcacctttattaaataatatataggcatctcgaattacagaatgtttgattttaaatataaaacctgagacatctaccattatctcaggtttcatttacatattgacaatcgatgactagataaaaataagtttatatcaaccttttccaactctagtcacattgatttaaagaacaattctttcttatctctattttcaagattaaatgttcaatagtgtcataaatactcttagttattttgtatcttttccgtataattcttgcttgattttggtagttgagataccttctgtgcggttaagataaatgacttcacacttatctttaaggaagtcaaactccccttcccaatcatgacccatcacaaatacatcaacatcaaaacgatcaacatctttttctttctgtccccatccttcttcagggataactaagtctacgtatctaatagactctaacatcatcttacgttgttcataatcataatatgattttttgtttttgatttggttgaattcatcagtagaaagcgcaacgataagataatcccccatctcacgagctcttctaagtaattcaatatgaccataatgaagcaagtcatatgtaccataagtaatgactcttttcatgatacgaaattctccttaactaaaaatttaataaaaatttataatcttaatgtatcataaatattttgaccatgccattaatactatattagatactaaacataaataaatttaaaacttacttcaaagaaaagttattttttaaaaattctttttagtgattctttaccagaaaaggatatctttttaggtataacttgaagtttaaaacgaattaatcctggtctgccaattccaacctcactaagtgcctttttccattgtaagtataaaggctttgtccaatgtgttgcactctgttcaacagctctaacaattcgaaacatagcctctcccgagtaatgtgtatgctgcatagctttcatatacgctataacactttcaagcaaagattgcgttattttgttatttttctttaaatgtgcctgtattaagtaacttactatgaggttatccattcgataactatagtagattttttcgtctaataataatagtaattccatcacgcgttgacgaacttttaacgcatcactcatataaggtaagaatgtatcagcacgttgcgctgttactgatccttctctctcattatagccatatacaatgttaggtataagttgaatatctcgcgctttagagaacgctttgacaataaaggtatgctcttcacagaaaacgacatcttcatcaaaacgtaatccagcatacttcgagctaaataattttgctccaggtcctatcgattgtaaaatatccggtttacgatcaagtgtgacaatcgcatcttttaccatagattgatgggtcgaaatgacttgccattcgccgttaacatctcttgccatttgaccgataacaacatcggtttctttgtttttattaaaagcattcaccattaaatcaatcctactaggtaaaaactcatcatctgcgtctaaaaataaaaatgcatcaacatcttcagacatagcttctaagccaacatttctacttcgagctgctccttgattactctgatgaatgactttaatgtgtggatgtttttgttgtaattctgtaagtacatgttgtgtttgatcagttgaaccatcattgatacaaataatctcataaggcacactagtatcaactgagagtatagcacgtttaatcgtttcttcagcgttatacactggaataattattgctaatttcattatttcaccaacttattaataaaatgaactaactggttaagactatcttttgagttatattgatgccaatcattaaataaagattgaaattgctcatcgttatcctgtatcgcttgtataattgactcttcattactcattttgtatcgttctggaatagcataataaaattcattcaatcctcttactttttcatattgctgttcatcataattataaataagtgtcggtttattaagtgcgcttgcttcaataggtaatgagctataatcacttataataatatccgccataattaacaatgaagtaacatcgattgaatgagaagtttgacaatcaacagtcgaaggatgcaaatgactcaataacgtataattcggcaagtgccgttcaaagttttctttatcaatagtacgttgtgctacttgaccttctctataagtcggaacatatactgcgagtttatttgtaatatgatatttcttttttaatcgttgttgttctaacttaagattgcttctaaagtattgggtcagtcttggaagtccaaactttaacatttgcgatggagatgcatcaaacgattgtataaaacattgagccattttctccccacctaccaaataataatcggtagcatcataaacttttttgtattgtcttaccatagccttattttttaaatcaacttgatgatcagttaagccaaaatttttaagcgcaccagcagcatgccatgtttgaataacagtttgcccttttttcttctgatagccacccatcattaaataatacgtatc

SEQ ID NO: 3775 - DNA, 3714 bp, Artificial Sequence
  Description of Artificial Sequence: synthetic nucleic acid sequence
gattaatattgggaggcaagatgctaattctttggtgcttagcttcgtcaatcatagctgcagtctttttttcacttcctattacattactcaagatatttgcataaaaataatgaggatagtgcacttttaaatagctcataatgtatgcaatttttgagtaactaacagcatgggcacgtgggaacccataatctgcaaacttaagtattaaatcaaaaatttgcttacttatctgttcatcgtaaccgttattttttgcaccatcaatgaaatgttgacgctcactttctaagattgcacgattctttttactcattgcccttcttaaaatatctgcttcaccataactaaaaccagcaacttgacttgctattagcattatttgttcttgataaatgataacaccatatgtgttttttaagattggttctaaatctggatgtaaataagcaaattggttaggattatgtctacgggttatataagttggtatttcttccattggtcctggtctatataatgatgtgacagctacgatatcttcaaaatgttcgggttgcaatctttttaatacgcttctaacaccgtctgattccaattgaaatatacctgtagtgtcaccgtttgataataaatcaaaaacttttttatcatcataaggtatagcttctatatcaatatttatatttaaatcctttttaacttgtaaaataatttgatgaataattgatagattgcgtaatcccaagaaatcaatttttaataatcctatacgttccgcttctgtcatagtccactgcgttaataatcctgtatcaccagttgttaatggggcaaatttgaataatggttgatcattgataatgatacctgcagcatgcgtagacgtatgtcttggtaatccctctaactttttactcacttcaaaccaacgttcatttctatgattacgatgaacaaatgctttaaactctggcttttggtatgcttcttcaagagttatacctaatttatgtggaataagttttgaaatctcatttaaactcgtttcatcaaatcccattattcttcctacatctctagcaacagcacgagctaacagatgcccaaatgtcacaatacctgatacatgatgttcaccatatttatcttgtacatacttaattactttttcacgtctcgtgtcttcaaaatcaatatcaatatctggcatagttacgcgttcaggattaagaaatctttcaaataaaagattatattttaacgggtctatagtagtaatacctaataaataacttactaatgaccctgctgatgaaccacgacctggcccaaccatcacttcatgtgttttagcaaaatgaatcaaatcacttacaataagaaaataatcctcgaaacccatatcagtaataattttatattcatgtttcaaccgattgaaataagttttatcattaagttcccattctcgtaacctatgtataagtatcgtccaaagataatctttcgaagtttcaccattaggtgtcacaaattgtggcaacagggattgatggtatgcaatttctgcttggcataattcttcaatttcattcgcgttagtaatcatatcttcactaagatttagtgtttgaagttcttctatactaggaaaatgttcatcaagtgtttctttctcatgtattaaatctaacttagtattatctcttatggcatgtaacgctggaatggtttcagcatcatcttcatttaagtatcttgcagattgcatccatacacgtttgccagtcaatgtattattactattgtgatttaaatataattctttcttaccttcaaaagcatcaataacttgcttatgagacaactcagcctctttaaatatgataattaaatgttcgtcgtatctttttagccattcaattggcacttcttctttatttctcatcattatagcagaagaaagttgatataatgacttgagtccttgattattttttgctaaaacaaccgtttcaatagtatagagaccatccgttaaatatatagtcataccaaagattggatgtatgtgagctgcaatacaagcatcataaaactttggataaccgtacaatacatttgtatcggttattgcaagcgcacgatatccttcttttttagctttatctattaatgcatcaattcttaaactagaatctaacaggtcaaaagaagtatgaatatttaaatgtgctaccatggtctcttacctccttttaaaaattataacttgtcgtttaaagcttcggcgagttgctcgaattgctcccaactatttactgaaactccagatgcatttggatgtccaccaccaccaaatgtattagcgacatcattaataataatatgacctttagaacgcaaccgacatctaatttgatctccttcatcaacgccaaacatccatatttttaatcctcgaatatctgcgattgtatttacaaataaagacgcttcattaggttgtatttgaaatttttcaagtatgtctttagttattttaactttgcaaaatcctttatcatttaaatcaaaattttgcaatatatatccttgaaatggtaatagttttggatccttttcagacattttgtttaattcttggttgtgatcaaaaggatatgtaagtaattttccagcaatttgcattgttcgtggcgttgtattattaaataaaaaacgtccagtatcaccaacgatgccaagatataatactctagcaacttgttcatcaatgatatgttcatcattgaaatgtgaaatgaattcgtaaattatttcactagtggaagaagctttggtattaacatagttaatatctccatactgatcagtagcaggatgatgatcaattttcaaaagtttggtacctgtatcataacgttggtcatctattcgtggcgcatttgccgtatcacatacaactacagtcgctttcttgtatatatcattgtcaatttcgtccatcaaacctataaatttcaaagaatcttcattagctcctacagcataaatttgtttgtttggaaacttcttttgtaagtaatatttcaaacctaattgtgaaccatatgcgtctggatctggtcttagatgtctgtgaataataattaattcactttgttctaatgcttccattatttcattcatttttacttccatattaattactccctttaaacttctaaatattatttaaaacccatcaaacatttgacaaattactaatgcattagcaactttttcaccattattaatcatagtaacttctaatttagcaaaatatcggccaacatctaacatttcataatgtacttcaatagtagattcaattggtacagtcttaatatagataatactcatactttctatcatgacattaccttttttatactttctcatttcgtgccgaatcgtttcctcaataattccaacaaatactgctttacttagtgtaccgtaatgatttgtaatgagtggagatacgtcgacatttattccttgttgatgtattgaaatatgtttggcaatttgatcattgactgtttcaccaatttgaggttgtctacctaataattgcattgattttaaaacatcctgtctgttaatcacaccgacagcttttttattattatcagttactggtaataattcaatcccttccca

SEQ ID NO: 3776 - DNA, 3127 bp, Artificial Sequence
  Description of Artificial Sequence: synthetic nucleic acid sequence
aactaataaaatattaattataatattagattgatgaagtgccatagtaaagacttctatcataggttacctcctttatgattgtttattctcactcagttttcatttcagtgatttttaaatataattatagcatgaagaaatacgattatcatggttagataatatttaattacctgaatcattgacgagtgaatttatgaataatacgatataatatgaacagaggtgactttatggcagacatggagagtgcacatcactcagagcaaataaaaacaaatttaaaatcaagattaaatagaatagaaggtcaagtaagagcaataaatcgtatgattgatgatgacgtttactgtgatgatgtactaactcaaattagagcaacacgttcagcattgaatagtgtagctactaaattactagaccatcacatgaaaggttgtattatggaaaaaataaacgacggtgcgcaagaagaagcaatggatgaattgctcgtgacattccaaaaattaataaaagattaagagggtatgaaattgaaaaaaggattgataaatgtttcaggtattaaaacaactgaacaagctaaacagctcaaagatcatttatctaagatgataggcatcaatagtgtggatatcgattaccaaatgaatgagattcgagtagaatttgacactcctgcaaatttaaataacattgaaaaagaaatttacgattacggatttcgtattttataattaaataattgcgcttaattcatttttcgtttgaattattatagcttttagaaatatttaaaaatatttttagaatgatgtagtaaagtagaagtaattagggtattattgaaataaagctatttctaacgaggtgataattgtgaagaatcaggataagattcaaaatgtagtcaaattattatcatcattgggtgtgaatattaagaaaactaagtctcgtttagatattattaatactttgcctacatctaatcaagtaagtcatgaattaaaataatttgcatgataatataatattttatgtattgattatctaaattaatatataaagagagacactgttcatcgtgaatagtgtctcttattttatacaggttaaattgtattagattttttagataatgtggttatttcatatctttggggttcatgataataaattgaaagaactactcctataccagtcattaaactccataaagaacttccaccgtaactaataaacggaagtggtatacctgtaatcggtaataattgaaccgtcatgccgatattttgtaacacgtgaaaaacaatcaacgatacatatcctatgataaatactttgttaaactgactatcaattttactagctaaccgtataaggtgaaatattaagaataagaaaagtaatatcaataatactgaacctataaagcccatttcttctccaatcactgaaaaaataaagtcggtatgattctcaggaatataaacttcgccatggttataacctttacctaataattgacctgaaccaatagcttttaaagattctgttaagtgatatccatctccactactgtatgaatagggatctaaccaagaattgatacgtcccatttgatacatttttattcctaataggttttctattaaggatggtttataaatgatagctaatataatactagaaccacttacaaatgcaacaataaaaagaggggctaatatcctccatgttattccacttactaacatgacgccagctataattgcacataacaccaaagtagtacctaggtcattttgcaatagaattaatgccataggtataatggatacacctaaaattttaaaaaataacattaaatcagactgaaaagacttattaaatgtaaattggttatgtttagatatcgttttagccaaagcaagtataagtataattttcatgaattcggaaggttggatgcttataggaccgaaactgtaccaacttttagcaccattaataattggggtgattgaagtttcaggtaaaataagtaaccctattaatagaacgcaaaatatactgtataaaatataagtattatttttaatttttttcggtgaaattatcataattaaaaatgcaataatagctccgaaaatataataaataatttgtctaatactgaaatttgcactatattgtccgccacccatagcggaactgattaaaataacacttgttagtgctaatagtgatataactagtacgagtatccagtctactttacgtaaccagttacgtttaggttgttgacgagaagaataattcattgcttactcctttatgtatatggatcacttttcaaaatttctgtagatacttttacaatattttaatcatctgtattcattcatattttctaatcaaatatatattaattttacatgacttcttttaaatttgctagaatatcacagaatgatagcaccttattaacttttaatatgtaatagtcataataaaaatatgtatattggcgcaaattgtcattaaaatttagttctatatttagattatcaaatgcaattgaatttaaaaatatgataatattaagtttcggaagccgttatgtacttaaagtagtaaataaaaagatcaattaaacaattacgttaaagaaaaaggctaaaagaactgtaattgtaatggaggaaaacgaaatgacaaaagaaaatatttgtatcgtttttggaggtaaaagtgcagaacacgatgtttcaattttaactgcacaaaatgttttaaacgcaattgataaagaacgatatcaagttgatatcatttatataacaaacgatggtgaatggaagaaaaaagataatattacacaagaaataaaaaatactgatgaactcgtcattaacgatgtagagactggagaaatctcacagttactcagtaaaggtagtttaggaaaatcatatgatgcagtattcccattattgcatggtccaaatggagaagatggaactatccaaggtctttttgaagtacttgatataccatatgtaggtaatggtgtgttagctgcttcaagctcaatggataaactcgtgatgaa

SEQ ID NO: 3777 - DNA, 2858 bp, Artificial Sequence
  Description of Artificial Sequence: synthetic nucleic acid sequence
attaacgatttcaaatccataaggtgctgtaagtgtgcaattaatatttaatttgtgtcttaataaagggttaatagtatctttagaaccgttaaatattttaaagtaacgaatattgtgtttatatttaacttcatcacttcctataacaccttgttcaaattgccaactttcatcagtccaactaaattcagaagtatcttttaatgattctgcatatcctttgtagacagaataagtcacctcaataagtccgaattgacttgttaagttttcattactgacaccctctggtataactgcatactttttacctggcatatctgaatgccatacgaaataaggatctctcctatttatcaattgacgtaacttttcttttgctaatctatattctttataatccgtgcctttatatgaaaatctcagtatcaaattgaaaggaccgaaattcatcggtccttgtaaaacgccatcgctaccattaacttcaatctgattggacttcctatctaaatcctcttcttcaaattctagaaacttaagatgaggaatatccgttagtgtttcttcgaaatgatcgttaaatatttttacttttttattttccaatttataaacctccctggctataagcagcgagtcttaaccttgaaccttgtgcctgacttacatcgcgttctgaaaaacctttcggttgtttttcaatagttttattacttcgtgctatttccattaacacgtttatttgtttctgttgattttctatcatttgtagtagtaattctgcattatcaactgtattactagtaacattaggtgtacgtaattggttaggtcgtttatttctgttatttccactaattttacttgcagcaagatgtaacaatttcatcgcatctgattgtctgcttggatctgtagggattactatctcagggtatccatcttctgccaaattatataatccagcagtgttaataaccccgcctgtagcataagcataatctccagcacgtttaaatgcacttctccaactccccataataggaacccacttacctacaatgtaacgcatagcagatatagcttcgtcagttggatttaagatgtttccgtgtcctggtttagcatatgctctaaaagatggttcaatcatttggaacatacctttagaaggcgttcctttttgtgcgttgatgtcccagttattaaccgcatctgattggaagttagactcacgtttggcaactctcatcatttgttcggtaatataagacgatttataacgtccacctaaaatagattgtgctctttgaattgctctacgtgcgtttacagaaccactaccaccaacttttccaccaccgtgacctttgagccatttagcagggtttactgtccctctgtttgtgatgtcatcatggcgacctctttcaacttggaagtgtacgtgtggaccagtagtccattgacctgaattacctgttttagccattggttctccagctttgattttaccttgttttaatattttagataagtgcataaagaacaatgtgaactgacctgttaaaagtcgtgcaacaagtcctccacctaagttgtggatagcttttacatttccatcattggtagcattgatagttgtaccatatggagcgccatagtcaataccaaagtgagcaccaccattaaaactataaccaggagcaccaccattaggataataccccgtagtaattgggaatttagtgaacgaagaaccatctccaccgcctgcagagtctaaaccttcattaaagaagtctttaataccatttttaagtttcttaatcatagctgtcattaaatcaaatggtaatggtgcatttttcataaagtctaggttaaaaccaactttctcaaagactttatttaccaatttcataggatgacctacataatcaaaaacatctccaatacccttgataacagtgctagacacatctttagctttatcaagtgcttttgtacctatgtcttttgctttgtcaaacgtagtaccacctatgtctcttgctttaccaccaatgtcttttactttattaacatcattttttacaccagagctaataacatctaatataccgtctttctttttagtacctttactaaatttaggtagttttttcttcttagtgtcatatcctgaattagataaaatagcatgtgtttgcgcgccactatatacacttgagcctttaggtaagaatgttgttgtatctttgttaggtgttagtgccattcttccgttaggataacggatcatttcatttctaaagccaccaggtccattacctcgacctctatctcctacagtagccattgtacctttattgattttaccgttggtaatataactttgtgtatgcgtagattgagtacctgtagataatttaatcttaggtattttatccatacctaatttatctgcgacccagttaacacctttgattaatccattaaggccttttttaacgcctttaaccattccaccaaaaagattcccaattttaccggtaactgttttgataccgtctctcattttattcatggtgcccataactttcgatttcatgccatttactatagatacagtagtacttttaattccattccatttcttgctcatgaagccacctacagcattcatggtgttatgagtaccttttttaagtgatccccaagcacctttgacgcctgaccatagagctttcgctttattaacagtaccttttttaatactgttccatttagaactcatgaaactgccaactgctttaaatatgccaattgtaccttttttgagtgcattc

SEQ ID NO: 3778 - DNA, 2876 bp, Artificial Sequence
  Description of Artificial Sequence: synthetic nucleic acid sequence
actatcttaaattcatttcttttaggagagggtaaataatttctcttgaaatgccatttgcaaaaacatatttaagaatataattagatttgacacttgtaccataaatgtcctttgttaattcaatgttagctttaataaataaatctactttttgtggcgtttccttttggttttggtttggatgaatatagtcaatgtcgtcctgcttttcaaattgattttcaaagaggaattgacgacgatgttctagtgcatttctgagcttgtcatcgatgttagcagtcgagggttcttttggaacttctaacatgatgaaattaatatctctattatgaacttcttgtgataaaaggtttaattgtttttctattgcctctaaagttaaggacattctttcatcatgattggggctttcttttgcgattaagtaaattaaaaatgcagaattggttgttgcttcgtaatgtgcagttgctaagctaactacagtctggttttcaattccaacgataaaggcgtaatcattttctgttttattattttcaagtgagcgtttaaaaattttactatcttcatctaaaccaatatccaatttatcatcatataatttgagtgcctcgttaaataatggatctttagctgattctatcactttaaattccatgttatatcctctccctaatattattcattcgtagcgaattagctttatttaatgataaaaaaaaccataatgtctgctcgacgacacaaacattatggtgcaatgcttttataatttagaaataaaattatgctttaggcccttcagactctgcggcataatgagtaatatccacttctttatatgcagcattattatcttcaacttcatcatgagaagaacggtcactgttagcaacaacgagcattttatcgtttaaaatatcttgtttatatccttctagttcattgtcagttaaatcataacgagataatactgtttcttctccatcttcacctgtaagtaaacgagacatacggtcactaaatgagccacttgtagccattaacgagatttgagagttgtgtaaatcatctaagtgcaacttacttttactgataacagctaattctgtctctaaataaccttcagattttttttgattgatgactttatataattcatcttggttattcactacagtaatttttgccatgattatcgccccttttaaaaatgttgtcttacatggttataccctagtctaatttaataaaactattacacagataattatataattttgtattaaaacatttcaatgataattcatcctttaatataacgcttacactgaattttgatgctttttgaatcgtgaacatctctttaattatattgaaaatacaacaaaaatttgctattatcataaaataatttatatgactcatataatctagagaatatggctttagaagtttctaccgtgtcgccataaacgacacgactatgagtaacaatccaatacattaagagcagtttaaatcgctaaagcaacataaaagtgaaacgcatttggtataactggtaacaaatgaggatacacataagcctgtataaattgagtgcaattgtttaagttttatcaaatttaataagcgtttttaggattacgtatgcgtatcttcttcttaatttgctttaaggcaaagtattgcacgttcactcatagatcctgaaactattaatggtagtttgaggtttttttgtatctaggaatcgaatttgaatttacttgaggaggttttttgagtggagtcgttaggacgaaaagtcaaagaagatggcgttgtcatcgatgagaaaattttgaaggtagatggatttttaaatcatcaaattgatgcaaagttgatgaatgatgtaggtaaaacattttatgagtctttcaaagacgctggtattactaaaattttaactattgaagcttctggtattgcgcctgctattatggcttcttttcattttgatgttccttgtctatttgctaaaaaagctaaacctagtactttgaaagatggcttttatagcacggatattcattcatttacaaaaaataaaacgagtacagtcattgtatctgaagaatttttaggtgcagacgataaagtacttatcattgatgactttttagctaatggtgatgcttcgctaggtcttaatgacattgtaaaacaagcaaatgcgacgacagttggcgtgggtattgtggttgaaaaaagtttccaaaatggtcgccaacgtttagaagatgcaggcttatatgtatcttcactttgtaaggtagcttcattaaaaggcaataaggtaactcttttaggtgaagcgtaatgaaaaatttcatattaagtgtgcaacatttgttagcgatgtatgcaggggctattcttgttcctattattgtggggacaagcttaaaattttcagctgaagaaattgcttatctagttactgttgatatatttatgtgcggggtagcgacatttcttcaagcaaataaagtcacagggactggattaccgattgtactaggatgtacgtttactgccgttgcacctatgatactcatcggtcaaacgaaaggacttgatgttttatatggttcgcttttaatatccggtatcttagttgttttaattgcaccttttttctcttatttagttaaattctttccacctgttgtaacaggaagtgttgtgacaattattggaatcaatttaatgccagttgcaatgaattacttggcaggtggtgaaggagcgaaaaactatggcgatactaagaatttaatattaggtggtgttacactactcattattcttagtatcgc

SEQ ID NO: 3779 - DNA, 2356 bp, Artificial Sequence
  Description of Artificial Sequence: synthetic nucleic acid sequence
actttttgaaaaatatactgatcaaaacttcgataattgtaaagttgattacctttatagatgactgctccattttcagatataaagaacatttccctatctccaaaaattgattttagctttgcaaattgattcccactcgcagctataaacttaatatttttatctattaattctttaaaaatagtttcaaaacgatttcgatcaaactgtttatttgtgtcaagaaatgttccatccatatctaccgcaatggctttaatcatcgttaatccccctatctatagattaaaattcataatcattatatagctgttggatttggtattgaagcaatatcaaatatagtgaaaacatattcatatattgaaattgttttcaacataaaaaataattacctttgtcattcacactatcgcttaatatataagataaatctcttattttcatttatataacttgaatcaaaaatattaaaaagagccaaggacattcactttgtcctcgaccctctaatcaataagttattaaaatttattttaacaaagcatcttctcgaagaagaacataattaatacagtttattacgtatctttcacttataagaatattagttaatttgtgtagctatgaatattttccttgtttcccaaacacccgtttcttcgttatagtcatcgcaagtaattaatgttaattgatttttcttattaggatgttcgtctaataccttaacctctgtaggcttaacatcacgtattttagttattttatactttctagtttgatttccagttttaaaatacactttactaccgattttggctgattttaaatttgtaaattgatagtgcgaacgatctgtaaacgtatgaccagcaattgaaatattctgttgattaagagattcgtcaccttctgcaaaactaacacctctattgagttgttctggtgttgctggaccagggtatactggttcttttatttgtgcatctggaacttctatataaccagccattttagatttatcggaaggtatctttggcgtcgatttagatgtctttgtctgttctttttcctttttatcataattttcaattttatgatcgttatctttttcatgtagataattatcgatatatggctttgagaataaataaatagctaaaatgattaacaatacgcctattaaggtgattaatctattcatccactgcttcatttatgttactcctttatatttatttcgcaaattatataattttagtttagtatagcattaaattaaaaattcaacattacatgatatgaaatagatgagaatgcatattaacctctgaaaatgacgcactatctattgaatgagaataataattttaaagatttgagggattgagatgattagatttgcacgactagaagatcttcaagatattttgacaatttataatgatgccatccttaatacaacagctgtttatacgtataagccacaacaattagatgaacgtcttcaatggtatcaatctaaagcaaaaataaacgaacctatatgggtttatgaaaaagaagggaaagtagttggttttgccacttatggttcctttagacaatggccggcctatttatatactattgaacattctatatatgttcatcaacagtacagaggactaggtatcgcttctcaattattagagaatttaattcgttacgctaaagaacaaggttatcgcaccattgttgctgggattgatgcatcgaacatggatagtatcgcattgcataagaagtttgacttctcacatgcaggtacaattaaaaatgtaggttataaatttgatcgatggctcgatttatcattttatcaatatgatttatctgattcataaaaaagtgtggagttattattaaataagttaatccaaaaagatactctttattttttatttcttcagtcttcttttttattttcaataacaaaacgaatgtaatagaacataaaaacaattatcatgctcaatgataatgatttaaatagcaagttgggccatgttccctcgatagtccataaataagttatcgtcgtgttaatgatgaatgcgatgaaaatcaaaaataatctcagcatttcatcaacccctttttagctattttatgtcgttgtcagaaaatttgcaatatacaaaggctaggacataattcctagcaaaatagccagtaaatgagtttttataaattcatttactggcttctttatttataatactacgtattgttggctcgctttcctaggggacagcttcagcctgtagtcttcaacttgtcctgttccctcaagagtctcgccaaaata

SEQ ID NO: 3780 - DNA, 3713 bp, Artificial Sequence
  Description of Artificial Sequence: synthetic nucleic acid sequence
gtactttcaatcctttttctacagcttttttagcaactaaaccagcacctaacataacatatggattagaagtgttagtacatgaggtaatagcagcaattgctatatctcctgttttcattgttgctttagatccatcattaaaattaatttctgcttttttatcaaattcactttgatcaagtccatgtccttgattaccagcaggagcagttactgatttttcaaattcttttttcatatcacttaagaaaattaagtcttgtggacgctttggaccagaaagtgatgcctctactgtagataagtctaaatcaataacatctgtatattcaggatcctctttttctacatcaaagaacatatggttttgttgtaaatattctttaaccaattcaatatgttcttcgtcacggcctgtaagtttcatatatttcaatgattcttcatctactgggaagaaaccacacgttgcaccatattctggagccatgttagcaattgtagctctgtctgctaatggtaaatgttgaacacctggaccgaagaattcaacaaattttccaactacaccttttttacgtaattcttcagtcacacgtaaagctaaatccgtagctgttgagccttgtggtaaagagtgagttaaacgcactccgataacttcaggaattgggaaatatgatggttgtcctaacatacctgcttcggcttcgataccaccaacgccccaacctagaacaccaataccattaatcattgtagtatgtgaatcagtacctactaaagtgtcaggaaatgctgttttttcaccatcaacatctcttacatgtactacatttgctaaatactctaagtttacttgatggacaatacctgtagcaggaggtactgcattatagttatcaaaagcttttgttgcccagtttaaaaattgataacgttcatagttacgttcaaattctaatttcatattacgttctaatgcttctggattagcgtaactatcaacttgaactgaatggtcgataactaaatccacaggtacttctgggttgattttattaatatctccaccaacatcattcatagctttacgtaaagaagccaaatctactactgctggcacacctgtaaagtcttgtaaaataactctagaaggtttgaatggaacttcaccttcgttacctgcatttccgaatttacttaatgctttacttagatagagttcgttactcataaatatctctattaatgatacgctcattaataaaacgttgaataataaaaatagcaaggtgtattcaccaataagaaactactagttcacagccaccactagttctctttaagctttctcaaaagttacttgtcctttatattcaaaacatattgaattgaatattattatagttaacattattttaaaagtcaactttcaagatatggtatactatatctaactttaggaggtatctaatgcatttcaacaagtatcaaatactaactacagataaatatactaaatttgaacatttatataagaaggtcaaacatatatgtgtcgtaatttttttggtggtttttttgattggttttattatactgttgtcattagtattatacttccaacaactaactaaagatgcttcgtcaataagtgatcgagagttgaaagcaaaaatccttcatatacctggcgatgagctaataaatcataataatcaaattttagaagaatatgatcattcacaaaatacactcatagttggaccgaaccatgtaaattcaaatattatacatgcacttacagcctctgaagatacattattttataaacataacggtattatgcctaaagcacttttaagggcgatgcttcaagatatcacaaattcaaaccaatcttctggtggtagtactatcacgcaacaattagtaaaaaatcaagtgctctcaaataaaaaaacttatagtcgtaaagcaaatgaaattatcttggctacacgggtcgaaaatttattatcaaaagatgaaatcatatatacgtatttaaatatcgtcccatttggtcatgactacaacggtgccaatataactggtatatcgtctgcttcatatagtctgtttggtatacctgcaaaagatttgaatattgcacaatcagcttatctcattggcttactgcaaagtccatacggctatacgccttatgacgaacacggcaaagtaaagccttaccatcttttaaaattgagcatgaaacgtcaacaatacgtacttaaacgtatgcgtgttgaaggaaaaatttctaaacaacaatacgaaaacgctaaaaaatacaatattaaacagcacttgctgaaacaatcgaaagacgaataaaaatcagatatatttatcgaaatttttgaaatgaaaagagagcgagcaatatttattaataacactgtctcactctcttttttattttcttagaaaagacctattgctttcccatcatcagtaacatccatatttagtgcagctggtttcttcggtaaaccaggcatagtcattatagcaccagttaatgcaacgatgaatccagcgcctgttttggcttcaagttctctaattgttatttcaaaatcattcggggcacctaacaatgtctgatcatcactaaatgaatattgagttttagccatacaaatcggatattcatcccagccattctctttaaattgctttaattgtttttgtgctttactactgaaatttacttttgaacctccataaatttctttaacaatcgtttcaattttagcttcgagtggttgttttaactcatataaatgcttaaagttttgaggttcctgcattacatcgaacacttggttagcaagttcaattccaccttctccacctttttcccatacttctgttaaagcaatacgcacttgattatctttagcccattgtttcacacacgctgtttcagaaggtgtgtcatgaataaatgcatttaaagctactattggttcgacaccgtattttttaatattattcacatgtctttcaagattaacaagtcccgcttcaacagcctctatgttctcatgttgaagttggtcttttgcaacaccaccgtgcattttcaaagcacgaatcgttgctacaacaacaactgctgatggatcgaaacctgcttcacgagctttaatgttcataaacttctcggcacctaaatcagaaccaaatcctgcttctgtaacaacaatatcagataagtttctagcagtttcagttgctaatatagagttacaaccatgagcaatattggcaaaagggcctccgtgaacaagagctggagttccctcaattgtttgaactaaatttggtttaatcgatataaaaactgaatggcaccacgctttatttgctcttcaatctctttttgttgtttatgagtcaaactactattcaaatatgcagcttgaattcccattgcttgtagttgatcaacttggtctttcatcaaagaaataagtggacttataacaatagttgtgccaccctgcattaaacctggtacttgatagcatatcgatttaccgccaccggtaggtagtacccccagtgtatgctgatgatttaatattttagttataatttcttcttgtcctggtcgaaatgacttataaccaaaataatgcgataaagtctcttgc

SEQ ID NO: 3781 - DNA, 3097 bp, Artificial Sequence
  Description of Artificial Sequence: synthetic nucleic acid sequence
gttaactttatgtattttatagctgaagaattacgtgaaattttggcttcacttggtttagaaacagtagaagagttagtaggaagaacagatcttcttcaacgttcgacgcaattgaaaccaaatagtaaagcagcttcgcttcaaatagaacgtttaatagaacaatttgacggggttaatacgaaagagatatcacaaaaccatcatcttgatgaaggattcgatttgaattatctgtacccagacgcacgctatagtattgaaaacgggcactcttttaccggaaattatgttgttaataatgaacagcgagatgtaggtgtaattacaggtagtgcgatagctaaacaatatggagaagaaggattacctgaagatacgatacttgcttacactgaaggtcatgcaggtcaaagcttagctgcatatgcaccacgcggattaacaatccatcataccggtgatgctaatgactacgtaggtaaaggattgtccggtggaactgtcatcgtaaatgctccaaatagtcaacgtgaaaatgaaattatagcaggaaatataaacttttacggggcttctagaggtaaagcgtttatcaatggtaaagctggtgagcgtttctgtatcagaaatagtggtgcagatgttgtagtagaaggtattggtgatcatggacttgaatatatgacagggggacatgtcattatcttaggagatgttggaaagaactttggccaaggcatgagcgggggcgtaagttatattttctcttctgacgtggagaaatttaaaaaggttaatgcgcttgaaactttagaattcagtagcatacgttttgatgaggaaaaatctcttatcaaagacatgcttgaagcacattttaagcatacacgtagtaacaaagcacgccaattacttgaccaatttgacaatattgaaaagttagcaattaaagttattccgaaagattacaaattaatgatgcaaaaaattgatttgaaaaaacgtcaaatggaacgtgaagatgaagcaacactggcagcgttttatgatgacagagaaacaattgaacaagagctacagccagcagtcatttattaaagaagtgagggattatcatgggcgaatttaaaggatttatgaaatatgataaacagtcgctatcagaattgtctttggtagaccgtctttcgaatcatgaagcgtttcaacaacgcttcactaaagaagatgcttcgattcagggtgcgcgctgtatggattgtggaacacctttttgtcaaactgggcaatcttatggaagagaaacaataggatgccctattggtaattatatacctgagtggaacgacttagtctatcatcaagattttaaagctgcttacgaaagattgagagagacgaataattttcctgaatttacaggaagagtttgtcctgcaccatgtgagcaatcatgtgttatgaaaattaatagagaatccgtggcgattaaaggtattgaacgtacaattattgatgaagcatatgagaatgagtgggttcatcccgcatatcctgaagatcataaagaccaacgagttgctatcgtaggtagtggtccagcgggacttacagcagctgaagaattaaactttaaaggctataaagttactgtttatgaaaaggcgcatgaaccaggcggcttgctaatgtatggtataccaaatatgaaactagataaagacgtaatacgtcgacgtgtatcacttatgaaagatgctggggttttatttaaaacaggcgttgaaattggcgtcgatgtgagccgtgaaacacttgaagaaaattatgatgctattattttatgcacaggtgctcaaaatgcgagagatttaccattggaaggacgaatgggctctggtattcattttgcaatggactatcttactgaacaaacacagtatctaaatggtgagattgaaagtttgagcattactgctaaagataagaatgtaattattataggtgctggtgatactggtgcagactgtgtagcgacagcattacgtgaaaactgtaaatctattgttcaatttaataaatatacgaaacagcctgaagagattacttttgaaagtaatacttcctggccattagcaatgcctgttttcaaaatggattatgcgcataaggaatatgaagctaaatttggtcaagaaccaagagcctatggtgtacaaacaatgcgctatgatgttgacgagttaggaaatgttaaaggcttatatacacaaatattaaaagaaacgcctgatggcatggtgatggaagatggaccagaacgattttggccggctgatttagtcttattatctatagggtttgttggtactgaaaccactgttccgcatgcgtttgatatacacaccgagcgtaataaaattgtagctaatgatacaaattatcaaactaatcacgctaaaatatttgctgcaggagatgcaagacgaggtcagagtttggttgtttgggcaataaaagaaggtcgtgaagtagcacattctgttgatcaatacttaagtaaagaagttctagtgtaaactcaagaataattatattgacataccatattttgtttggttctgttgcaaagttgaatttatagtataattttaacaaaaaggagccttctgtatgaactatttcagatataaacaatttaacaaggatgttatcactgtagccgttgggttcaagaatatgccccaattttatatcaaatttggaagaaaaagcatcaaaaagcttattacaaatggcgtattgatgagacgtacatcaaaataaaaggaaaatggagctatttatatcgtgccattgatgcagagggacatacattagatatttggttgcgtaagcaacgagataatcattcagcatatgcgtttatcaaacgtctcattaaacaatttggtaaacctcaaaaggtaattacagatcaggcaccttcaacgaaggtagcaatggctaaagtaattaaagcttttaaacttaaacctgactgtcattgtacatcgaaatatctgaataacctcattgagcaagatcaccg

SEQ ID NO: 3782 - DNA, 3046 bp, Artificial Sequence
  Description of Artificial Sequence: synthetic nucleic acid sequence
taaacaatcaagtcaagattccattacaccaggtgaatttatagttggtactacggttgaagagggtaaaactaaaattaactcatgggataatattaatgaaaaagcagccttaattccttcgtcaactgcagctgattatgatgaaacgttgaataataactttaaacagtttaatgataatttgcaatcgtatttttcaaacttcacacaagcagttggtaaggttaaattcgtaaataaaaaagctaaacaacttacagttgatttgcctatagattattacggacaggcagaaacgataggtattacacaatatgttacagagcaagccgaaaaatattttgataaactagatgagtatgaaattagaatcaaagatggaaatactccacgtgctctcattagtaaaactaaagacgataaagaaccacaagttcatatctatcataattagttaccgatgatgtatgacacccgtttcattgtatagaaaagaatagaattcgaattaagtttaatggtcaatccattaccaaaggaatatatttgcaatttgatgttattgatgattttgactcatttttcaagccgtcaataaatttaaatgaaaaaaattagctatgaagaaatttaaattgatagatttcttcatagctattttcttatgtgaataaaataaattgacactgtatattagagaaatatttaaattatacttgcaattgttatttaattaatcaatattataatgttgatatagtctgataattgtacatttattctttaacgatgtgtttaactttattaagattttcaataacataatcatcaggtttttttgttaatttacttacgatgtaggtaatcaatacgctaattatgaaacctggaatgatttcatacataccaaagaatgcattgattgtagccaagggttttatccaagaaatccaaacaataacaaccacagcaccagctaccattccgctaatagctcctgcacgtgttaaatctttccaatataaagagtagagtactaaaggactaaatgcagctccaaaaccagcccaagcattaccaactaaatttagtattgtatcgtttggatgccaagcaatcgtaatagcaactatcgcaacaagtagaactgataagcgtccaatcaaaacaaactctttttggtgtgatgatgctttatctgaacctctgattagtttatagaaatcttcagttaaagaacttgatgttactagtaattgtgaagagatagtactcattattgcagcaaggatggctgctaataaaaatccacctacaagcggatgaaataatatttgactcatcacaataaatagtgtttcaggatcttctgatttaatatgtctttcagatataaatgaaattcctgttaatcctacaccaatcgctcctaatagaccgactgccatccaacttattcccagacgtctggcttttggtagtaatttatgtgatttgatagacataaatcttactaatggttcatccccacatattgcatcccaacctacaaaaacattatcagattcatcaatataacttttattattaaataatgttttcattttatgaacagtatgtacatcaaaaataaaaacaccatttttatttaaatgttgatacactctttcgaatgtcatttttacgtcatttaatgtttctaaataattcagtgaatcacaaaatattgtaatcatattaaattttttgttcaaattaaagtgagtcatattaccttcgatccacttcacttgatttgttttttgtctagctattgataacatatctacactaatatccataccagtgacttcacctagtgacgttagtaattgtgttaagttgccagtaccgcaaccaatatctaacaaatcatgactatcagaaggtaagaaatgctcaacaatattaaaccacgaatgatacggttgatcttgagtaagtttgtcatatactaaactcatatcttcatattgattcatgactaaaatactgcctgaccgtattctttaataggtgcatcttgatataatttctctaaattgtaatagcttctttcatccttatgaaaaacatgaacaactacatttgctaaatcaataagtatccatcgagcttcttgatagccttccatacgtttaacgtcaatatcatgtttatgtgccacttctttaacagatctagcaatggattgaacttgacgttcattgttcccgtgacagactacaaaataaaggggataaaacctcttgggaatgatataagaatattaggtgcatcaagtgatcatttgatgattgatttaaataaccaagatcattatcaaatcggtgataaacttcaatttagcttgaattatgaagcactgtctcagagcatgtatatgaaaaatttaactaagttatatagtagtgattcaaaaatagaatcccttgttcagaacttcgatatgcctatatattcccagtgctaatagttcttatttacctttaactcaacgcaccgtctcaaattaaatttgataggttttacttattaaaaaccagcattttttgtaaacatcatttgttcagaattggattaattatgaaaataataaaataagttattgacattgagaatcgttatcaataaactaataatgtaagcatatacatattaaggagtggaatcagtgagaggtttaaaaattttaagtgtaattggcttattgtttgttttaattgcaactgcagcatgtggaaataatagttcaagtaactcaagtaatgtaatataaaagtaacttattattaattgaacttgatttgcgtaaatcatacaatctaaattaagataatgacattatctcaataggagtgatcattctgaatattgataattacaaagtaatcactgataaattaaaatcttggttgctaagttaatctgtgtgtgtaccatgattaaagaaatcatttaattgtttcattttaagcatctttagttgatatattatcataat

SEQ ID NO: 3783 - DNA, 4077 bp, Artificial Sequence
  Description of Artificial Sequence: synthetic nucleic acid sequence
taactttatttttctttaacaactgcttcacgccacccgtaagtgtttgtacaactttcttttttcgttggacaaattgagtaaaatcaatttttaagtctttcgttgtgattccccaatcgtttgcaactcgtatgctgtgtgctttctcgccgtgttctaacaacgttttagaggggatgcaacctacatttaagcacgtgcctccagcattatttttttcaatgactgcaacatttttaccaagttgcgcaccacgtattgcagctacatagccaccaggtccagctcctattacgattaagtcatatgatttactcatataataaatgcctcctttcaccaatagtacgttgtgccatcccaatttcatttgcatgaggaataagaaattttacatttgtaagcgctttcttattccttcgattccattctacttcaagtattttgagttttcaaacaattgtatgttgttaattattaatactttataaactttataaattactgtttatctaactcttaaactgatttaaaaaagtaatgatgtttgaacgttgtacgattataaaaagacctgtacatcagcgtgtgataagactatgattaaaatgtaaaaaagatttaggtaaaggaagatggtgtcgtgggaagtactgttaaatatcgtaagtttattctacctattgtcgttggtttaattatctgggcattgacgcctattaaaccagatgccttaaatgatcaagcttggtttatgtttgctatttttgtgtcaaccatcattgcttgtattacccaacctatgactataggtgcagtatcaatcattggttttacaatcatgattttggttggaattgttgatacaaaaactgccgttcaaggcttcggtaatagtagtatttggcttattgcaatggcctttttcatttcaagaggatttgtaaaaacagggctaggtcgacgtattgctctgcaattcgttaaattatttggaaagaaaacgcttggtttggcttattcacttgttggtgttgaccttatcttagctcctgctacgccaagtaatacagcacgtgctggtggtattatgtttccaatcattaagtccttgtcagagtcatttggttcatcgccgagagatggttctgagagaaaaatgggtgcgtttttaatctttactgagttccaaggtaatttaattacttcagctatgtttttaacagctatggccggtaaccctatagcgcaaagtttagctgaaaaaacggcacacgttcaaattacatggatgaattggtttgttgctgctattatacccggattgatttctctcatcgttgtccctttcattatttataaattatacccacctactgttaaagaaacgcctaacgctaaaaaatgggctactgaacaactagaagaaatgggacatatgtctatagccgaaaaattgatggttggtgtctttatcatagcattggctttgtgggtattaggaagcttcattaatgttgatgccacgctcactgcatttattgctttagcattgttactattaacaggtgtattagcgtggtcagatattttaaatgaaacaggcgcatggaatacactcgtttggttctcagttcttgtattaatggcagaacaattaaacaagttaggctttatcccatggttaagcaaactcattgctcaaggtttgaatggctttagttggcctatcgttttagttttactcatcttgttttatttctactcacattatttattcgcaagtgcaacagcacatgtcagcgccatgtacgccgcgttactcggtgttgcagtcgcttcgggtgcaccgccattattcagtgcattaatgttagggttctttggtaacttactggcatcaacaacacactatagtagtggaccagcgcctatattatacgcagatggctatgttacacaaaagcgctggtggactatgaatattgtacttggtatagtctattttattatttggattggtgtaggttcactatggatgaaactcattggtatgatgtaatgttagaattttaattaaacttcagttcatcaaatatattgtgatatattgtaagctaacgtttgaaacgttagcttatttttttgcatcatactcccaagattaatatttactatattcattttgctttttattcaattcaactatgttattctgtacatagattaactagtatcattaggggtgcaattcaatttgctgagagaaagtctactttcaacccttgaacctgttggttagcaccagcgtaggaaagtgagcaatattgataactgtttcttcattcacttttttacgcaataattaaatggatggaggaatttttttatggacaaattaacagtaggtttagaatggtttttaaatcctgatcatatgccgttaatcttaggtatcgaaaaaggttggtttaaagaagaatcattagaaattgagatgattgaaccaaaggaacactttgacgcactagacgagattgaaaatggttcaatggatatcgcgattactgaacctattcatctggttcaagatagagctaaagaacaaaaagtcatcgggtttgcgagatatcttcacactaatggaggtattatgtataacaaagataaaaatatcgctcgccccaaagatttaatcggtaaacggcttcaatatcccggtgctcccggtccaggtggtattgctatggctaaaacgatgattgaagctgatggtggtacatttgaagaaggtgacatcacaccagttaatcatagtttttatcatactgatgcacttttaactgataaagctgatgctgctacactcattttcgaaaattttgaaattcttgaagctagaaatcaaggacttaatgtagattattttccacttaaaaattataatgtacccgatttttgtcaactcattttcattacaacacctgaagtattaaatacgagtgaggttaaactcaaaaagttcctaaaaatcattcaaaaaacaattcattacatcaatcatcatttagaaagtgcaattgaaatttactcaacgtatactcaaaccgatatctctaaccaattaaacaaagatacaattgaagcaacagctaaatgttttacaaatgatttgtctatgagttccgactactacaatgatttacagttgtggcttaaagaagtcaatgatattaaagacacgattaacccaactttatattttacaaatcaactactattcagtcgatatacaaaataaaaaatacaccttcactctatttaaacgttaatgtacacatcaatagttagaatcaatatctaatttagagaatgtacatcaaataaagtgaaggtatatttatcctactattttacaactgggttcttcttaatttgaacatattgagaaatactatataacacaatacctatccatataaaaataaaggtaatcaattgatcagtgttaaatggctctttaaagacaaagatacctaagataaacatgattgtcggccctacatattgaatgaagccagttaacgataatggaattcgcttagcacctgctgagaacagaatcaatggtattgctgtaattgcacctgaaaatagtagccaaaatgatgatatatttaatccaaatgttatgtgttgttgctgccataggtaaataacatagattaaaccggctggtgcagtaacaatacattcaatagtgatgctacttatcgcatcgatatgcacaatcttttttaataaaccataaataccaaaagaaaatgctaacagaagtgaaataaatggaaattcaccgatttttattgtcatataaagtacgcctattaatgcaaaaatgatggctaaccattcgaatttattaaatctctcttttaaaaatataagcgccaagacgatactcactagtgggttaatgtagtaacctaggctagattgtagcacgtgaccattagatactgcccaaataaatgtcccccaattcactgtaataacataccctgcaactatgat

SEQ ID NO: 3784 - DNA, 3031 bp, Artificial Sequence
  Description of Artificial Sequence: synthetic nucleic acid sequence
aatcattataaaataaagagctatagacataatgattgaccacggcgcagcatataaaaaccactctccccatgatacatcatgtcctaaattttggttaataaaattgatggctacaatattttgtgctgcagccgttttaatacctatattccatatcgaaactgcttgtacagcagtaataattaataatgaagcaagtctactatccttactcacattaaatgcagcaatcattcccagtaatattgggacaactgcaccagcacgtgctgtagctgatggtacaaagaatgctagaacaatagatacggaattaacgttgacatattgtcattcagttttcaatgttcatttagtaaaatcaatcttttttattgtactatattgttttaagaaaagtcaataactaattgatattacttaattaattttaaaagcttttcgttaactttgcaagggttatttttacaccaactcaacaaaattatcaatcgctttacatccgcttttcagcgacttttatataatatcaattttatgttttgaagtcaacaattaaattgaattattttttattcgtatgagttcttttattcactcacaagaaaacattctaacacatttcttaaaatttgcaatagaaaaatcgtatgaaaatatttttcacacgatttaaacgccaatttagatattctcgattttattgtttttgggtgcttgctataacttttcttgcgattaaagtatacaattctcctagacgatcatccgattgatatatcgaaggcgaaaagtcattgggattccatgtaggttgttctaaaggaagttcagcaaataattgcgtctcaagttcatcagaaagctttttgcctcctccttttccgaaaacatactcttttttacctgtttctttactttcaaaatagctcatattttctataacaccaagaattgtatgttctgtatgtttagccattgcacctgctcgtgccgctacaaacgccgcggttggatgcggtgtagttactataatttccttacttgatggtaacattgaatgtacatctaaagctacatctcctgtgccaggtggtaaatcaagaagtaagtaatcaagttctccccactgtacttctgtaaagaaattcgtaagcatcttaccaagcattggacctctccaaataaccggtgcattttcttcaacaaaaaatgccattgaaataacttttactccatgtctctctacaggtataatctccttaccatctatacctggtctttcatctattcccatcatatcaggcacactaaaaccgtatatatcagcgtctactaatcctactttcttaccttctcttgctaatgctacggctagattgacagcaactgtcgatttaccaaccccacctttacctgaagctatagaaatgaattcaactggattattttgtgataatagttcttcaatggttttgggcttttcactaccttttcctatatatctttcgactacttcgctaggaagttcttcaaaacgaattcccacagtatttgcaccattttcttttaaggctttgactatagccatttgaagatctaattgtggctgtccccctaattgcgccattgccactttaacactcacatggttaatattatccttaatagagacatcaacaataccttcagattctctcaatggcacatcaataatcggatcctttaatgcccctacaatttctttaacttgatttaccgttaacaaagtaaatcccccttattgatttttaatttatctacatagcaactatagttgcctgtttatatatatatcatttatattttttagtataagacttttcctaatataaaaaaagaagttagcccatttttaaaatagactaacctctaattattatactttcctactattgtgagttaaatgattaggctcctttataaataacgctagaacaaaagcaataatcacaaaaacagtgactaaggcgaacgatacatcaactcccacagcaacactttgtcgctggatcatttctttactagcgtgttcacttgatgatacaacccattgagcacctatactcataaaagtgaccattagagcagttcctagagatcccgccataacacgaccaaagttcataattgccgttccgtgggaaatgtcttcagttttcaatgcatttatcccggtcgtattgataggcatcattagtaaagacactgcaaacatacgaatcgcatagattactatcaaatacgtataggatgtatctactttaagaaagcataatagaaatgtacaagaaatcaataagataaacccagtaaatattaacggtctaggcccatatttatcgtaaaactttcctgtaaacacagacataataccattgataatcgcgccaggcataattactaatcctgatagcaacgcagataatcctaaagcattttgaacatacaatggaataagtaaagcaggtcctaccatagataacataatgatcatagaagtaattgtagaaaaacaaaatattttgttattaaatattttcaaatttaataatggattagaaattgtaatttgtcgtttaacaaaaatgccaatgatgattaaacttattaaaactgaacaaagaacaattgggttagaaaaacctaggttaccagcactactgaaagcataaagcattaagccaaaacctaatgtagagtatataacggatcttttatccagttttgtttctttcgtcgtgttataacttgaaatcgatacaaaaccaaatataaatgtaactaatgctataccgacaataacaataaatggcactctccaacttgcattgtcaatgattaaaccagtaaatgtaggtccaattgcaggtgcaaattgtataactaatcctgcaagtcccattgcaaatccacggtgttctttggagaacaatgtaaacaatgtaaattgcattaatggcatgagtatacctgcaccgacagcttg

SEQ ID NO: 3785 - DNA, 3714 bp, Artificial Sequence
  Description of Artificial Sequence: synthetic nucleic acid sequence
gtcacgaacttctgcaccattcaaacatatgtaagggacttttaagtctgtttcagcaacaggtgtttgtgcctcgtaaaacgctctaccagttgcaataactactgtaataccgttcgcttgcgcaaattttatcgcttcttggttcatagtggtgatttcatgaccagcgttaagtaatgttccatccatatcagttgctattagctttatcattagttgacctcgtttccacttattttaaagtgatgctatatgaattttttaaattaatttaaaatttatgtgtgtagcatatgtcttaacttcattattattatatgttgtcacacaatctttaacgatttactagacttcaaaaatacgtttatttatgtacgacatcattttaacaaatttatatccttttgtatcttcccctgtttttctgcttttttcttttcacgtatttccttaaaaaaacttctcaatagttctgcacactcttcttctaaaattcctttttctacggttgccctatgattaaactggggttgttctaataaattcataagacttcccgaacaacctcccttggaatcagtagcaccatacacaacctttggaatacggctcataataatagtgcccgcacacataacacagggctctaatgtaacatacaacgtacattcttctaatctccaactgccgacaacttctgaagcccgttctatcgctatgtgctctgcatgggcggtaggttgctgcaatgtttcccttaaattatgtgcacgtgcaatgacttgaccctctttaacaataactgctccgattggaacttctcctaatgctttggctttgtgtgcttcattaattgctaagcgcatgtaatcatgattttttttcataatgataaattgatgtttcatagacttatccatcatattaacatgttctggcatgctcttataaccacgtctaatacttttgttaactaataaatagcatgcagtcacacccgcataatatggcccttcttcactacgttcggtcgtcacccaacatagccagtatgctttagcctcctcaccttcaacttgtgatttgtcagtaatccacttgacacccttttcaacttcagcacgtgcgtgcataccaccaatatcaacaaatgccttctgattttcaacatctataaaaaccggggcaatattatctaaactaatcgaaccaatattggttcctttatgaccatctagtggatcattttttataatattgaaattgaaaccttttttctcagacaaacgagatacctcctaataagtcatcaaataaagactatatatcttattcttaactgttaatttaattcattaagtaagttaataatagaacctttaatttgataatctttaatttttaaaatcatctctttaggataatataatttatggtcttctctattaatccctgtaatactattaatcaccaatgattgattacttatttctgtaattccaccattactttttaataaatgaatcggtttgcgatttgagcctgggcgatcataatcataaggtaaatctgaaaatgcttcacttacaaagtaataatcaggattaataccacccgcttcaaataattcttgcaattccgaaatggtaataattgaaccgtcgaaaggaatatatttaaataaatctcgattgataaaccgtcttgataaatcacttaatattgtatcattttcatgaatccatttcttcaagtaatacaatacaactgcttcatcaagttctacatattgttcaatcgtcattgttccttcaaagaatggtataaagtcttttggatacattttaaattcatatccttcattataaagctgcttagctcgttttaaacaattgtttaataaaacttccccaccacggcttactggatgaaaatatatttgccaatacatttgataacgactcataataaaattttcgacagcatgcataccactatctttaattaacacttcttctttagatggtctcatcaaccttaaaatacgctccatatcaaatgagccatacgttacgcctgtaaaatatgcatctctttgtaaatagtccattcgatcagcatcaatttgtgaggaaatcatagaaataacaagcttattatcgtgcgttttattaattacatcagctacttgtttaggaaagttatcagagactcgacttagtacaccattaacctcagtgtctcctgtgataatagcttgtgtaaatgcttcatggtctgtattaaatattttttcaaaactatgagagaaaggaccatgacctaaatcatgtaacaacgcagcacacaacgcaagtggccgatcagtattatcccacgcgtcttgtcctataaatgtctcatcaatcattcggcgcacaatttcataaacacccaaagagtgtccaaaacgactatgttcggctgtatgaaatgataaatacaaagtacctagttgtttaatacgtctcaagcgttggaattcttttgttttaattaagtcccaaatcaattgatcctacgtatcatcttttgaacacctttgatattattagttttaaaagcttggattaaactttctacacaagcatgagattgatctaaaaaatcaccataaaaacttggatctgattttaaacgtttgacctcactcactaagtgtggagaagaagctggagacccagtccatccaataaggacttccatattttcgggagcttgtaaaggttcgatatgtaagcctggccaatttttttccaaaacatcattcaccgatgtttcttccatttgctgtttcacccagtcatggtcaaacgtactatatgcaagccaaccactgtagacactaaccgcaatatcgccacatgaacttaaactttgtaatttcatatttgcaattacagctaatttataaatataaaggtttgataattccaaaccatagaattcattcaaagctttaacaacagatactaaaacagcggcgcttgaacctaatccgtacttctgaccagagttatctgctaagttactatcaatggttaaatgaaagtgctttaaattcatattgcaactgcgcacatactgttcaaacacttctatagctgtcacaacatatttcagttgcttagcagcttgaacatctgagatttcaattctatcttcattacggtcaaatttaactggttcataatgtaatgttttggaatgaatactaccttcaactttatttgacgcctcaattgtcgccgttacaaagcgatttactgcaataagaatagatttatatcctggttcggttactgcatactcgcctgcaatataaagttttccgggggcttttacctgaatcattctatctcttccttacttaataatttcaacaccagagctaatgatatcacttgctataatcttcgattcgtcaaatacttttaaaaattgttccatcacagcttgtttatttttcttttctactaaaacttttacattgggacccgctcaacaatttcccatactaaatggtgcaaccctctttctgaagttgaaccaatatacatacccggtcttttacgaaccgcttcgagaccttctaaaacttgtatctgtccagcaccataattatctgtgttgtttacatctgacaatgtattcaccatcactttctcgtta

SEQ ID NO: 3786 - DNA, 3099 bp, Artificial Sequence
  Description of Artificial Sequence: synthetic nucleic acid sequence
tttaatgtgcttatgttcagtgtcgtatttcattgcattatcaataaatatgagtaagagttgttcaaactgatgacggttaatttttaattggataggcttagtagcaagatgtgtttcaaaagtataatctggatgtaggtgttgcagtgacttcacacgtgattgaatctcgctatttacgtctacattttcacattccaaaacattatgattgactctatctttggtaagtaaaagtagttcttcgacaagttttgttattcgattcacttcttcaattgaaatattcaaagattcttccaaaactgctggatcttttttcccccaacgttggattaaatttagatgaccttgaataatctgcagtggcgttcttaattcgtgtgaagcatcctcgacaaattgacgttgctgattaaaagattcttctatttgatacatcatttcattaaaagtatcaattaaattatctgtttcttcataatttgtagttaattcaagtttattttgaaaaccatctcttctaatttgattcattttattggacattgtaactatcggtttagtaatttgcgaagaaaagatataactcacgccggcagtaataatggttgcaattaatccaaaagcaagtgcaacgatataaagtgatttaacgagattatcataattttgaagagaatggactaatacactgtatccagaaaaatctttcgaacgtataggttcagttattactaagtaattaataccgtggcttctttgaatatgtatacgttcaggatgtttgaaatcaattttgttatcataagcaagtgtattatcatttgatgtttgaattaactttctaccgttatcatcatagatcagtatttcttgaaaattttctaaggatgcatttaaatccaatgcagatatatcacttaaagatttagaatggaacagattggcgatatcatttgaacttctttcagcttcgtcaatttcactacttcgtaaagtatcttttaaaaagaaaataataattaagcagaaaagtaatattgtcgtgaaggtaatgagcgtcgtaataagcatccatttatattttaatttttggcgcttaatcatcgaatcacataccctacgccacgtactgtttctatggatttttctttattaaaaggtttgagtttattacgtaaataacgaatgtaaacatcaacgacattcgtttctacttcactattatacccccatacgtgatcgagaatttgttcacgctgcatgacgtggttacgattttcagctaaaacatataataaatcgtattctgttttagttaattctaattgatggccattaacagtaactttaaaggcatctttatcaatgataataccattgatatctaaaacatctttatctggctgtctgcgcaataccgctcttattcttgcgagcaattcttctatatcaaagggttttacaatgtagtcatctgccccatagtccaacccagctactttatcatatgtctcgctttttgcagtaatgatgataattggagtagttgttttttgacgaatttgtctacaaatttctagaccatttatgtttggaagcattaagtctaaaatatataaatcatagggcttagataatgctttatccaaacccacctttccatcattctctatatcaacagtataattttcatgagttaactcaagctctataaatctagcaagattttgctcatcttctacaattaaaatatttgtcatatttgcacctcacgctacatcttaaacaattaactcgtatttctaaagatgtaattcaaaattgtaaatgatttgttatgaaactagtatcattttaccatgaaccacgataatagatagtcgaataagtagtctgtatttagaaaaagtcactctagtattatcattgtatttaagttaaatggaaaaaaatatatatttctaattgacaatcattatcaatcatgtataatgataattgaaaatgattatcaataccaattgaaaaacattccccccacatacaagttgttcttttggattggtcattttcaactatccccttttatatgcccgtaaaagactaacgttaagaaatgacgtttcaataaaagcagtagacctttgacacttgaggtctgctgttttttcaatgataatataatgagagaaagtaaaataataagtgactaataatcttatcaaaatttttagaacgctcatcacttttgattaatgaaataatatatacaaaagagtctgtaacacatgaagtgcacagactctttcctacgattagtcaagtacttataattaaaataagcattacttaactaaaccgttcattttaatttttttgaataaggtgttaaactatatttgattgtacgtttggctaatgtggtgacatttgataatcgtacaatttatgattcattacaagataatgaattgtttttaataatcgatttatacaagcaatgatggcagtcttatgaggtttctcattaggctgctttcttagtttgtagtaataatcgacgacatgattgtcataatgatgctgccctcttattatattcataatcacccaaaataaaagttttctcgcttttttattaccacgcttgttgatggtatctctacagtgtgtatgacctgattgatatcgtttgatatcaatgccaacaaaagcattgagttgtttatttgatttaaatcgcttaatatcaccaatctccccaataatcatagctgtgcttagcttaccaataccaggtatcgaatgaatattttcaaaataatcgagttgttgtgctaattgaatcatggcatcatctaattgtttgagatgatgaatagattgttttaattgttgaataagtaagcgtaatttttcgactagaaaggaatgtctatcgacattaggatagctttcttgagcaatcacccttaattgaagtgcatattttgtagctttatccattgacattcccttatctgtagaattgaatatatgtgtaatcagtacctccttgtcgatatcaagaaccatgtctggatgagtaaa

SEQ ID NO: 3787 - DNA, 3058 bp, Artificial Sequence
  Description of Artificial Sequence: synthetic nucleic acid sequence
tctgctacttttctcgctgtatctattctcggtctatcatttttaactgaaatagtattatcatcattccaagttccaactatacttttaagttcttcgtactcttcactaacgctataactcacaccatgagcacctattttccctttttctagttttggaccaacagtaacgaatttatcgtaaatttgtgtatagtctcgctctacgatagaaaaattaggcattgttttacctggcacaccttcaatttctcctttagaccaatcttttacaataccgtattcagttgaaatttcttgttttgaatcatgtcctaatggtgtagttacgacatctttaaatttacctggaagataatctttcgccatttctgaaacagctttacttagagttttataaatatcccagtccgaacgcgattcccataatgggtcaatcgctgggttaaatggatgaataaatggatgcatgtctgtagaagataaatcatgtttttcataccaagttgcagcaggtaaaacgatatctgaatataatggcgtcgcagtcattctgaaatcaagtgatactaataaatcaagtttcccttctgtatcctcgcgccatttaatttcctctggtttatcatcttcatttggctctgccattaaaccagagcgcgcacctaacaagtgcttcataaagtattcttgtcctttagctgaactagaaattaaattagatctccatacaaataatgttttaggatggttttttcttaaatctggatcttctaagttacggggtcattttgccgagttccttaacgagagttcgctcgctcaccttagaattctcatcttgactacctgtgtcggtttgcggtacgggcacctgttatctatctagaggcttttctcggcagtgtgaaatcaacgactcgaggaaacaatttcctctccccatcacagctcagccttatgagtgccggatttgcctaacactcagccttactgcttggacgtgcactccaacagcacgcttcgcctatcctactgcgtccccccatcaattaaaacgatactaggtggtacaggaatatcaacctgttatccatcgcctacgcctgtcggcctcagcttaggacccgactaacccagagcggacgagccttcctctggaaaccttagtcaatcggtggacgggattctcacccgtctttcgctactcacaccggcattctcacttctaagcgctccacatgtccttgcgatcatgcttcgacgcccttagaacgctctcctaccattgtccaaaggacaatccacagcttcggtaatatgtttagccccggtacattttcggcgcagtgtcactcgactagtgagctattacgcactctttaaatgatggctgcttctaagccaacatcctagttgtctgggcaacgccacatccttttccacttaacatatattttgggaccttagctggtggtctgggctgtttccctttcgaacacggaccttatcacccatgttctgactcccaagttaaattaattggcattcggagtttgtctgaattcggtaacccgagaggggcccctcgtccaaacagtgctctacctccaataatcatcacttgaggctagccctaaagctatttcggagagaaccagctatctccaagttcgattggaatttctccgctaccctcagttcatccgctcacttttcaacgtaagtcggttcggtcctccattcagtgttacctgaacttcaacctgaccaagggtagatcacctggtttcgggtctacgaccaaatactcaacgccctattcagactcgctttcgctgcggctccacatttgctgcttaaccttgcatcagatcgtaactcgccggttcattctacaaaaggcacgccatcacccattaacgggctctgactacttgtaagcacacggtttcaagttctctttcactccccttccggggtacttttcacctttccctcacggtactggttcactatcggtcactagagagtatttagccttaggagatggtcctcccagattccgacggaatttcacgtgctccgtcgtactcaggatccactcaagagagaatatgttttcgactacaggattattaccttctttgattcatctttccagatgattcgtctaacatgttcttttgtaactccgtatagagtgtcctacaaccccaacaagcaagcttgttggtttgggctattcccgtttcgctcgccgctactcagggaatcgatttttctttctcttcctccgggtactaagatgtttcagttctccgggtctgccttctgacatgctatgaattcacatgtcgataacatgacataactcatgctgggttcccccattcggaaatctctggatcaacgcttacttacagctacccaaagcatatcgtcgttagtaacgtccttcatcggcttctagtgccaaggcatccaccgtgcgcccttaataacttaatctatgtttccaccatattttgaattgttattcaaaataaatagctaaaactagttattaatcttgtgagtgttctttcgaacactagcgattatttatgaattcaagcttatttaaaactctattcactcggttttgcttggtaaaatcttacttacttatctagttttcaatgtacaaagaatgttaataaacattcaaaactgaatacaatatgtcacgttatccctcatcttcgtagaagatgttccgaatatatccttagaaaggaggtgatccagccgcaccttccgatacggctaccttgttacgacttcaccccaatcatttgtcccaccttcgacggctagctccaaatggttactccaccggcttcgggtgttacaaactctcgtggtgtgacgggcggtgtgtacaagacccgggaacgtattcaccgtagcatgctgatctacgattactagcgattccagcttcatatagtcgagttgcagactacaatccgaactgagaacaactttatgggatttgcttgacctcgcggttt

SEQ ID NO: 3788 - DNA, 3673 bp, Artificial Sequence
  Description of Artificial Sequence: synthetic nucleic acid sequence
tattaattttaaatctttaggactcattgcaaaaggagtaacatcactattgtcgtaatataaatctaattctccatcactatcaacttcaagtaaatcatagtcccaacgacaactctgacaacaaccacctcgattagaatctcgagctgtcatatgattacttaaagtacaacgaccagaatatgcgatacacattgcgccatgtataaacgcttctatttcaatatcaactttttctttcatttcactcatttccattgcaccagtttcacgtgcaagtacaacacggtctaatccttcttgtttccaaaattcaacagctttataatttgaaagtgattgttgtgttgataaatgaatttctaatctgggcgcaacttttttacaagtttctatgataagaggatccgctactatgataccagtagcacctgtagattcaaggttttgtaagtactcttctagtccctccatattttcatcatgtgcaataatattcgttgtaacataaattttagcgccataacgattagcaaagtctacaccttcagcaatttcttccatagtaaaattatcagcattagaacgtaatccatattcttggccacctaaaaacactgcatctgcaccataatgaacagcaatcttaagtttctctaagttaccagctggtgcaagtagttcaggctttttcattatcttttgggttttggatttaacttcttctaaagttttcattttaatgataagcctccttaatatactgtttgtttatacaagaaaccttcgtcgaatggacgatgttcaggttgtatttcttctataggatcaacgagcatgaatttttcatcttcatatgcatccggatcttcattaaataaatctatagcttctcgatattgctctgtgactacatttatatattcttcactttgtaaaataccatctatcttaaacgcatctattcctgcctcaaaaaaaggctctaattcttctattaaacagatatcatttggagacatgatgtgagtaccattataatcttcaaaaactggatatttattatctctttcttcatcatataataataagtctccataatcatgttggcgttctatcttcatttgtcgctcttggaaagtataataatttcctaatagcattcttttggattgaaacatacaagtcataccatgaacttgaacttctatctctacatcagcatgctctttaatatgaattatttcatctaaactaagttctcgagctaaaactgctctatttgcaccttttttcccccagtaattacactgaaaataattcgttacaagagtttcagcatcccaatttaatggaattggatgctcgtgttgtttaacatacataacgacagctggatcaccaaatataatgcgatctacttgaatatcatgtaaaaagttaatatagtcttccaaggcatctaagtggtaattatggaaaataccattcacagcagcgtatacttttttgttatttttatgggctaatgctacagcttcttgcatagcatcacgattaaattctcccggcagtcttaaaccaaatttttgttcaccaataacaaatgcgtctgcacctttatctattagtgtttccatatgagttattgacttaggagtaactaataattcaaccatagtcattctccttttatagatattgctaatccatcatccatatttataaagtttgttgtaaattgagattgctccatcaaccattcattgtactgttgcactttcttaaccatttgtttcacatttctcgaacgaacaacgtctatatttgaaacaaatccatgatataaaacattatcagtaaccacaattccacctttttttaataacggtgtatatagttggaaaaatttcattgattgtgctttagctgcgtcgataaatatcatatcatattgtttgtcattgacttgttcaaatgcattcaaagcatcgtattcaattaaacggatttgattctggtatcgatacttttttatgaacttttttgcaagatgaatcatgtcttcatttcgttcaattgttgttacatttatatctttcgaaatattagcgaattgcattgaactataaccaatggctgtaccaatttctaaaatatttttagttctattcattcgaatgagttgtcttatcaaatcaagtgttaatttatctacaataggaacttgattttcttcagcataaactctaagttcttcgatttcagtatcaattgattgatgtaattgtgctaaatatttttgatttgaatccatatcattaaaacttcctttatcattaacaattacaaaaacaaaataaatcagcccatgtattgattatgttgatagttaatcaatgaaaatgactgattataatagtaattcttctatacttttatattagaagtaaatatgagtattcatagaaattaactttagacattttaccataattcaaagatttttataagaggcaattatacgaatatgtctccaagcattattattagtagggtaaatttaaataattctaatattaaaatgcctgggacagcattgattgtctcaggcattttgaaagtaatttaagatggtaactaagttgaaaatttaataatattaaactttccctctcaatataattccttgatgtaagagacctagaatctcaattacacttctcatacaacatcttttaaagattattcgttaatctcagtatttacaacttcttcaatcatatcccattcttcatctgtttcaatagggactaatttcccaccatcaccagactcatcaggttcatttatcattggtacaagttcaatcatatcttcgtcatctgattgtgcaccttcttctgcaagaacgacatattcttttttgaattctggatgataaaattctaacattttacggtataaaacttcatttccgttttcatcatataacgtaagtaattcctcttcattatttattgttaactcagcatcgtgattatgttctgtcatttttaatttctcctttattgaatagaatctaaatagccttgtaaaataaatacagctgccattttatctattaccttttttcttttttgtcttgaaacatctgcttcaagtaaagatctttcagcagccattgtacttaaacgttcgtcccacataacaatatcaatagaagggatagactcttgtaacttttctttatattttattgaagcctctccccgaaaacctattgaattgttcatattcttgggcaagccaataacaacagttccaacttgattatctttaataatcttcacgagttgatcaattcctaaatcatcttgttcttcgttgatacggagtgtgtctaacccttgagcagtccaacccataaggtcacttatagcaatgccaacagttttacttccaacatctagtcctaaaattttatgctttagcatattaattcttagactcttttaaatagtttgaaacgagttcttccataattacatcacggtctatatgacgtatttggtttcttgcttcattttgacgtggaatatatgcaggatctccagataataagtaacccactatttgattaactgcattatatccacgttcttctaat

SEQ ID NO: 3789 - DNA, 3040 bp, Artificial Sequence
  Description of Artificial Sequence: synthetic nucleic acid sequence
tgggattttacttattgatgctcaataccctgaattaagacagatggagaaaccgttgtttaaagagatattagaaaagaggaatcaagtcgatcaatcttttcgtgaaactcagatacgaacaactcaacaacaacttccatcaatgatacaaacagagacaaacacacatttatttatccatgaagacggaatgagacagcttttaaattttgatggcacttattttaaactgaataaaactgagaaacgttacacgaaacaaaatttattagatattatagaaagagagcctgaaagaatttctaataatgttgttactcgtccagttgtagaggaatggttgtttaacacagtagcatttatcggaggtccaagcgaaatcaaatattgggcagaattaaaaggtgtttttgatacgttaaatgtagaaatgcctattgttatgccaagattaagaatcacgtatttgtatgctagaactaaaaagttattaaaacaatataatttatcgatagagtctgtcattgctaatggagtagaacaggaacgtcaacgttttgttcgtgaaaaagcatcaaataattttataaatgaagtagaagaaatgaaaattcagcaacaagaactttataacaatttattcacctatgtggaaaataatcatgacaaccaacttcttttagaaaaaaataatcaaattcatctcaatcagtacgattatttaatcaaacggtacttactgaatattgaaagagaaaatgatataagtatgcgacagtttagagaaattagtgaaacactccatccaatgggtggtctacaagaaagagtttggaatccacttcaaattatgaatgattttgggatagatgtgttcagtccctccacctatccaccactttcttactcgtttgatcatttgattataaatccttgatatgacagtgtttttgcccgttttatcttaaagataaaacggttttttttgtgtttgagcaaattatttgcaccttttttgtataattagtggaggatagtggggagatgtggtaaattataaataaggtgaggtgataaaaaatgttcatgggagaattcgatcatcaattggatacaaaaggacgtatgattataccgtccaaatttcgttatgatctaaatgaacgttttattatcacaagaggccttgataaatgtttatttggttacactctagaagagtggcagcaaattgaagagaagatgaaaaccttacctatgacaaaaaaagacgcgcgtaaatttatgcgtatgttcttctcaggtgctgtagaagtagaattagataaacaagggcgtattaatattccgcaaaatttaagaaaatatgccaatttaagtaaggaatgtacagtaattggtgtctcaaatcgtatagagatttgggacagagaaacttggaatgatttctatgatgaatctgaagaaagtttcgaagacattgctgaagatttaatagattttgatttttaaatggaggaatttagatgtttcatcatgtgagcgtcatgttaaacgaaaccattgattatttaaatattaaagaagatggtgtgtatgttgactgtacgttgggtggagcaggacatgccctctatttacttaatcaattaaatgataaaggtagacttattgcgattgatcaagatttaacagccatagaaaatgcgaaagaagttttaaaagaacatttgcacaaagtcacttttgttcataacaactttcgagaattaacaaatattttaaatgaattagaaattgaaaaagtagatggtatttattatgacttaggtgtttcaagcccgcaattggatgtgcctgaaagaggctttagttatcacaatgatgcgaaactagatatgcgaatggatcaaacacaatcactttctgcgtatgaagtagttaatcaatggtcttatgaagcattagttaggattttctttcgttacggtgaagagaaattttctaaacaaattgcacgcagaattgaagcccatcgagaacaacaacctatagaaacaactttagaactagttgatgtcattaaagaaggcataccagcgaaagcaagacgaaaagggggacatcctgcgaaacgcgtgttccaagctattcgaattgctgtgaatgatgagttatcagcttttgaagattcagttgagcaagccattgaatgtgtgaaggtcggaggtagaatttcagttattactttccactctttggaagatcgtttgtgtaaacaaattttccaagagtttgagaaaggtccagacgtaccaagaggtctccccgttattcctgaagcatatacacctaagttaaaacgagtaaatcgtaaaccgattaccgctactgatgacgatttaaacgaaaacaatcgagcacgtagcgccaagttacgcgtagcagaaatattaaaataaggagtaagtgtaatggctgtagaaaaaatttatcaaccttatgatgaagcgacacaaaccagtatcccacaaagacaaccacaatcgagtcctgaaaaacaaaccgttaaaagaaaagttgttgttcaacttactagatttgaaaaaattttatacaatagctttgagccactttattaattttaagtgggtgtccaaaaacaatatatcctcttgctccttcagtgatttgaccaatgtctaattggtctccatttcttacatgataaacagttaataagtcaattttgttaccattaagtttcggttctgaatcaccaccgacaatggcaaaagtattgtctgttaaaaattctatattaggacctactaaagtatattcaattgctggtccatgatttccgataagtttttgggcaatagataaactatagtaatctaatgcacctgcttcagaaaatcctaaatcctgataccctaatctacctatatcttgaattgttgaaaacaggccaggctttaaaattttaatactcatcttgatatgtcacccacttatctatatcaaattttcc

SEQ ID NO: 3790 - DNA, 3135 bp, Artificial Sequence
  Description of Artificial Sequence: synthetic nucleic acid sequence
aaaactctatttaatatgacacctatagccattagattttaccacctaacatcaattttttgttattctctaatactaaattctatttacattcatatattttttatacgatactctaaagcactttcgatatcataccaacaggttgctgagcgtcattttttataattgaagtctgcgttgagaatcgatttctttttaaatatttatacattttgtcacccatctcgttaatatcatacttttatcatatacaacagacttctctaaatcaaaatctctttattataaaatcattttaaatccaaaaagtatttttgaaaatatttctaattatctgtatactttaaacaaatactttgcaagttaaaaagggatgaataaaaatattaaaatgaaaaacaaacgaaaaataaacaatacgcttgtttatactatctctgttttaattattgttgttattactcttattgcgggtatctttcctaaagcatttgggatgtatgcgcagagcgtttatgattggattacaaattggtttggttggctattccttatcattgtctttattttagatgtatttttaatattcttagctttttctagatatggtcgatttaaacttggttcggatgaagaagaaccagaattttccatgctatcttggattggcatgttattttcagcaggtcttggcgtcggtatagtcttttggggtgttgcagaacctttaacgcattatctccattcacccttccctggaaaaattgcagatcactctgaagaatcagcacgtgttgcgatgggatatacattcttccattggggtatttcacaatggtcaatatttgcaatttcaggattaatcgttgcatactttcaatttagaaaacaacgtaacgggcttatttcaacagctatggaacccgtttttggtgaagcttataaacgtcctttcaggaatattattgatatattagctattatcgcaaccgtcatgggaattgctacgtcgattggtttgggaattatgcaaatcggtggtggattaaaccatctctttgatgttcctaataataatttcactaaaatcttaattactattttgatggtagccatatttttaggatcttcattaactggcttaaatcacggtgtaaaatggttaagtaatttaaatattttattaggtgctattttacttatatttattttgatttttggagatttaaaatttattttagaatcatacacactagcaatttctgattatttgcagcattttatagaatatagtttacgcgtaaatccatactcaggagatgatagttggattcaacagtggactgttttctattgggcttgggttatttcttggtccccttttattgggggctttgtagcaagagtatctcgaggacgtacaattagagaatttgtcgtaggtgtactcattattcctcctctaatttcgtttacatggattgcaggttttggaggtacagctattaaacttgctttaaatcataacgacaagcttgttcatattgtagataaagattatactgttgccttgtttgaattattatcacattttccattgtcggaagtcactagttccttagctattgtacttattttcatctttattgtaacaagtgctgattcaactacgcatattgttgcaggtatggctacaggtggttctatcaatccaactttaaaacataaagtcctatggggtctacttattggggcgatttcagttgctatgacaattgcaggtggtcttaaaagtttacaaactgcatcagttattacaggtctaccattctctatcattttattattaatgatattctcactcatgagggctttaaaaagagaacccatccatcattttaaaatgacatcaattgatgatgaaaaagattactctatttcattagaagagcgtgaaaaacaggacgaacaagataacaagtaacacatctttaattaagtaatgctattattcattttctttattattcttttgaactatgacgcaacgggagcgggacagaattcatattgaattcgttgtcccactcccgtttatctatgttttaaaataatattctcgttttttaatttgctatatataatcatttatgacaatgtagcacttgtgacatacccatctttaacgtggaaaacgatgtttccttttccgacttgataaccgtacaagccatctgtcttacttgttttgtttttagataatgacggctgataattataattttttccatacttttgtttaacttgatctaaagtaacagttctggaagcaattttaaattgtacgttgtttgctttatttccattaatttgttgaaatgtctgatcgtatatttttttagtagcagtcttagattcatatttttgatttaccttaataccattaaatgtaacgtttccagcttttaaaccttgataaaatgaattgctaagtacaaagtcgccacccgatgcagtataaccattatatttataccagtaactgtgtgctgtttgtgcctttgcttcattagatacaccattatgctctgttacgtttaaacctaaaactgcacctaaagtaataccacttacgacaaatgcttttgcaaaccttttcataatgtatcacactcctaatataaaataataatgtgttgctacactcaacatataatattccattaattattacaactatctattaataggtaaaaaatctcttaatggtttttatcggtgctctatcaatctttattttgaaattgaatgagagcgaagctgggacaaaaaggttcaagataagtaaaaaaagacaatttctattgaaataatatagaaattgtcttttttataatttttttgattattttcagctcgttgagctgttacttttcttatattaagccacgatgatgtctgaattcatcgaattcagtatcgggaattgtttctacaatatcatttacatgtcgtgaaatatcatttgtggggataagaactgaagtttccattggtagagtatgttgagtcaagttatattctttatacataaggcacctcgttaatttagtttattggtatttattaaat

SEQ ID NO: 3791 - DNA, 3528 bp, Artificial Sequence
  Description of Artificial Sequence: synthetic nucleic acid sequence
tcatcttcgtatccaggcatatagctaggttctggactaaaatgtgcgttaattggtgaagcgtgttgtatactttggcaaaatgaaatcatttgctctttggtctcaaattgaaccgtttgaattaagtctgtacgataaacattatatttaggggaggtcttcatgtttattttttctaataacaaactagtaaacagtgcaccttttaaactttggctaaccacatgtggcgctagaaagaatccttgatacatttcttgtaaagaattaagtgaggctcctgcttccttaccaatgcctggtgctgttaaacgataaccacagcgttcaattaagtcttgtctaccagcaatatatcctccaattttagctaaacctccacctggatttttaattaatgatccggcgattaaatcagcacctacttcaatcggttctttatcttctacaaattctccataacaattatcaacaaaaataatgatattgggataaacctctttaatagatgttattgcttgttcaatttcattaattgtaattgatggacgttgatcatatccttttgatcgttgaattgctacaactttttgtattgtcattaattgcagtgatgactttaggaatatcaattcgaccgtcacgtaattcgacttcattatagcgaacaccatattctttaagactttcaacaccattgccatttataccaatgacttctagaagtgtatcatatggactacctgtaatataaagtagttcatcattgttttttaacgtactttgtaaagctaaagtaatagcatgagtacctgaaataatttgaggtcttacaagtgcgtcatctgctttaaatgtgtgcgcataaatttgttctaaatggtctctcccaaaatcatcatatccataacccgtagacccctgtaaatcactttcgctagctttaacatggtgaaaagcatttaagaccttttcctgattaaataatgcacgcttttcaatttttctaaagtaaggaataagtgtgttttcaacttcttcaactaaattgctaaaatcttgcataatctgtcttcctttttataattttttaaatcctttgatacgataagatgcttgtgtttcgtcaaatattaattcagtaacaagcgtgtgttgtttaagaaaatataatctatctgcatcagcactatctacaatttcttcgtatgggctgagactattttttatttcttgaattactaaatttttcaccttttgtttatcattttcatcacgactagatacaaaaacatgcgcagatttagatacaggtacatccatctgttcgttacataagtcttttttattaaaaataactacttgtggaatatggtccatatctaaatcattaataatttgatttacagtgtcaatttgagtacggtattccgaatgacttgcatcgacgacatgcataagtacgtctgcacctttagcttcttctagtgtagatttaaacgcagccaccaatgtcgttggtaatttctgaataaatcctaccgtatcagaaataattaaattaaatccttcattcacttgtatttgtcgtgttttgggatctaatgttgcaaacaaaatatttttttcataggtctcctcattagctaaaacattaaaccatgacgattttcctgcatttgtataaccaactaaagcgatttgaaaaacttgattttgttcacgtttatttctatatctttcccgatgatccacgaccgtttttaattgatgtttaatctcattcatacgtgttctaatatggcgacgatccatttctaattttgtttcacctgggcctcttgttcctatgccaccaccaagacgagataggcttttaccatgaccatgtagtcttggtaacaaataatcgagttgtgcaagttctacttgtagctttccctctctacttctcgctcgcaacgcgaatatctctaaaattaattgggttctatcgatgattttaatgcccaaattatcatttaacgttttagactgtgccgtcgttaattcatcgttggttacgacaacatctatatcatggaattctatgaaagattttatttcatcgatttttccttttccaacataatatttatggtcaaattgctctctattttgagtgatttgtcctttaacattaagttggcaagtttgtgataaagcatcgagctcttccatagtagattcaaaattaaattgacgatccgtttgagcatgtacaccgattaatacagcagtttctcgtttattttttgttctataagtcgcatgctgtgtcacgttatacatctccttttaaaagttactcaagacattttatcatagagtgtgaacaaagactaactacacaaattgtgttaaattagatgtatatcgaaagggtgataaaatggaaagtatttatgattttgttgtacaaaaaaacaatggtgaaagttataaattagagcagtataagggtgacgttatgcttattgtcaacactgctagcgaatgtggttttacacctcaattcgaaggtttacagaagttatatgatgagtataaggatcaaggatttattattttaggatttccatgtaaccaatttggcggtcaagaaccaggatcgggagaagaagctgctcaaaattgcaaaattaactatggtgtgactttccctattcatgaaaaagttgatgttaaaggtgataatcaacatccattatttcactttttaacaaacgctgctaaaggtatgataaacgaaaaaatcaaatggaatttcactaaattcctaatcgaccgtgaaggtaatgtgattaaacgtttctcccctcaaaagaaaccggaacaaattaagactgaaattgaaaaattactataataaattttaacaagaaaatgcttcatctaatgtttttgaactgaattaatgaattcaatatttacattagatgaagcattttttattacaaacattccttggtttgtgttaaagtgctacgtttaaaacatgtgcttcaatatttaataacattcttaaataagtcgaaatctgacttctattgaggtgatgcattatgaatgcactttgattacaactttttattcttcactattcacttcagttgcttcagacgattcattatctacagtgaaagtgctgatcgcatgtttgtaaatcagatgttgcttaccctgagaatttaaacttacaacatatttgtcataattttcaacgacacctttcatttgaaagccatttaaaaagaaaattgtgacttcagttttttccgatttaaagttctctagtgcttggtcttggatgttttcgtttgcaatcatggttagaactccttttatttatttgggttgtaatctcatctaacatcatttgaagtgacatcctttctttatttaaccaatgaacattcattttatttttaaaccaagtcaactgtcttttagcatattgtcgagaatgctgttttaatttctcta

SEQ ID NO: 3792 - DNA, 3298 bp, Artificial Sequence
  Description of Artificial Sequence: synthetic nucleic acid sequence
agtagtataaagaaactagaccagaaggagccaatagttgggttaacaccttcagaagcatagtgtgcgaattcgtaaatttcgaaacctacgaatacaagacctaggataactgtgataatcatccaaaacatcattaagttttgtttttcttgtcgcatgtaataaattgcaataccacaagtataagaactaattaataatgcaaaagtcattattaaaatcaaatgtaattcgaataagtcggtagttaatttaccgccatatccgccaccatgttgtaacgttaataacgttgcaaatagggtaccgaataacgcaaattcagctgtaaggaaaatccaaaagccaagtttatttaattcgccttcgtgtgtacgagaatcaatagtatttgcatcatgactcatgacttacagcctccctttctttaattcgagcttctcttaaacgagcttcagtttctgcaacttctgaagcagggatgtggtaaccatgatcaatttggaaacttctccaaatcatagtaatgaagatacctgctaaacagataagtgctggaacaatagattcgaagattaagaagaaaccaccaatagtcataaatatacccatccagaatcctactggagtattgtttggcatatgaatatctttgtagttatggttgtctaaataatgacgaccatgttctttcatatcaacgaatgtatcgtagtcattccaatcaggagtgatagcaaagttgtatttaggtggaatagctgatgctgtagaccattctaaagtacgaccaagtccatcccagttatctccagtagcttcacgtggagctttgatatgactataaacgatacttgcaactaggaataagaatccaattgccatcaatactgcaccgatagttgagatgaagtttagtaaccaccaaccatcagaaggcatgtaagtgtatagacgacgtggcataccatctaaacctagaatgaattgtggtaagaaacaaacgttaaatccgatcatgaagaaccagaagcaccatttgtttaatgtttcatttaacttgtagcccatcatttttggataccagaagattaaaccagctaagcaggcaaatactacaccagtaaccaatgtatagtggaagtgagctactaagaaataagtgttgtgatattgatagtcagctgatgccattgcaagcattacaccagtaacccctcctaataagaagttagggatgaatgctaatgagaatagcataggtgactcaaatgtaattctacctttgtataatgtgagcaaccagttaaatagtttaactccggttggaacaccgattaacattgttgagatagagaagaatgagttaattaacgcaccattacccatagtgaagaaatggtgaacccaaactaagaaacttaagaatgcgatacctgcagttgcccaaatcatactttgatgaccgaataaacgtttacgggcaaaagtagggatgatttctgagtacataccgaatgctggcaaaataacgatataaacttcagggtgcccccatacccagaagaagtttgcccaaagcattggcataccgccatttgctacagtgaagaactgagttccaaaaattctatcagcagtcattaaagcaagtgctacagtgaacactgggaatgctaatataacgattaatgttgtaatgaatgttgttacactgaacattggcatttgcataaacttcattgttggagttttacatcttagaatcgtaacaaagaagttgataccagtcattaacgatccgataccagatatttgaattgcaattaaataatagttaacacctggacctggactgaattcaccagcaagtggtgcgtagttagtccaaccagcagctggtgatccacctacaataaatgataggttgaataaaatcataccagcgaagaatagccagaaactaacgttattcattacagggaaggcaacatcgcgtgcaccaagttgtaatggaataacaacattccataaaccaaagataaatggcatagccataaatataatcataattacgccgtgcgtagtaaatacttcattatagtggtttgcttccaagaatttgttatctggaattgttaattgagtacgtaacattaacgcatcgataccaccacgaacgaacattaatacggcagaaattaaatacatgataccgatttttttatggtctacggatgtgaaccattctttatatagatatttccataatttgaaataagatataactgctataaggccgatgactaagaatggcgcagcaatttgtgctgagataatcatccaatttcctttaactagtagttgatcccatggaaaattcattaatgtccacctccatgatcatcgtgttcttttttgtgaagtttagacgcattttcgtcttttgctcccttagaaattttttccatttctttagagttataatcctcttcttttttgaactcattatcgtatttttcattgttgccgagaatcataggtttcataccgtgacgttcatagttagggtttgttatatgaaccttacgagcaggtttgattggtttatcttttacatctttgtataaatcctcttcagctgtgaagttaggatctttttgttcaaagttgtaacgtttgtaagcgtagaagatatactctggatcagccgcagggtcaacaaacgccatatgagttccactaaatgttaattctttgttagatgtgcttggtaagagttgcttgtcaaaagtatcttgacttaaagttttcttacctttagcctcttttacccacttatcaaaatcatttcaaatcctttccaatcaattggatcttgcaatcactgaatttactcctgtgttagaacgggaaacacatttacgcgtcatgcctttatttgaagaaaattattatatgtatgtgcccaaatcacatccactagctatgactgtacatcccccgctatctcaatttacaaatcaatcactatactgtctcgaaccaatgacaagctcaataaaaagtaaattgattgaaaagactaaggcacaagtacgaatgatttcagatatgaaactcgctcaacatattttgagtcataataagggatttattatttctagtcaaaattctttactatatgatcacgtaaattggactaaaatccctttaaatcatacagaattaaaacgaatgctatgtgtagttatgcgaaaagataacaagaaaaacgacattaatatagcatgga

SEQ ID NO: 3793 - DNA, 4093 bp, Artificial Sequence
  Description of Artificial Sequence: synthetic nucleic acid sequence
gctaggctattaccctaaaactgttgctaatatttctcaaattagttttatcgctaatatgattcaacaaggaataggaattagtatcgttccagaaagtttagttaatttaatggggaataacgtaacgtccattcaattagagaatgttgaattatcatggcatcttggcgtgatatggagaaaagatgcttatctcaatcatgtaactcgcaaatggattgaatttatttctgagatgaaaccaacataggtcaatatttagtaaaagattttatatcaaagtcgatattacaacttgtcaatttttaataacgccaaagatatgtaagaggcacaaacacatctttaatgtattgtacatatgcacgtaaatttcattaaggtacaccaatagttctcactccacaatttaaatattaaaatgactagtacataaattgaagtgtgcttttcaagtaggtgtttatacttaaataactgagcctgagacatcgatatttgtctcaggtgttttgtatattggaagttaatggctgaatttaaaatgtgccgaagtaaatctttatattataaattctttaaaaaggtatacgacggtagatattttaatcaattactatttttttgatgttttgacgttatatttattgataaatatttggaattcactgtatttaattgttagtttatacatagaggtgggtatggcctagtaggtagtcttttaataaaggcattgaattgatgtctttattgacgaaaaagaccgcgattaactcatattcgtttatttcatatatgaataaacaaagtattacatttttctataggaaacctattccttttatgaatggttaacatcgttattatgtattttattaatactttgtcacgtactataataataaacgtaataaagttagtcgctgaattgattgcttcagaaaagtgttgaaaaattgtcattaaaatgaattttttatatctgaactgaagtaaaattctagttattttaatagaaatattatacaaataagctaacacagttatttgtgtaactttattatgaaggagttcgttaaaatgaaaaaatttgggaaaaaagttgttttagtaggagacggttccgtaggttcaagttatgcatttgctatggtgactcaaggaattgcagatgaatttgtaattattgatattgcaaaagataaagtggaagcagacgttaaagatttaaaccatggtgcactttacagttcttcaccagtgactgtaaaagctggagaatatgaagattgtaaagatgcagatttagttgttattacagcaggtgcacctcaaaaaccgggtgaaactcgtttacaacttgttgagaaaaatactaaaatcatgaaaagtatcgtaactagtgtcatggatagtggctttgatggtttcttcctaattgctgcaaacccagttgatatcttaacacgttatgttaaagaagttacaggtttaccagctgaacgtgttattggttctggtacagtgcttgatagtgcaagattcagatatttaataagtaaagaattaggtgttacatcaagtagtgttcacgctagcattataggtgaacatggtgactctgaacttgcagtttggtctcaagcaaacgttggaggtatttcagtgtatgatacattgaaagaagaaactggtagcgatgctaaagcgaatgaaatttatattaatacaagagatgctgcttacgatatcattcaagctaaaggatctacgtattatggtatagctctagcactattacgtatttctaaagctttactaaataatgaaaatagtattttgacagtttctagtcaacttaatggtcaatatggatttaacgatgtttatcttggcttaccaacacttatcaatcaaaatggtgcagttaaaatttatgaaacaccattaaatgataacgaactacaattactagaaaaatcagtgaaaactttagaagacacttatgattctataaaacatttagtttaaaacttatgagaatgacgaagatgttttgagtgaacttaatttttgaaaggaaatgaatataaatggcggaaaaacaatattctgcagcacaaatggtaattgatactttaaaaaataatggagttgagtatgtatttggtattccaggtgcgaaaatcgactacttatttaatgcactagaggatgacgatattgaattagtcgttacgcgtcatgaacaaaacgcagcgatgattgcacaaggtattggtcgtttaacaggaaaaccaggtgtggctattactacaagtggcccaggggtaagtaacttaactactggtttattaactgcaacttctgaaggtgaccctgtattagctatcggtggtcaagttaaaagaaatgacttattacgtttaacacatcaaagtattgataacgcatcattacttagatcctcaactaaatatagtgcagaagtacaagatccagaatcactatcagaggttattacgaatgcaatgcgtacagccacttcaggtaaaaatggagcgagctttatcagtattccacaagatgttatttcatcacctgtcaaagctgatgcaatttcattatgtcaaaaaccacatcttggtgtaccttcagaacaagaaattaatgaagtgattgaggctattaaaaattctaaattcccagtattattagctggaatgagaagttcaagccaagctgaaacagaagctattcgccgtttagttcaaaaaacaaatttacctgttgttgaaacattccaaggtgccggcgtaattagtcgcgaattagaaaatcacttcttcggtcgtgttggtttatttagaaaccaagtgggtgacgaattacttagaaaaagtgatttagttatcacaatcggttatgaccctattgaatatgaagcaagtaactggaataaagaattagatactaaaatcatcaatgtcgatgaagaacatgctgaaatcactaattacatgcaaccagttaaagagttaatcggaaacattgcaggtacaatagatatgatttctgaacatgtaaatgaaccatttattaatcaagatcatttagatgaacttgaaaaattaagaggcgaaatcacagaagcaactggaattaaagcaactcacaaagaaggtgtgatgcacccagttgaaatcattgaaacaatgcaaaaagttttaactgatgatactactgtaactgtagatgtgggaagccattacatttggatggctcgtaaatacagaagttacaatcctagacatttactatttagtaacggtatgcaaactctaggtgttgcacttccatgggctatttcagctgcacttgtacgtccaaatacacaagttgtttctgtagctggagacggtggtttcctattctcaggacaagaattagaaactgcagtacgtaaaaacttaaatatcattcaattaatttggaatgatggtcgttataacatggttgaattccaagaagaaatgaaatataaacgctcttcaggtgtagaatttggaccagttgattatgtaaaatatgcagaatcatttggcgctaaaggattacgtgtgactaatcaagaagaattagaggcagcacttaaagagggttacgaaactgatggaccagtattaattgatatcccagttaactatgcagataatgttaaattatctacaaatatgttaccaaatgctttaaattaataaattaaccaatgatactaaggtgaattttaataaaacgcactctaaggttgaaaggctaccttagaatgcgtttcttcaagtaatgaatattaataggagtgattatgaatgactaatgtattatatcaacacggaacattaggaactttaatggcaggtttattagaaggaactgcttcaattaatgacttattagaacatggtgatttaggtattgctacgcttacaggttctgatggagaagtaatttttgttgatggtaaagcttatcatgcaaatgaacataaagaatttatagaattgacaggcgacgaaatgacaccata

SEQ ID NO: 3794 - DNA, 3825 bp, Artificial Sequence
  Description of Artificial Sequence: synthetic nucleic acid sequence
acattttcatagaatagatgcagatgaagtatggtattatcatgctggtcagacgttgaagattcatatgataacccctaaaggtgaatatcatactgttaaattaggtagagatatagattgtggtgagtgtttacaatattgtgtgccaaaagggacaatttttgcttctactttagatagtgcagagggatatagtctagttggatgtatgtgtcaacctggatttgaatacgagcattttgaacttttaacacaagaatatttgattcgtcaatatccacaatatgaaagcataataaaaagattagctatatctcaagaagattaatagaatatataataagtataagaacctgagacatcggtaatagtctcaggttttttgatatattgacagtcgataactaaattaatatacgactatttcaaattttttagaacacaacatagagaatttcaccgagaaattcaacaggcaaagcaggttggggttcgggattcaggacgtggggcaacgaattcaatttgaaatttgacacgtgcactcagttaattaaatgaagcctaagttttatttaattaacttacctttttaaataacacatggttttcaagatgtacatgttggtgtgtttgacgttcgatattttgtaatctttggtaaacaagcttccatgttccacatgcttcttctggggtttgataatcagaggttagttgattcataacatttaataattgcccagtatcttcgtggtcattaattaaatcttctaatatgattttaatgttttgtacatcttgtccttgactatattgaatgagtttaggaaaatcttcctcatcttctttacgtatatgatccaacatactatcacgaaactcgcgatataagtcttgtaattttaataagtatgggtgactaggaccatgtacttttgccaatttagtcatgtaaggtgtaagattcttaaattcttctttaagcgtttcgtgataagctgattgtatatattgtataagagattcaacatttaaaaatttaggattaatggtactgttaccttctgtattatcaatatgattcaacttatttaataaggaatttaagtcaatatttggtttatgattgacagctgaagcgatactctcttgtccgccacaacaaaaatctattccagcatttctaaatatatctgcacttttaggataatctgttacaacatctgcaacaatatcttcttttgtaatcataaaaattcctccttaatatttagtataaatgaaaagtaaaaaattgaatcaatcataaagataaacttcataaaatattcaaataataataaaaaggttgcaattcataaatttatcctttgaaatataggataatagctatcataattagaaaagagggaggaatgaattatgctaactgaaaaagagcaagatattatcaaacaaactgtaccattattacaagataaaggaactgagattacttcaattttttatcctaagatgtttgaggctaacccagaattattaaacatgtttaaccaaacaaaccaaaagaaaggtatgcaatctgctgcattagcacaagcagtactagctgcagcaatgaatattaataatttaggtgcaattaagccagcaattatgcctgtggcacataagcactgtgctttacaagtttatcccgaacattatccaattgtaggtgaaaatttacttgctgcaattcaagatgtgacagggttagaaagtgacgacccagtaattcaaacatgggcaaaagcgtatggagaaattgcagatgtatttatcaaattagagcaagaaatttacaaccatatgttatggaaaggttttaaaccatttaaaatcacaaacattacacaagaaacaagtgacatcaaatctttcacagttgaatctgaagaatatgatttaagtcaattcgaaccaggtcaatacattaccgtagatgtttctagtgaaaagttaccatatagagctaaacgtcattattcaatcatagatggagatgaaaatcacttagtatttggtgtcaaacgtgatgtgactactgaacatgaaggtgaagtttcaacaattttacatgatgaaatatcagaaggtgacatgattaatttatctgctcctgtaggtggcttttcaatagaaaatactgaaagaccgcaattgtttattggttctggcgtaggtatgacaccattagtttcaatgtttaaaaaagctgcatcattaaacgttccaactcaaatgattcaagcggttgtgacagaagatgaacgaccatttgctcaaaaacttgatagcattacagataattatgagcaagcacagctacatttacacgtgaaagataaagaaggttatttagaagctaaagaattagaacaatatttaagtgaacagcctgaaatttatatttgtggtggtacgaaattcttacattcaattataaattctcttaaagaattaaattatgatatgaatcatgttcattttgaaacatttattcctcgtttaagtgttcaagtatagttttaaagaaggtaatataatgaaaatgaatccaagatatgttaaagtgttttttctatatttagtaagcacatttatttctaatcgcttaacaacgaataaatctttatgcaaaacattaatgcaaggcattttaggttatggtttatttgcattaggattaaagtatttaactattaagaaaaaacaacatcaagcgcaatagaattttaatgattgttttaccattaataaaattggtattttatcaagcaacgagcaacagtgtttatgactctgtcactcgttgcttatttttatgttcacatttttaaatttcaatatttatgtgttaaaacctagtatttctatctattttaagtaaaataaatcaatttatagtaaaatagtcttaatgatttaataagaacatttatgtaaacagtatttatctgagacttaagatgacattgacatcctagtttaatataataaaagcaaggagttggtgactgtgaaagtaaaatatatagacaaacgtcactggcgtcgcctggtagagagagaatatacagaggttaaagttaataataatagatttaaaggtattataggcttggtcacgatgaaaaaggttcgtgagcctttagaggtgacggtagttggacaaaacataatagttgcagatgacaattataaatggttacagatactaccggataagaagcggtatagtatgactgtcatgtttgataataaagggaatccattagaatactactttgacattaatataaagaacattactcaaaaaggaaatgcacgtaccatcgatttatgtttagacgttctcgttctacctaatggtgagtatgaacttgtagatgaagatgatttaatgtacgcactacaaaataaacaaatttcaaagaagcaatatcatgaggcatatattatcgcccatcaattaatgattgaaatagaagataatttttcagaaatacaagataaggttatgcgttgttatcataaaatcaatcataaagcacagaaaatgaaacataaacgtccctataaagctaaaaagaaatcacaccgacgacattaacaattttaatcaatttatcgctgatggtaagttatgtcgtttcactaagattaaagtaaaaacatatgtagggggacgctatgaaaatagatgattatcgtttgctcattactttagatgagacaaaaactttacgcaaagcagcagaaattctatatatttct

SEQ ID NO: 3795 - DNA, 3005 bp, Artificial Sequence
  Description of Artificial Sequence: synthetic nucleic acid sequence
agctttagcaataggttgagcaatctccttattggtttgttcaagaacagatgcatcaatgtggggtacagggcaatatgcgcccatcccaccagtatttggtccttgatcattatcaaatgctcgcttatgatcttgagcaatacagtcgaaaggaaccgcataatctccatttacaaaagtcattaaagaaaactcttctccttctaaataactttcgaaaacgactttccctttttcttcttgataaatttttttgaccccttctaatgcgtcttctctcgtaaaagcaataataacccctttacctgctgctaaaccgtctttctttattacgattggtaaatcacaagtttcaacatattgcaacgcctcgttacgtgaacttacttctttatattctgctgtaggaatacgatatttgtccattaattgcttggcaaataattttgaaccttcaatttgagcggcatcttgtcctggaccaaacactttaatatttgcatttcttaataaatcagctaacccatctattaaaggttgttcaggcccaatgattacccaatcaattgcgttatgctgagcaaaatgtaaaatagcttgatgatctgattcagcaatttcactgtgcacttcagcaatattgaccattgcatcatttcctggaatcgcgtaaaccttatctacaattggagattgattgattttagaagctaatgcatgttcacgtccaccagctccaactattaaaactttcaatagattacccctttcttttcaaaaattaatgtttaaaatgacgcatacctgtcataaccattgtaatgccatatttattagccatatcaatggaatcttgatctttaattgaaccacctggttgaataattgccttaataccatgttcggcagcatattcaactgtatctcccattgggaagaaaccatctgaaacaagcgcaacattatcgttaatttctattgctctttcgattgcaattttagcggaacctacacgattcatttgccctgcacctataccaactgtttgtttgttgttactcaatatcactgcattactcttaacggcacttacaactttccaacctaggagcatagcttcccactgtgcttctgtaggttgaatgtcggtagcaacagtcatgtcatttcgagtcacatctttattatctttatcttgtactaagtaaccacctgaaacggaaacaaattcttgttcagcgttatcaattgtcatatctatttgtaataaacgaatatttttcttttgtgtcaatatttttaaagcttcctcagtaaattgaggtgcgataactacttctaaaaagatagaatgtaatgcttcagctaatttaacatctaccgttctattcaatgctataattccgccaaatattgattgattatccgcttcatatgcatgttgaaatgcttcatcaatcgactgtccaattcctactccacacgggttcatatgttttactgctacagcagttggctcgttgaatttttttactaaactgagcgctgcatctgcgtctttaatattattaaaactcaattgtttaccatgtaattgttttgcaccagcaatcgtatgtttgctatcagatgttctaacaaaatatgcagattgttgaggattttcgccatatcttagtgtttctttattgtctttgaaatagttaacaatagcatgatcatattcatttgtatgttggaaaactttaaccattagcgattttctatatgcttcgtccaattgatgatttttaattctctcaattacctcgttgtaatcggaaggatgtacgatagttgtaacatgtttaaagtttttagcagctgctcttaacattgtaggtccaccaatatcaatattttctattgcatcagtttctgttacatcaggttgagcaacagtctgttggaaaggatataggttgactactaccatatcaattaaatcaatatgttgttctcgtaattgctctaaatgatgttctttatctcgatcagctaaaataccaccatggactgctggatgtagtgttttaacacgaccatccataatctctggaaattgtgttaattctgacacggacttaatattgatattcgcatcttctaatacacgttttgtaccacccgtagaatacagttcatagtctaaattagttaatgcttttgcaaactctacaattccacttttattagaaacgcttaatattgcttttttcattctataagatactcctctatttaatgattttagctataactcttggataaagttcatattctaaatgttttactctatcttctaattgttctttagtatcgtccggttttatatcacattgctgttgttcaataatttctcccgtatccatcccactatctacataatggacagttgatccagttacagtatctccactttctaacgcttgacctatggcatctaaacctttgaatttaggcaataatgagggatgtatatttaatatccgtccttcataagcttgtaataagtcttggccaactagtctcatataaccagctaatacaatccactgaacttcctcactggataataatttaagtagatgctgttcatataaagatttggatgaaaagtcttttggcttgttaatatgaattggaatatttaaatttttagctctatcaatacagggtaccccttcattatctgtatacagtgccgttacattgataccagataattgccctgtttggatatgttttacaatattttcaaagttactacctgatcctgaggcaaaaatcgctatattggtcactattctacctccaataaatgaataggtgtatcatcatcttttataatctcaccaatttcatatgcagttgtatccattgcacgtaacgttgttaatgttgtttgaacatcttttttgtcaacaataattgtatatccaatacccatattaaatatgtta

SEQ ID NO: 3796 - DNA, 3549 bp, Artificial Sequence
  Description of Artificial Sequence: synthetic nucleic acid sequence
ccgataaagtcataaaggtagatatgactgttaaaaacaattctaaagaagaaattccagtaggtggagatataaaagtatacgtagatggaaaacaagctaaatcttatcctattgataatcaattaatagattcattatcaccaaacagagaaattagtggatctgaaggttttgcaataaatggtaatccaaaaaaaatcgaattagaatttcaacctttaacatcattctctaacaaacgttatatttataatattaaaccagaataatataggtattcacctgccctattttttcctttctctaggttgagagattaaaaagtttgaaatatgaaataatttattagttatacgatcttttatgaggagaatatatatgaaaagattattaggtacattaattgctgctacactagtgttaagtgcttgtagccaaaacgacactaaggaagatgaaaataaaaagtcagaaaatactactgaaaagaaatctgacgataaaaaagacaaaaaaactaatgaggataaaaagtctggagaacaaaagaaatctcaagaaaaaaagaataacaagtcaatgcaagaatctgctacaaatgaacaggttcaatctcaacaacaaacttcacaaggtgtaccatcaaaatgctctttgccgatgactgttttatcaatttgattcacatcgacactaatacgttcatcaaatacatacatcttaccatcccaatatagccctttagtttcagggtctttaccgtatgtagcaataccaccatgcaactgacctacgttttcaaatccttcttttactaaccaaccagaaaatttttcacaacgaatgccacctgtacaatatgtgacaatattttttccgtcgagttgttctttattattacgcacccattcaggtaagtcacggaatcgtgttatatcaggacgaatagctccacggaaatgtcctaaatcgtattcataatcatttcgagcatctaatataacagtattttcatcttctagtgcggctttaaattctttaggagaatagtatttaccggtaatttcacgtggattaatatcttcttctaagtcaagtgcaacaatttcacgtcttggacgcacgtgcatctttttaaacgcatgactttcagcttcatcaattttaaaagttaaatcagcaaaacgactatctgcatgcatatgctctatatatttatcagtatcttcttttgttccagataatgttccattaatgccttccgttgaaactagtattcttccttttaaatgatgttccttacaaaatttcaaatgttcggctgcaaaagtttcagggtcatctatagttacatatttataataaagtagtactctataatccataaatctgtgctcctctttagtcaattttagttaatttaaaagtatttgaagttatataaaaaaatgatagtgattgaagtttaaaaattagacattttaatattgtatcaaaatgagaattgctttcaataagatagcctataaatccgtcatttgaccgatataagatgtggtggttttcatatactctaaagtttcttgatttaaatcggtaatagttgttggtaacttaggttttgctccggttttatctactaaaccatcttggactttttcaagtaatgaaattttttctgatttccccatcatattccctcactttgaatcatctaattttttaatttcattataaacatcttgcgcgctagtagctaattgatatttaatattcaaattatctaatgtgttaaagaattttttttgtatttcaccaatacttttatctcctagtctcatgttttctgcttttgtttcaacaataaggtattttgcatcttgttcatcagtttctatcatatagacaaaatcaggcgtagtagtgccaccagtatatttaggaacttgtatcgcttttttaggcaaattaccaaatacagttacatttttatcgtaatttctttttaacaactctaactcaggtgttacactatcatatctaactggtggtctttcatataaaaatcttttttcagtttgaatgttattttcaacgttagtacctaaataatttgcatctacccaatctttaaactctgatatttctgaatcataaatggttgtagtagcagaaaaatctaatttcttatattcataactttgactatatttttcttcaaaacgcttgttaaattctcttattatattatttaaacttaattcactcaagaatcgttcatcactattatatttatcttttaaaacggaaagtaaatttttatgcattatagatattggtacattagttttaagtacaatttgttttaaaaacttaccatagttcatataaataaattcatttctataattatattctgaaatagattccttgataacttgtttaccttcatcatctttttccaaagattgatgtattctttctggttgttgtttaacaaataaatcatcgtcgttcaacaatctttcaacaaacaaatacagatcatcttcactcatctttttgaattctaacatatatcttttagataaattttcccataagaatctcaatttattccaattctctttatttaacttcacttttaaattgggtggattttttttcatatctctgactttatctgcatttaatttagatgcattaacttctggatataattctaacagccattcaaatcctgattttttaactccatcaatttcaacatctgttttaaactcatttttcctattaattagatttcgttcatctaattgttctaataacacttcatcattataatgaggatccacttgctttctatgttcaactattttattaatcatttcatctgttaatttatcttcacttaatttaacgtctacatcagaatttatttctccaattaatttttctgcgaaatccttttcatcatatccaattaaaaatgaaagtctacttggaaattcatcttgtgttaatctgtgaccattctcatcaacaggtaaacgcaaacctcttcctacttcctgtatcttgctattttcagaaccagaagttctcaatttcgcaataacgaaaacattagggttatcccaaccttctcttaatgtccattttgaaaataaaaatcttcttgtaatccagttaccattctcgtctttaaaactcagcattttttctttatttttaagtatatcattaacttcagcctgtattgcttcatcaccggaacctctgtcttcaccaaaataccctgcatggaccatttgattctcactattaagactatcatatgtcactcttaaaaaatctaagtattcaatctctcgtggtaattttttaacttcaaattcttttattaattttctaagtttaacttttaagagtctctcaaaagtctgtttcaaccagccctctttgtttctatatgacctaatagaatcaataaaaaataatgatagtgtttttacttttggttgaaaattttcttttaggttatct

SEQ ID NO: 3797 - DNA, 4039 bp, Artificial Sequence
  Description of Artificial Sequence: synthetic nucleic acid sequence
aattcgacacaatacctcctacgaactcaactacagtgaatatcatagtaataactaaagataaccataatgtaatttttgagctactttgaaactttctatgttcaatgtggtgaaaataatcaggtttattttccatgtctttcctccatctttttacgtctgtttaattttaaagttattatacccttaatcccatttaaataacttaaatgagtattcgtttgtaacttctctaactttttataactcaatttttttaatatgtcataaaactaacatatcctgtaaattaaagctcatattatttaaacatttaaagaacataaaagtaatataattaggttgaattatattaaagtttctctttttaacaacgctaatggtgtttaaatatataggaggaacataaggagacatgcagaatgaagcatcaaaaaaatcagagcaggtttaaactactaatagctggcataatagcaggacttttatctggtgtagtcaaactaggttgggaggtaatgttcccaccccgaacacctagtagagatgccactaacccacctcaacaactcttacaattactaggaataccgtcaaatattacccatctcacatacaatttttctgagcatgcattaccttggataagttttatcgtacactatagtttttctatcgctattgcaataatctatatttatatcgcaaagaaatatacaaaaatcacactaggttatggtgctttatttggtatagttatttggattgtttttcatttaatcttaatgccaattatgcatgtcgtaccgaatgcttttgatcaaccattttcagaacacctatcagaattttttggacacattgtttggatgattacgtctacgtacaacacgcattttcattttttgtcgttgttttttcttattttcttgtgacgtatattggttaccgatatgttctacttttttattcattgcttgtcacctccttaagcatttcactcttcattaatacgttcttctttaatcaaatcatacataccttttgcattttcttttgtagcatggtcgcttaatcctgttactttaactgtgactaatttttgtccaaaacgaataatgagttcatcgttttctttgatatctgtacctgcttttgccacatttccattgacagtcactcgaccttggtcgctaatttctttagctaatgtacgtcgtttaactaatcgtgacacttttagatatttatctaatctcatgaatttttctctccttgttgtaaaaattgtttgagatcatcttcgtcaaattgcctattttttgttttatcatacaatttcaagaagtggtctgcaaatactttctcaaatttaacacgaggcactttaccttctttttctttagcacgtgaccaaatgtcttttaaatcctcttgcgaagttacatgcgcattaccaaagatatgtggatgtctatgaatcatcttggtgttgagactttctataatttctttgatatcaatatatccttcttttttacctatactagaatgtaataatacttgtaaaagtatatctcctaattcctctatcatatgccaatcatcttcattatcaatggcttcaaataattcaaacgtttcttctaaaagataccgttttaatgagtcgtgagtttgtactttatcccacggacaccctttttcattatcaacgagtaaatcaatagtttgaactgcgtaatcaaaatcttgataaagtaatgtatcctcattgatttttggaataaataaacttgtaagattattaaaataatcgtcgtagcgatcaatttcataaagtgggcattcaattacgtgagctccatcactatgagaaccagtaattattttcacattaaaatcatcaggatatctttccattaaagtaagttttaaatcggcagctatcattacgctataaacttgagtaattactgtatttgtacgaacatttaaggccgattcttttaatgacgtaccatcaagcagtgtaaaaccatcattggggtctacatcaaccgcttcaaaaatgtcatcaataaaactttttcctccaagtaccttcacagagatatccttattaaaatgactatactctaataattttacagtcgtagtttcagcaactctaggatgaccaggaactgcataaacaatatcttcagattgtgccaattctattagtgatgtgacaatcgcttcataaacatcttcaaaacggtcatgtgcttcataaatactatcgaaactctcgaattcaatttctttctttagcgtattgatgacaggatgatttaaggttctagcatatactttagactctttttctaaaaaacgatagatacctaaaggtaactcatcaatgccataattacctaaaccaactattgtaattgtatgggtcatgaccgtcttcctctcttcatttgatataatttgtctccaaaaggtaagtgctttatttctttgtatcctaatacattaaatataataatatacaacattataatcactatgcctataattgagctaactataagttctagtaatcctaacatcctactttttgaaggtaaggcaagcatgacagtttgaacaactatactcataattatcatacctaaaataagtttaacgataaataaagatatacgattaaaacggtagtactttaagactgcaacttgcaatattatgacaaaaagtagtagtgataagactgtactcacacttgcacccacgataccccaaaaaggtattaatataacatttaaaataattttggacagtattcctattatcacacccataataatgggacgaatactggtttgaacttgtaataatgagatattcatcattattaacgaaacacatatcactgtaaacatataaacactcaaagttagagttaaatgattacttttaaagaatacaacattcataagtggaagcagattaattaatcctatactagctgctgtacttattactaccgtgattttaattgatgcatttgcataacgattcatatgaatttgattatgttcacgaattgcttgagtaagtaatgggataagaacgaaactaaaagtcgtagttacaatcaaacccatttgtataaatgaagcaccacgatcataaatgcctttttgaataattgcttctttaaaagcaataccgctatgttgtaataaacgtattattgtaaaactatccacaacttgccataaaataacgataagttgactcaatgcaaatatggatatggaaataaacaactgcttccattgaatggaagtattattaaagcgatagcataacttaagtttaagtggttttttaagtaataaatataacattgaacctaaaaaaccaatcgaagatgccaatatagctaatgctcctgcttgataaatagaccagtgtttcattgaaaacataataattgcaacaatgattaaactaactctaattacctgttctataacctgggaaattgctggtatggtcattacttgttttgattgataaaatcctcttaacactcctaagacacctattaaaataaaactaaaactggccatctttaacatgggtgctaaattagaatcgcccatccatcgggtaatcatattcgcaaacataaaaagcaaaataaagacgataaaacctatgcattgtaatcgaaacataacccttgtatagacttcatcggatcgattaacacctatcacttgagtcacagcacttggaatagcattcatagataaaataacccctagtgctacgacaggatatatttgttgataagcatataaaccgtcatcacctaaaacattttgatacggaatgcgataaatggcacttagtatcttcacaataattaatgctaaggtaagtataacgacgccgttaaacgccgtctcactcttagtcttcatctttaatcgccatactttcttcaatacatctaactaagaatttcaaacta

SEQ ID NO: 3798 - DNA, 3118 bp, Artificial Sequence
  Description of Artificial Sequence: synthetic nucleic acid sequence
tgatgttaacgtttggttatcatttttattattagcatttgtattcatcgtaggtccaactgtgtttattatggaaactacagttacagggttcggtaatatgataaaagatttcttccatatggcgacatggatggaaccatttggtggcataaaaggtcgtaaagaaacgaatttccctcaagattggacaatattctactggtcatggtggctcgtttatgcaccgtttattggattgtttatcgcgcgtatctcaaaaggacgtacacttaaagaagttgtattaggaacaatatgctatggaacattaggttgtgtgttatttttcggtatttttggtaactatgctgtatatctacaaattactgagcaatttaatgtaataagctatttaaacaattatggtacagaggcaacaatcatagaaataatgcatcaactaccattctcgacaattactattatcttattcttaatatcagctttcttattcttagcaacaacattcgattctggttcatatattttagcagcagcgtcacagaaaaaagtgataggagaaccgttacgtgctaatcgtttgttctgggcgtttgcgttatgtttactaccgttctctttaatgctagttggaggagaacgtgcattagaagtattgaaaacagcatcattacttgctagtgtacctttaattgttatatttacgctaatgatgatttcgttcttaattatactcggacgagatcgtatcaagttagaaagacgtgcagataagcataaagaaattgaaagacgttctctaagaatagttcaggtcaaagacaaacctgaagacgataacttataacaaaaaaaagccaagcgaatgttaaatcattatcgcttggctttttcttattgatcatgatgatgttgttcatctggaattgggaaatagttaaaaatttctcctgactctagagcttcacttaattgagcgagccacttgtaatatattttagagtggtctaactgcgcttttacatttattgcttgttttttaacttcctcatctatatcattcttttcaagaagtgggtgaatgatattttctgcatcttcaattgcttccatattagtgtcaatttcacgttcccattttttagtaaaaaagttgcggaagaaagtgaagaaatctttctctgcaataaaatgttgctttcggctaccacgcgtgaattgttgtttgacgatatcgtattcttgtagtttttttacacctgtactcatactaggtttactcatttgcagttgttgtcgcatttcatcaagtgtcatacttccttcaaaaaccataatgccatacaagttacctacactacggttgataccatacaaatccatggtttcaccgattgagttgataactaaatctttagcttcttcgatatattgactgtcattgttattataatccatcattgcacctccattttaatccattatttagcttaggtgggacgcaccagatactatgatttttatgatgatttgcctgtaaaggatacatctattactttgagttgtaactcgttcatgaatataaagcataattacattgaaatttcataatcaaatgttagttatcgatttgaattgttaatgtctatactacttttgactaaattcaatgctgcaatctataaatggctataaaaacctatgctatatgtcccattttaactcaatacgaaaaataacaaaacaacaaaaaaccccaagctccattcacatgaatgaagtcttggggtaaatttcacgcattatttcaatgcatcttcaattgaagtgtattcaaaattaaatgtatcagctacattcttattagtcacatgtccattaaatgtattcagacctagagataatggatgatttactttaaatgcttcacgataacctttattagccaataattgcgcataaggtaatgttgcattgttcaatccaattgtagatgtacgtggaacggcacctggcatattagctacagcataatgcacgacaccatagggggagaacgagtaacacttgatacatatcagctaattctacataaatttctttatcctcaaaccatttttgcacatcataaccttcaacaccctcaaaactcacaaccaattttaaaggatcctctggttctataactgtaaatcccatatttactaataaatcaattaacatctttcttcgttggtcaaataatgtagaatcatattctttataaaatttattcgctaattctaaactagacataatgaggtacgaaggacttgacgtttggaaataagttaaataatctatgacttgttgtcttaatggtgcatctttatgtatatatataactgatcccattgttagtgcagggagtgttttgtgatatgactgcacaacgtaatcagcattaaaattcattgaggattctggaaatccatataaaccaaaatgtgcaccatgcgcttcatctactaatatcggtatccctctgtgatgtaattgtttgatatattgagaaatatcaaaagtttcaccgtaataattagggtatgtacagatggcaagtttataatattgatttttatcttgatttatctttggatttacatattgattcgttttcttactgacatctgtcttagttattgtcgcttgttgttgtgttatgtctaaaccgtgaaatactgatttatgaacatttctactaattaaatatttaccttttcttgtcgaaaacgcttggataaccgataatatacctgaagtcgttccgttaactaataagaaagcatcatagtttttatgtttcctaaaattctccatgctttctaaaataattccttcaggataatgcatatcatctaatccagtaatttctgtcatatccattgctaaatcaagcctatttaagtagccgattgtcatgtttttatgtccaggaacatgcatagagatagcttttttctctatcaagtgatttaatttttgaattattggtcttttcatattaataactctctctaaatttaatttttcatcttatatgagacaaatcatcatcattcttattaacccaatt

SEQ ID NO: 3799 - DNA, 3825 bp, Artificial Sequence
  Description of Artificial Sequence: synthetic nucleic acid sequence
ctgacttggttgttctaaatcaaacggttccataaatgattgaataatatcttgctcgttcgttagagatgtcgttacctcttcaaaatcaggcgaaacatgtgtcgcaatacgttgtttaacttcattgtcatcaattacatattgtgttcgtaatatttcatgacgttcaatcaacttagataatgcacgttgcaattgcataacattaagttcagaagataatctccataagaatggaatgttatacactgtgtctttaggattgaccttccataaaagatacatacttttttgagacgcacttaaatcatattgatacgattcatttgctttgggaatcacttcatagacatcattttgcagttcttcaatttgttgtccaagttgctctacagtaggcgatttcattaaatcacctactttaagacgtttttttaacctttcttcaatacggtttacaactaatgttgctctaagagagtgtccacctagttcaaagaaattatctttaacacctacctgatcaacatgtaaaatctcttcgaaaatacggcaaactgtgcgttcaatatcgttacgtggttctacataatttctattattctttagattaatttcaggtaatgcacgcacatctaatttcccattcatcgtgataggtatacgatccaccttcataaaatgcacaggtatcatataatctaaaaaagtacaaaaaaatcaaaatgacaacgtcatcgggggttctattaatgggtctggaacaatacaagtcaaggttacagctgttggagaagatggatatctttctcaagttatgggacttgttaatcaagcacaaaatgataaatctagtgctgaattgttatctgataaagtagcgggttatttattctactttgctgtaagtgttggcgtgatttcttttattgtctggatgctcattcaaaatgatgttgattttgcattagaacgtcttgtaactgtgttagtcattgcttgtccacatgctttaggcttggcaatacctttagtcactgcacgttctacttcaattggtgcacataatggtttaattattaaaaatagagagtctgtagaaatagctcaacatatcgattatgtaatgatggataaaactggtactttaactgagggtaacttttctgtgaatcattatgagagctttaaaaatgatttgagtaatgatacaatattaagccttttcgcctcattagaaagtcaatctaatcacccattagctataagtattgttgattttgcgaaaagtaaaaatgtttcatttactaatccacaagacgttaataatattccaggtgtcggattagaaggtctaattgataataaaacatataaaataacaaatgtctcttatcttgataaacataaacttaattatgacgatgacttgtttactaaattagctcaacaaggtaattcaatcagttatttaattgaggatcaacaagtcattggcatgattgctcaaggagatcaaattaaagaaagctcaaaacaaatgatagctgatttactatcaagaaatattacaccagtcatgcttacaggtgacaataatgaagtggcacacgctgtcgcaaaagaattaggtattagtgatgttcacgcacaactcatgccagaagataaggaaagcattataaaagattatcaaagtgacggtaataaagtcatgatggtcggagacggtatcaacgatgcgccgagtcttataagagccgatattggtatagcaattggtgcaggcacagatgttgcagtggattcaggtgatatcatacttgttaaaagtaatccatcagatatcattcatttcttgactctttcaaataatactatgagaaaaatggtgcaaaacttatggtggggtgcaggttataatattgttgctgtacctttagcagctggcgcattagcttttatcgggttaatattatcaccagctgtaggagcaatattaatgtctttaagtacagttatagtagcgattaatgcttttacattaaaattaaaataaaagaggtaaaccttatgtataataaagtttttgcaattttaattataattttttccataataattattgcgtctaatgatactttcgcagaaagtaagaatgatatgatgaatatgaaagaagataagaaaaatacaatggatatgacaaatatgaaacatcatgacgaaagaaagaaattaaattcttcacaaggaaaaaatgaaataatatttcctaaagttgcagagtcaaaaaaagataacaatggttataaaaattatacattaaaagctcaggaaggaaagacagagttttacaaaaataatttttctaatactctaggctacaatggaaatttacttggaccaactttaaaattaaaaaaaggagataaagttaaaattaagttaataaataacttagatgaaaatacaacatttcattggcatggattagaagtaaatggaaaagtggatggagggccttctcaggttataaaaccaggaaaagaaaaaactataaaatttgaggttaatcaagattctgctacgttatggtatcacccccacccctctccaaatacagctaaacaagtttataatggcttatcaggattattatatatagaagatagtaaaaagaataattatcctagtgattatggaaaaaatgatttgcctataataatccaagataaaacatttgtatctaaaaaattaaattattcaaaaacgaaagacgaagatggcactcaaggtgatactgttcttgtgaacggaatagtaaaccccaaactgacaacaaaagaagagaaaatacgtttgagacttttaaatggttctaatgctcgagatttaaatcttaagctaagtaataatcaaagttttgagtatattgcttcagatggcggtcaattaaaaaacgctaaaaaattaaaagaaattaatttagctccttcagaaagaaaagaaatagtaatagatttatctaaaatgaaaggcgagaaaatcagtctggttgataatgataaaactgtaattttaccgattagtaaacaactggtaagtgtaagatattagtaaagaattctcctacaggacttcttgttgaaaatataattaatagtataaaaccaaggacagtaggtggtaacacaattggtaaaatgataaaactttctaatagatttacccaatatctttttttattgtatagccatttagaaatcaaaatgccaaaaatagtaactatcattgtactgattaaagcaacacgaaaagaaatccaaaaggacgttaaatcaggcatagctctgaactccttatacagaaaattgatattctttaagaatttgtttagctttattagattttaagaagttaatccattctttagctaattttttatctgaagttgcacctgctttataagtaattggtttgcttaatttaatttcttcgatgactttaactttatttgcttttttcttttgttgatataagtctgttttgtaaacgaatccttcctgtgcatttcctttttccacataatttaatacttgttttacgtctttagcaaaaataattttatctttaacatcaccatataaatgttgatcatctaaatattgttttgcatatttaccagcaggcactgtttttatttgtcctagtgcgagtttgtcgttttgatttaaatcttttacagaggtataacttttatttttatcgccaattaatacaagttgattctttgcataattataagtgtcatgtgctttt

SEQ ID NO: 3800 - DNA, 3148 bp, Artificial Sequence
  Description of Artificial Sequence: synthetic nucleic acid sequence
ctgtctacttacctgatgatggaaacggtaaatcgtatgattatatgctcgtaaatcctaaaataatgagttacagtgtacaagaagcttatttaccaactggcgaaggttgtctaagtgttgatgaaaacatcccaggtttagtgcatcgtcatcatagagtcactattaaagctcaagatattgatggaaatgatgttaaattacgtctcaaaggctatcctgcaattgtatttcaacacgaaattgatcatctaaatggcattatgttttatgattatattgatgccaatgaacctctaaaaccacatgaagaggccgtagaagtctaaatcatgaattatattaaaacacttcattaagttgtattttatacttacttaatgaagtgtttttttaaaagtaattcaaatgtcattaggattaatttaaaaacaacaaagtacatgcaaaataaaactgctttatttattcaaaaacatcatgtaaaatataacttaactgaaatcttagtaaattgatactaatttcaaatcttgaacgacattattgccctagagaacatactgggcagtgagattaaacaagtataaaaataacgtttagattgagctggtatgtttctaacaaattaaatttagaacacaaaaattattgaagaataatactctaatggatatgtaaaaaatctttaataacccgagtattcacaactagggtcgtaaaaaataacaattataatttataggaggacaatacaacaatggcagtatttaaagtattttatcaacataataaagatgaagtcatcgttcgtgaaaatactcaaacaatttatgttgagggacaaactgaggaacaagtgagacgttatttgaaagaccgaaattttaatattgaatttattactaaattagagggcgcacacttagaatatgaaaaagaacattcaacacactttaatgtggagaacgccgaataatgaaacaactacattcaaatgaagtaggtgtatatgcacttggtggtttaggtgaagttggaaaaaatacctatgctgttgagtacaaagatgaaattgtaatcattgatgctggaatcaaattccctgacgataatctgttaggaattgattatgtaattcctgattacacttacttagaacagaaccaagataaaattgtcggtctgtttattactcatggacacgaagaccatataggtggtgtgcccttcctattaaaacaaattaatgtacctatttacggtggtccattagcattaggtctcattcgcaataaactagaagaacatcatttgcttagaacgactgaattacatgaaatagatgaaagtagcgtaattaagtctaaacattttgaaatttctttctatctaaccacacatagtattccagaagcatatggcgttatagtcgatacacctgaaggtaaaattgttcatacgggagacttcaaatttgactttactcctgtaggtgagcctgctaacatagctaaaatggctcaattaggtcatgaaggtgtgttgtgcttactatcagactcaacaaacgcactagttccagattttactttaagtgaacgtgaagttggacagaatgtcgataaaattttcagaaattgtaaggggcgtattatctttgcaacttttgcttctaatatttatcgtgttcagcaagcagttgaagcagcaattaaatataatcgtaaaatcgttacatttggacgttcaatggaaaacaatatcaaaattggtatggaactaggatatatcaaagcgccaccagaaacgtttatagaacctaataaaataaatagtgtacctaaacacgagttactcattctttgtactggttctcaaggtgaacctatggctgcattatcaagaattgcaaatggtacacataagcaaataaaaattataccggaagacactgtagtatttagttcttcgcctattccaggtaacactaagagtatcaatcgtacaattaatgcgttgtacaaagctggtgcagatgtgattcatagtaaaatttcaaacattcacacttctggacacggttctcaaggtgatcaacaattaatgttacgtctgattcaacctaaatacttcctgccaattcacggtgaatatcgtatgcttaaagctcatggtgagactggtgttcaatgcggtgttgatgaagataatgtatttattttcgatatcggtgatgtacttgctttaacacatgattctgcacgaaaagcaggaagaattccttccggcaatgtacttgttgatggcagtggtataggtgatattggcaatgttgtcatcagagatcgtaaattactttcagaagaagggttagttattgttgttgtgagcattgactttaatactaacaaattactatctggccctgatattatttcacgcggttttgtttatatgcgggaatctggtcaattaatttatgatgctcaacgtaaaattaaaggcgatgtcatttctaaacttaacagcaataaagatattcaatggcatcaaattaaatcttcaattatcgaaacattacatccttatctttatgaaaaaacagctcgaaaacctatgattttacctgtgataatgaaagtaaatgaagataaataaacacttaaatatatttaatcaagttacaatgaatttatactactttaaatgtttccattactctaatagtattatatatttttagtagtaattaattattttgaattatttatttaatacgatttgagattatatcttttatctttgaatttcttacaaaaaggagtttagagctaaaagttcttaaactagtaaaaagagacaatttctatattatttcatatagaaattgtctcttttataattttcaaactataataagcttgttgatatactatcttacttatataagttcctttaatacaaatcatattccttctataactagccaattgtttttggtttaggttcagaaagtttcttaaagtaatatttctatattccaatcaaaaaatacagattatgtgtagacatatagaactacttttaacaatattttacgatgatataatagattgcatcacaatgatattcaatttcatta

SEQ ID NO: 3801 - DNA, 3773 bp, Artificial Sequence
  Description of Artificial Sequence: synthetic nucleic acid sequence
ctgaaattgattctgaaagttttcctatgcacatttttagaaaatatgcgaaagacgtttttgaagaccatcagctatcactattacaacgaggcgagcgtcaaggggaatatattttaaggcaacaaatttcacattacttatttaatagtcgtggcgtcacttgtcacccaaatcaaattattgttggatcatcaacaagccagttactcgatatgataaccaatttactaaaaaaagaagaatttattattgaacagccaagttatccacctattaaacatacgcttgataaaaaaggtataagttatattcaagtcccagttgaacaaaatggaatacaaatcgaccctattttaaatacaaataacaatattttgtatataacaccatctcatcaatttccaactggttatgtcaccaatttaaaaaaaagaacacaattaatcaattggtcccatcaagctaagcaaagatatattatcgaagatgattatgattcagaatttagatattttggcaaacccatacctgcattacaaagtttagacacaaaaggaaaagtcatttatattagtactttctcaaaatctttatatccaagctgtaggattgcatatattgttttgccacaaaatttaatgcacaaatataataatcaaaaatataaagagggaaatacagtgcctgtgcatgttcaacacatgattgctcaattcatgataagtgggaaatttgaaagacatttgaataaaatgcgaaagatatatagagataaacttgattatattttaaaacgattaaagccctacaatactcaaataaagattgaaggcgcactaactggaatgcattttacaataactgttaataatggattgtcaatgaaacaatgtttaaaaaatgcgaaaaaaaataatttaaaattaaaaccttatcattacgaaaattattctaaagtttatccaaaatttattttaggatttggggggataaaaaaagaagaattagaagatcatgttaatgcattaattcattcactcgttatataaatactagattttaagaaactttaaaatgttttaattattgttacgatacacaacagtaattaaagcatttaaggttggaaaatcattagtgagtagttaaattagttttgacaattcataatgtcagttaaaatatatttatacaagtaaaaagggggtaccatatatgattaatcaaaaacgtttattagattgttttctagaattagtgcaaattgattcggaaacagggcacgaagaaacaattcaaccttatcttaaagatacgtttgaaaaaatggggctccatgttattgaagatgaagcttcaaaaaataatagattaggtgctaacaatcttatttgtacgttaaaaagtaatataagtcatcagaatgtgccgaaaatttattttacaagccacatggatactgtcgttccaggaaaaaacatccaacctgtagtaaaagaagatggatacgtttatagcgatggaactacgatactcggggcggacgataaagccggtcttgcggcaataattgaagcgattaaacaaattaaggaatcaaatttgccacacggacagattcaaataattattaccgtgggagaggaatctggattagtaggtgctaaagcaatagatactcgccttcttgatgcagatttcggctatgctgtagatgcaagtaaagatgttggaactactgttatcggtgctccaactcaagtaaagatttatacaactataaaagggaaaaccgcccatgcaagcacacctaaaaaaggtattagcgcaataaatattgcatcaaaagcaatcagtcgaatgaaattgggacaagtcgatgcattaacaacagccaatataggtaaatttcacggaggttgtgccactaatattatagctgatgaagtcactttagaggcagaagcacggtcacatgatgatcaaagcattaataaacaagtgaaacatatgaaagagactttcgaaacgacagcaaatgaattaggcggtcaagctgaagtgttagttgaaaaaagttatccgggatttgaagttagtgaagctgacaaagtaacacaatatgctatatctagtgcattagccctcggtctaaaaggtgatacttgtattgctggtggtggttcagacggcaacatcatgaatcaatatggcattccttctgtgattttaggagtaggatatgaaaacatacatactacttcggaaagaatagcaataaaggatatgtatatgctcacaagacaaataataaaaattattgagctagtagctgaataaaacatgcatatcgtaattgttaattagcgatttatgttacaatattattgaaaatttttgaacaagagaggtaagtaatatgacacaacaaattggagtagtgggtttagcagtaatggggaaaaacctagcttggaatattgaatcacgtggttatagtgtttctgtttataaccgatcaagacaaaaaactgatgaaatggttaaagaatcgcctggaagagaaatttacccaacatactcattagaagaatttgtagaatctttagagaaacctcgtaagattttattaatggtaaaagctggacctgcaacagatgccactatagatggtttattacctttattagacgatgatgatattttaattgatggtggtaatactaattaccaagatacgattcgtcgaaataaagctttagctgaaagtagtattaactttattggtatgggagtttctggtggagaaatcggcgcactcacgggcccttctttaatgccaggtggtcaaaaagatgcttataacaaagtcagcgatatcttggacgcaattgctgctaaggcacaagatggtgcttcatgtgtaacttacattggccctaatggtgcaggacattatgttaagatggtacacaatggtatcgaatatgcagatatgcaattaattgctgaaagttatgcaatgatgaaagatttattaggcatgtcacataaagaaatttctcaaacttttaaagaatggaatgctggagaacttgaaagttatttaatagaaattacaggtgatattttcaataaattagatgatgacaatgaagcacttgtagaaaaaatattagatactgcaggtcaaaaaggcacaggtaaatggacttcaattaacgcactagaattaggtgttcctttaacaatcattacagaatctgtatttgcgagattcatctcatcaattaaagaagaacgtgttactgcttctaaatctttaaaaggacctaaagcacattttgaaggcgataaaaaaacattcttagaaaaaatacgtaaggcactttatatgagtaaaatatgctcatatgcacaaggtttcgctcaaatgagaaaagccagtgaagataatgagtggaatttgaaattaggcgaattagcaatgatttggcgtgaaggttgtattattcgtgcacaattcctacaaaaaattaaagatgcctacgataataatgaaaacttacaaaacttattattagacccttacttcaaaaacattgttatggaatatcaagatgcactacgtgaagtagtagctactagcgtgtacaatggcgtgccaacacctggtttttcagcaagtataaattattatgatagttatcgctcagaggatttacctgcaaacttaattcaagcacaacgtgattactttggcgcacata

SEQ ID NO: 3802 - DNA, 3201 bp, Artificial Sequence
  Description of Artificial Sequence: synthetic nucleic acid sequence
gccggtggagtaaccatttggagctagccgtcgaaggtgggacaaatgattggggtgaagtcgtaacaaggtagccgtatcggaaggtgcggctggatcacctcctttctaaggatatattcggaacatcttctacgaagatgagggaataacgtgacatattgtattcagttttgaatgtttattaacattcatttgtacattgaaaactagataagtaagtaagattttaccaagcaaaaccgagtgaatagagttttaaataagcttgaattcataaataatcgctagtgttcgaaagaacactcacaagattaataactagttttagctatttattttgaataacaattcaaaatatggtggaaacatagattaagttattaagggcgcacggtggatgccttggcactagaagccgatgaaggacgttactaacgacgatatgctttgggtagctgtaagtaagcgttgatccagagatttccgaatgggggaacccagcatgagttatgtcatgttatcgatatgtgaatttatagcatgtcagaaggcagacccggagaactgaaacatcttagtacccggaggaagagaaagaaaaatcgattccctgagtagcggcgagcgaaacgggaagagcccaaaccaacaagcttgcttgttggggttgtaggacactctatacggagttacaaaagaacatgttagacgaatcatctggaaagatgaatcaaagaaggtaataatcctgtagtcgaaaacatattctctcttgagtggatcctgagtacgacggagcacgtgaaattccgtcggaatctgggaggaccatctcctaaggctaaatactctctagtgaccgatagtgaaccagtaccgtgagggaaaggtgaaaagtaccccggaaggggagtgaaagagaacttgaaaccgtgtgcttacaagtagtcagagcccgttaatgggtgatggcgtgccttttgtagaatgaaccggcgagttacgatctgatgcaaggttaagcagcaaatgcggagccgcagcgaaagcgagtctgaatagggcgttgagtatttggtcgtagacccgaaaccaggtgatctacccttggtcaggttgaagttcaggtaacactgaatggaggaccgaaccgacttacgttgaaaagtgagcggatgaactgagggtttttttaccttttcagccattttaatagcatgtcgacttatatcaaaatataaatcatcagtgaataattctaaaaattgaacaccagttagacggccttttgctaataaagcaccatgatgttttataattgtagtgaagtttttaggttcattttgtttagtgaagacaattgcttcaccacaaagtgctccaatcttagtacctcctatgtaaaacacatcacagtattttgcaacatcttcgatagttacattagtttgattgctcataaggccatagcctaaacgtgcaccatccataaatagtggaatctgatgtctacggcaaactctagataaagattgtaattcttctttcgtgtataaagttccatattcggttggatgtgaaatataaaccatccctggatacaccatgtgttcttttttaaaatcactttcaaaagtttctatataattctcaacgtcttgagcagtaatcttaccttcttgggagggtatggttagaactttatgtccactgaattctatcgcaccaccttcatggactgccacatgtcctgtatcatgagtgaaatcactgaaggatgcatttgttgtgcgatgaaatcagacgtatcacaacaactacatgaactatacttaaaatatcaaccagatatcatctttattgaatgcagtggtgtagctgaaccactagctgtcgtcgatgcattcttcacacccgtacttgcaccttttatcactttaaggagtatggtgggaattattgatgcaagcatgtattcacgaattaaatcttatccacaagacattgcagctctattttatgaacaacttcgtcattgttcgactttatttgttaataaaatagataagatagaggtggaagaaaccgcccgcttgctacgtcaactcgagcgtctcaatagcgatgccaatattcaagttggtcaatttggagaattaaatttaaaatcactgctagagccaacacatataaattcaaatgcatgtggcactttgcatagtaatataaatcatcaattcatcgaaaatcctaggctacaaacaaaagaagaaatgattagtgcgttagataacttgcctcaagatgtttaccgtgtcaaagggtttgttcgtttttcagatcagcaacacgtttatttagtacagtatgcacaaggaaatatagaattatctcccattcaacttaaaaacgatgtaccattgtacctcattgttataggaaaacatttaaaacaaatacaatttgatttataaaaacacatctctcaattatcatcagttaaactttatacataaacaaacctctaaatgacttttgttcatttagaggtttttggtacttatttctattgttcgtcttttattaatgtttgcgcttttgaactgattccatgcttacttctactcattatttacctcacttggattaaattccaaactatccgcaaagtagacgctttcttctttattgtcgacaaaagaaaactcgatatctttataacctatagatgaacctttaaggtcaccgtccccttttaatattagtttaggagctctcttaatcggaatatcatacctctttctgagttgcttcacattgtcatcttcattacttaattggtactctgccgaatagcttggtacgtttgggttataagacacatttccattcttgtagtcttttaaatttttaaaattcccatcggtttaggtgtttacttagacaaaatagaaaatttggaaaaagaaaatgaagaacttaaaaagagaatatctcatttagagaaggaataaaaggaggttcataaaatgttattaactttagactttcctattcaaataggacacacatttagaaccaagatgataaataattttagaacaatacttaattattataatgaattagatcatcagcatcgcgcacacacagaaactaagcatcatgcacatcaagccatgcaggttgattatagaa

SEQ ID NO: 3803 - DNA, 3594 bp, Artificial Sequence
  Description of Artificial Sequence: synthetic nucleic acid sequence
tcttggttcttgaccaaatttagcttcatattccttatgcgcataatccattttgaaaacaggcattgctaatggccaggaagtattactttcaaaagtaatctcttcaggctgtttcgtatatttattaaattgaacaatagatttacagttttcacgtaatgctgtcgctacacagtctgcaccagtatcaccagcacctataataattacattcttatctttagcagtaatgctcaaactttcaatctcaccatttagatactgtgtttgttcagtaagatagtccattgcaaaatgaataccagagcccattcgtccttccaatggtaaatctctcgcattttgagcacctgtgcataaaataatagcatcataattttcttcaagtgtttcacggctcacatcgacgccaatttcaacgcctgttttaaataaaaccccagcatctttcataagtgatacacgtcgacgtattacgtctttatctagtttcatatttggtataccatacattagcaagccgcctggttcatgcgccttttcataaacagtaactttatagcctttaaagtttaattcttcagctgctgtaagtcccgctggaccactacctacgatagcaactcgttggtctttatgatcttcaggatatgcgggatgaacccactcattctcatatgcttcatcaataattgtacgttcaatacctttaatcgccacggattctctattaattttcataacacatgattgctcacatggtgcaggacaaactcttcctgtaaattcaggaaaattattcgtctctctcaatctttcgtaagcagctttaaaatcttgatgatagactaagtcgttccactcaggtatataattaccaatagggcatcctattgtttctcttccataagattgcccagtttgacaaaaaggtgttccacaatccatacagcgcgcaccctgaatcgaagcatcttctttagtgaagcgttgttgaaacgcttcatgattcgaaagacggtctaccaaagacaattctgatagcgactgtttatcatatttcataaatcctttaaattcgcccatgataatccctcacttctttaataaatgactgctggctgtagctcttgttcaattgtttctctgtcatcataaaacgctgccagtgttgcttcatcttcacgttccatttgacgttttttcaaatcaattttttgcatcattaatttgtaatctttcggaataactttaattgctaacttttcaatattgtcaaattggtcaagtaattggcgtgctttgttactacgtgtatgcttaaaatgtgcttcaagcatgtctttgataagagatttttcctcatcaaaacgtatgctactgaattctaaagtttcaagcgcattaacctttttaaatttctccacgtcagaagagaaaatataacttacgcccccgctcatgccttggccaaagttctttccaacatctcctaagataatgacatgtccccctgtcatatattcaagtccatgatcaccaataccttctactacaacatctgcaccactatttctgatacagaaacgctcaccagctttaccattgataaacgctttacctctagaagccccgtaaaagtttatatttcctgctataatttcattttcacgttgactatttggagcatttacgatgacagttccaccggacaatcctttacctacgtagtcattagcatcaccggtatgatggattgttaatccgcgtggtgcatatgcagctaagctttgacctgcatgaccttcagtgtaagcaagtatcgtatcttcaggtaatccttcttctccatattgtttagctatcgcactacctgtaattacacctacatctcgctgttcattattaacaacataatttccggtaaaagagtgcccgttttcaatactatagcgtgcgtctgggtacagataattcaaatcgaatccttcatcaagatgatggttttgtgatatctctttcgtattaaccccgtcaaattgttctattaaacgttctatttgaagcgaagctgctttactatttggtttcaattgcgtcgaacgttgaagaagatctgttcttcctactaactcttctactgtttctaaaccaagtgaagccaaaatttcacgtaattcttcagctataaaatacataaagttaactacatgctgtgccttacctctaaacaaagctcttaaatctttgttttgtgttgcaacccctactggacacgtatcgttatgacaaaccctcatcataatacaccccaaaacaacaagtggtgctgttgcgaaaccaaattcttctgcaccaagcgcacaagcataagctacatctttacccgtcagtaacttaccatccgtttctaattttacgcgactacgcaaatcatttaatttaagtgtttgatgtgtttcggcaaggcctatctcccatggcaaacctgcatgttgaatacttgttttaggcgatgcacctgtacctccatcataaccacttataacaattttatcggcgaaagctttagctacccctgaagctatagttccaacgccagtttttgatacaagcttaactgcaatatcagctcttctatttgcattttttaaatcatgaatgagctgtgctaagtcctcaattgaataaatatcatggtgtggtggtggtgaaattaatcctatacctggtgtcgaacctctagtctcagcaatccatggatatacttttgaacctggtagttgtccaccttcccctggtttagcgccttgtgcgactttaatttgaatttcttttgcatgttgcaagtaatcactcgtcaccccaaaacgacctgatgcaacttgcttaatcgcacttatcttattacttccatccttttgaatttcgtaacgtgaagaatcttctccaccttctccactattacttttacctccaatttgattcatagcttgagccaacgtctcatgtgcctctgctgagatagagccgtaactcattgctcctgtattaaaacgttttacgatttcacttgctggttcaacacgactaatatcaatagattggcgtgtcttgaattctaataaatgtctaatatgatccgtacgttttaaatttacagttttggagaattttttaaataactcgtaatcattttctctacatgcatgctgcaataaaaaaatcgtacgaggattaaatgcatgatgctgaccttgctgtctccattggaatacacttccggattcaagataatcagaatcatcactttgtctcgctttattctctttgtctatttgttcaatacttataccagataattttgactgtgtacctgtaaaatatttttcaatgacgctattcgataaacctaccgcttcaaatatctgtgctccttgctttagagcacagtggcgatgatatcagatctgccggtctccctatagtgagtcgtattaatttcgataagccaggttaacctgcattaatgaatcggctgcagtacccgggaatttaacccgcctaatgagcgggcttttttttgtgatc

SEQ ID NO: 3804 - DNA, 3574 bp, Artificial Sequence
  Description of Artificial Sequence: synthetic nucleic acid sequence
atatcatcgccactgtgctctaaagtacacactagatcaaagcgtgaaattagcagaaaatattcgaagtggtgttgaaaaatcttctttccacctaccaaacaaagaagtaatcaagctatcagtttcaattggtgtaggatacttaactcaagaagatcgtaaatctcaacgtaaagtatttaaagatgctgatgacatggtacatgtggctaaaagtgaaggaagaaataaagtcatgtttaatcctattgtcaaattataatcaagctaaatgctatgttaactgctacgttaaaaaattattaaagcgtatacagttatgcatagcattttttactatgcataactgtatacgctttagagcacagttatgcatagcattttttactatttttaattagtattgaaaatgttattaaaatcaagctgtctattgaaacttaagtcttcaagttgtaaacttcaattgttcataaaaatattaaatatatcgtcatcttcatcagcgtcgtcatcacctaataatttaaggttttgatcttcttcatcttcgtcatctagaatatcgaatttttgaattgttggtgcgattttttcctcaatatcatctataaagatacatcacctgccttcactttcaatgaagaacatttatctggaaaacgttatgctgaatacctctcactagtagctacgcattacaatcttaaatgtcaaaacaaataccaatgtttcacgtgtaacatacatagatggtatatatcatgtatcaacggactatggcgtgtatacagcagattatatatttatagcaactggagactattcattcccatatcatcctttttcatatggacttcattacagtgaaattcaaacattcactcaattaaaaggtgatgcttttacaatcattggtggtaatgagagtgcttttgatgcagccataaaccttagtcaaacaggtgcaaaaatatcaatatatacatctaaaactggacttaaaaaggaagatgcagacccaagtataagattatcaccgcatactcaacagcgattacagaatgctatacaagagggtgcattaatcgaaatgcatgttggctaccaggcacgcaaaataacatatcaaaatcattcctataagatacactttgataatggacatattgttcactctcatactgaaccgattattgcaactggatttgatgttacccaaaaccctttaatagaacaactatttcaagtacgacaatcagaagttcaattaacagaattagacgaatctacaaagtttcctaatgtatttttaattggggcgactgtacgtcatcaaaatgccattctttgttatatatataaattcagagcacgttttgcagtattagcacgcatagtaagcctacgcgaaggcttacctgaagatacatcattaattcagtcgtatcgtcaaaaaaatatgtttctagacgattatagttgttgtgatgtgaattgcacatgttaaaagtaacctttaatttacgtgatgggacgtttactgacattccagatgatgcacattactttttaattgaagactatgacaaattaactcccagtcagcaaactttattaaaacgttacattatcaaacatcaattagatatttcattacaacatgctattctttcatctccactccatagtttaaatatgattaaaaagttagagacttttgttaaggagagcaaagcataccatcctcaatttcacaatattatttgtggatggtgctttattgtacttatgtttgctttacccatctacttgtcttatcacgtttcagacggattacaatactacgtgtcacactggttaactaaactatcccaaatatcattatttcaagaaaataagctacaacatattttattcggtcattatggtgtcatttctttaggtacatattcattcgtctgggcgttaccagttgttttcatgattagtttatctacagctcttatagatataactcatttaaagcattatatcgtttggtctatcgaacctacgatgatgagacttggtcttcatgaatcagatatcatacccttgttagaaggatttggatgtaatgctgctgctattactcaagctacacatcaatgtcatcgttgtacaaaagtacaatgtatgagcttggtaagtttcggaactgcatgtagttatcaaattggtgctacattatcgatattcaacgcaagccaccgctcttggttgtttttgccatacataggcatggttttcttaggaggaatcatacataacaaactatggtatagtcatcaaacacctatgacaacacagtctgtttttcaacgacaacctgtacgttggcccaaaccaaagctactcttaaaagcagcgtggaaaagtattcaaatgtttattgtacaagccttacctatttttataggaatttgccttattgtaagtctattgtctcttacgtctattttgacttttatatcaaatgcattcatacctttattatggctactagatgtacctacacagcttgcaccaggtattctgttttcaatgatacgtaaggatgggatgttgttgtttaatatgaatggcggtactttaattcaaagactttccgcattccaattattgttgctagtcttttttagttcaacatttacagcatgttcagtaacaatgactatgctcatgcgtcgactcggttcaattctaggaattaaaatgataatgaaacaaatggtatcgtccacaatttgcgtcaccatactagccatagcaatgttaagcataactaaaatttcagacttaggagtgatgttatggaaatcattattatcggtggttttttaggaagtggcaagacctcagcaataaatcatttaatcgctgatgcacttgaaaacaacttaaatcctgctgttattatgaatgaatttggaaaaagaagtgttgatggccaacttatagaacatcctgaagtacctatgagtgaaatcactgaaggatgcatttgttgtgcgatgaaatcagacgtatcacaacaactacatgaactatacttaaaatatcaaccagatatcatctttattgaatgcagtggtgtagctgaaccactagctgtcgtcgatgcattcttcacacccgtacttgcaccttttatcactttaaggagtatggtgggaattattgatgcaagcatgtattcacgaattaaatcttatccacaagacattgcagctctattttatgaacaacttcgtcattgttcgactttatttgttaataaaatagataagatagaggtggaagaaaccgcccgcttgctacgtcaactcgagcgtctcaatagcgatgccaatattcaagttggtcaatttggagaattaaatttaaaatcactgctagagccaacacatataaattcaaatgcatgtggcactttgcatagtaatataaatcatcaattcatcgaaaatcctaggctacaaacaaaagaagaaatgattagtgcgttagataacttgcctcaagatgt

SEQ ID NO: 3805 - DNA, 2947 bp, Artificial Sequence
  Description of Artificial Sequence: synthetic nucleic acid sequence
acaatgatcctgaatttacttcttatgtagcaacaactttaaaaaatgctaagctggatgacataaaagcaatagatatttgtgagccgcagccaccctcagaagatttcgcgttttatgcgttagaaagaccttcaacatttatttattcgggtgcagcaccagaagatggacctatgtaccctcaccatcatcctaagtttaatatcaatgaaacatctatgtgaacgtaaactacaagaagccaaagataaaataaactcaattaataatgtcttagctaacaatccagatgttaatgctatcagaacaaacaaagttgagacggaacaaatcaataatgaattaacacaggcgaaacaaggtcttactgttgataaacaaccattgattaatgcaaaaactgctttgcaacaaagtctagataatcaaccaagtactactggtatgactgaagcaacaattcaaaattataacgctaaacgtcaaaaagcagagcaagttatacaaaatgcaaataaaattattgaaaacgctcaacctagtgtacaacaagtgtctgatgagaaatctaaggtagagcaagcactcagtgaattgaacaacgccaaatcagcgcttagagctgataaacaagaattacagcaagcatataatcagttgattcaaccaacggatttaaataataagaaaccagcttctatcactgcgtacaatcaaagatatcaacaatttagtaacgaattgaacagcactaaaacaaatacagatcgcattttaaaagagcaaaatccaagtgtagctgatgtcaacaatgcactaaataaagtaagagaagtacaacaaaaattaaacgaagccagagcacttttacaaaataaagaagataatagtgcactagttcgagccaaagaacaacttcaacaggcagttgaccaagtcccttcaacagaaggtatgacgcaacaaactaaagatgattacaattcaaaacaacaagctgctcaacaagaaatatcaaaagcacaacaagttatcgataatggcgatgcgactacacaacaaatttctaacgccaaaacaaatgttgaacgcgctttagaagcattaaataatgcaaaaactggtttaagagcagataaagaggaacttcaaaatgcatataatcaattaactcaaaatattgatacgagcggtaaaacgcctgcaagtatcaggaaatacaatgaagctaagtcacgtattcaaactcaaattgattcagctaaaaataaagcaaacagtattttaacaaatgacaatcctcaagtatcacaagtgactgctgcgttaaacaaaataaaagctgttcaacctgaattagataaagcgatagcaatgcttaaaaataaagagaataataatgcattggttcaagcgaaacaacaacttcaacaaattgttaatgaagtagatccaacacaaggcatgacaacagatactgctaataactataaatcaaaaaaacgtgaagctgaagatgaaatacaaaaagctcaacaaatcattaacaatggcgatgccactgagcaacaaattactaacgaaacaaatagagtaaatcaagcgattaatgcaataaacaaagccaaaaacgatttacgtgctgataagtctcaattggaaaatgcttataaccaattaatacaaaatgttgatacaaatggtaaaaaacctgctagtattcaacaataccaagctgctcgacaagctattgagacgcaatacaataacgctaaatcagaagcacatcaaattcttgaaaatagtaacccttcagttaatgaagtagcacaagcattacaaaaagttgaagctgtacaacttaaagttaatgacgcgattcatatgcttcaaaataaagagaataatagtgcacttgtcacagctaaaaatcaacttcagcaagcagttaatgatcaaccattaacaacaggtatgactcaagattctattaataactatgtagctaagagaaatgaggctcaaagtgctatcagaaatgcagaagctgtcatcaacaatggcgatgcaactgcaaaacaaatttcagacgagaaatctaaagttgaacaagcactagcacatttgaatgatgctaaacagcaattaactgcagatactactgaattacaaacagcagttcaacaattaaacagaagaggcgatacaaataataaaaagccaagaagtatcaatgcatataataaagcaattcaatcattagaaacacaaattacttctgctaaagataatgccaacgctgtgatacaaaaacctatacgtactgttcaagaggtaaataatgcattacaacaagtaaatcagttgaatcaacaattaactgaagcaattaatcaacttcaaccgctatcaaataatgatgcattaaaagctgcaagattaaatttagaaaataaaattaatcaaactgtacaaactgatggtatgacacaacaatctatagaggcttatcaaaacgctaaacgcgtagcccaaaatgaatctaacactgctttagcattaattaataacggcgatgccgatgaacaacaaattacaactgaaacagaccgagtcaatcagcaaactacaaacttaactcaagcaattaacgggttaacagttaataaagaaccattagaaaccgctaaaacagcgttacaaaataacatcgaccaggtacctagtacagatggtatgactcagcaatctgttgcaaattataatcaaaaactacaaatagctaaaaacgaaattaacacaattaataacgttttagcgaacaatctagatgttaatgcaatcaaaacgaataaagcagaagcggaacgaatcagtaacgatttaacacaagctaagaataacttacaagttgatactcaacctttagaaaaaataaaaagac

SEQ ID NO: 3806 - DNA, 2796 bp, Artificial Sequence
  Description of Artificial Sequence: synthetic nucleic acid sequence
tattattgtagaaatggcattaatctccatacttataccttttcgagccatagcataaacttctacagacaatacactaaatccgtttccagtaacaaagaagcttaccgtaaaatcatctagagaatatgttaatgccataaagaatcctcctataatcgagggcataatattaggtataataatgctagttaataattgtgattcattagcacctaaatctcttgctgcatttaacatgttatcattcatttcatataattggggtaagacgatgataacaacaattggaatacagaacgctatatgagatgctagcactgttgaaaatcctaaacctaaacctgtgaaatgtcctattgcagtgaacataattaaaaaagaagcaccaatgactacgtctgaagataccattaatacattattcatcgttaatagcgtaaccttaaaccgtttgttgcgtaagtaatataaagcgatcgcaccaaatgtacctataactgtagcaatcgatgcagataaaagtgccactgcaactgtattaaaaatcaccgacatcaaccgatcattatgaaaaagggagtggtaatgttctaaagtaaaatgttcgaagtgactcatattacccgcagaattaaaagaataaatcattaaaaagaaaatgggaatataaagcacacttattaatagagctatatataattttccgtaccatttcacactaatcaccccttcccattagatgattttgattttgtaataatgagtaaaaaggccataaaaataatgagaaaaagtgctatagtggaacctaatccataattttgtatagttaagaactgttcttcaattgctgtacctacattgattactttgttcccggcaatcaacctagtaatcaaaaacagtgaaagagctggtataaatgttacttgcacacctgttttaataccttctcttgttaaaggaacgattactttacgaaacgtagtaaatgtactcgcgcccaaatcattagaggcttgcaaaatattgttaggaattgctttcatgctgttaaatataggcaaaatcataaatgggatataaatataactcgccaccaataaaaatgcaccacttgtaaacaacaaatttaatttaggtatttgaaatatatgtagagcttggttaataactccatcatgtcccaacaaaccaataaatgcataggtcttaagaagtaaattaatccaagtagggataattaacaacataagcagtatattttgaaatcttgaataagaaataaagtacgcagctgggtaacttattattaaggtaatcatagtaattaaagcggcataccatattgaatcaataaacatttttaaatatcttgttgaaaatacctgctcataatttgtgaaactaaagtgaccatgaatatctataaaagaaaagtaaacaagtaaaatggctggaatgataataaatataaccatccataataagtaaggaaccagtaaccatttattgatattatgcatgatgatagtcctcataactttcaattcgcttatcaaattcttcttcagtttcacctggtaccatgatgtgtattgcttctggttcaaaatacagacctacttcactacctacattagctttttttgttgattgtattacccattcatacccttttctatctttacaacaaatttcataatgtacacctctaaatagcatagaatcaactttggctttaaatagcccatcattttgtgaaacaagtgaaatgtcttcgggtctaattacaacttcaacttttttattttcttttattcccatatctacacaatcaaaattttgaccataaatattaacgacaaaatcttcaaccattgtaccgtgaactatgttggactctcctataaaatcagcaacaaatcggttaactggttcatcgtatatatctattggtgtgccaaattgttgaattttgccatctttcataacaaaaatataatcacttaatgctaaggcctcttcttgatcatgagttacaaatataaaggttatacctaaacgggattgaagttctctcaataaatattgcatttcagttcgtaattttaaatctaatgcggataaagactcatctaataataatatttcaggctcattaacaattgcccgtgctatggctacacgttgtttttgtccaccactcataccttgtatttgcctatgttcataaccacttaatttcaccaactgaagtgcttcagtaaccttacgcttaatttctgacttacttaatttttttaattttaaaccatatgcaatattgtcgaatacatttaaatgtggaaacaatgcatagtcttggaatacagtatttaccttacgcttattcggtggcattttaccaataggtttatctttatatataatatctccactatcgggatattcaaatcctgctatgagttttaaaattgttgtttttccacaacctgagggacctaatagtgtataaaaatagcctggttcaatatcaatattaatttcatttagtatttgtacatcttcaaagcccttactgacatctttaaaagaaagcaatggattcatacagtttcctcctataaatatgaagctgtggcaacgattaaaaccttcacttctttatctgtttcgttatataagcgatgtttatctttcgctttaaaataaagtacatcttctttacaagctttatatacttgatttcctaattgaagtgatacttcaccatttaaacaatagataaaa

SEQ ID NO: 3807 - DNA, 3441 bp, Artificial Sequence
  Description of Artificial Sequence: synthetic nucleic acid sequence
taactaaatcatcacactaaagaagggtgggatagtgaattcaaatttcttattactgaattctatcctactcttttttaatacatataaggagtttaaaaatgattaaccttaaccaaagattatcaattgtatgctcatttattaaaagaggaacattggctgatattggctcagaccacgcatatctacctatatatgcaattcaaaacgacttatgcacaaaagcaatagcgggagaagtgattcaaggaccttataaggctgctaaaagaaatattgcaaattatgaattaaatcaacaggttgatgtacgtctaggcgatggtctaagcgttataaacacagaagaccaaattgataatataactgtttgtggtatgggagggccattaattgcaaaaatattaaacgatggaaaagataaattagttaaccatccaagactcatactacaaagcaacatacaaactcaagcattaagacaaactcttaataaactttcatatgaaatcgttgatgaaagaatcattgaggaaaagggtcacatatatgaaatcgtggtagctgagtttaataataacttagttaaattaaatatattacaagaaaaattcggaccatttttacttagagaatgtaataacatttttcaaaaaaaatggcaaagagagttagaagcactgcgtgatataaaatcccaattgaattcaacatcacatcatgagagactaaaagaaatagaagatgaaattaacttaatacaagaggtgttaattaatgaaaattagtgaactgatggaagttttaaataatcacgttccatttcatcaagctgaatcatgggataatgtaggattattaattggtaatgataagttagatattacaggtattctgacaacactcgactgcaccgatgatgttgttaaccaagcaattgaacttaataccaataccatcattgctcatcatccacttattttcaaaggagtaaaacgtatcgttgagatggatatggtagtataattcgtaaacttatccaaaataatatcaatcttatagcattacacactaatcttgatgtaaatcctaaaggtgtcaatcgaatgttagcggatcaaataggtttagagaacatatcaatgattaatacaaatagctcatattattacaaagttcaaacttttatacctaaaaattatattgaagatttcaaagacagtttaaacgaacttggattagctaaagaaggtaattacgaatattgtttctttgaaagtgaaggtaaagggcaatttaaaccagtaggtgatgcaagtccttatatagggaagttagatagtatcgaatatgttgatgaaataaaacttgagtttatgataaaagacaatgaattagaaataactaaacgtgctattttagataatcacccatacgaaacaccagtttttgattttattaaaatgaacaaagaaagtgagtatggattagggattattggacaattaaaccaaactatgactttagatgaattttctgaatatgccaaaaaacagctcaatataccgagcgtacgatatacaggtcaacatgatagtccaattaagaaagtagctatcataggtggttcaggtataggatttgagtataaagctagccaacttggagcagatgtttttgttactggtgatattaaacaccatgatgctttagatgctaaaatccaaaatgtaaatttattagacatcaatcattatagtgagtatgttatgaaagaaggattaaaagaattattagaaaaatggttatttaaatatgaaaatcaatttccaatatatgcttctgaaatcaacacagatccatttaaatataaataaatgttattgataaacatttaaaggagaacaaattatgtcaaaacatccatttgaacactttaatttagatgagaatttaattgaagctgttaaaaatctcaattttgaaaaaccgactgaaatccaaaatagaatcataccgagaattcttaaaggaacaaatttaataggacaatctcaaactggaactggaaagtcacacgcttttcttttaccattaattcaacttatagaaagtgacattcaagagccacaagccatcgtagtagctccaacacgtgaacttgctcagcaactatatcaagttgctatgcatttagtaaaattcaaaaaaggtataaatgtaaaacttttcattggtggtaccgatttagaaaaagataaacaacgatgtagccatcaaccacaactcattattggtacaccaacaagaattaatgatttagcacattcaggttatcttcatgcacatttagcgtcatatttaattatagatgaagctgatttaatgattgacctcggtctcattgaagatgttgaccatattgcagcgagattagatgatgaaaatgctcatctagcggtatttagtgcaacaatacctaaatcattacaaccatttttaaataaatatttaagtcaaccagaatttgtagaagttgatggcaaagctcataataaagaaaatatcgaattttatctaattcctacaaaaggttctgctaaggtagataaaacattggaattgatagatatattgaatccttatctatgtattattttctgtaacagtcgtgaaaatgccgatgaattggcagacactttaaataaagaaggaattaaaataggtatgattcatggtggtttaacaccaagagaacgtaaacaacaaatgaaaagaataagaaatttagattttcaatttgtcattgcaagcgatcttgcttctagaggaatagatattgaaggcgtaagtcatgttattaatttcgatgtacccaatgatatcgatttcttcacacatcgcgtaggtcgaacaggaagaggtaattataaaggtgtagccattacattatatagtcctgatgaagaaagtaatattactcttattgaagacagaggttataaatttgaaaatgtagatattaagaatggtgaattaaaaccgataaaggcatacaatatgcgtaaatcaagacagcgcaaagatgaccatttaacaaatgaagttaaacacaaagtaagaagtaaatcaaaacgtaaagttaaaccaggctataaaaagaagtttaaacaagaagttgaaaaaatgaaacgtcaagaaagaaagcagtatagtaaaaagcaaaatagacaaaaacgaaaaaataataaaggataggtgaaatgaatgttaataggatcacatgtttcaatgagtggcaaaaaaatgctgcaagggtcagcagaagaagcacataaatatggtgaatctacatttatgatttatacaggtgcgcctcaaaatacaagacgtaaaaatattgaagatttaaatatcgaaaaaggccagcaggcaatg

SEQ ID NO: 3808 - DNA, 3228 bp, Artificial Sequence
  Description of Artificial Sequence: synthetic nucleic acid sequence
gtgcataaactcccacgctacaaataataattagtgacaagcctattaaaaatattatcgctgcaatttttttcatgattgtacacttcctttgacaatagagatattccattttagatatttcatagtcacatcaaatagccacttaatgagatagtaagtcaccactgcaagtacgagtccaacaccaaacattaaaccagtcataaatgcgtcatataagataatggaatgaaaaccatccataattcctttaatgagcaacatcaatggtgcagctagtgaagctagagtaaaaatgatgaaggttaatacgagcaaaatgcataaaaaagctggtattataacaataaaaaagttaagcaaacttagccccattactgctacaattgcggatgaaatattcattaacgacactttttgatgtgcattttctacactggaagtagctgtaagttccttacctattaattttggattacctaattctttacacacgtctgattcagactttccctcttgctgtccgctataaaaatgcgtatcgtattcattcaaaatatcttctttttcttctttattcatatgtttcaaatgctttttaagttcttttaaataatcatttttattcattcattctcactctcctcaatgaaatgttctacagcttccgtaaacaatttccaatcctcctctaattgattaactctcgcagccccctgttgagttaattgataatactttcgagacggaccttcagttgaaggttgataatacgtactcagttccccacttttaaccaaacgccttagcagaggataaactgtaccttcagctatggtcatatatctggagatattttgtacaagtgaataaccatactgatcttcttttttaataattagcagaacaattaattctaaagcacctttcttaaactgtacattcatatatctacctcctcagtcgtataaacagtattaaactatacacagtagtgattcaaattaactatagcatccactactatacattgcaaggtactgagtttaatttattaatacacacgtctttattcaaattacaccatcttttattgacaaattataaaaatcaatatttttaatatacttatatcattatttggtaaactggatttatttcatttgtgtatgtataatgtgtattatgggactttataaggtttacattgatttactttaatataactagttataaagggtttcatacaaagggggcttttaaatgatagaatttgatgcaattaccacattatgtttggcatgtgttttatatttaattggtcaaacaataatcaaccatgtttctattttaaggcgaatctgtattccagcacctgtcattggtggtcttttatttgcaatattagtggctatattagattcatttaatatcgttaaaataaaacttgattcggcgttcattcagaatttctttatgctcgctttctttactacaattggacttggcgcatcattaaaactattcaaaattggcggaaaagtcatgttgatttatttcactttttgtggaatcatggctatttgtcagaatattattggtgtatcactcgctaaactcttaaacattaaacctttattaggtcttacagcaggttcaatgtcaatggaaggtggtcacggtaatgctgcagcttatggtaaaaccttacaagatatgggtgtagattctgcagttgcagctgctttagcagccgctacactaggccttgtattcggtggactcattggcggtcccatcgttaaatatttaataaaacgctatgatcttaagccagagcatcgtgacgattcatttaaaaattatggtgtcgttgaatacaatcaatcattacatacaaaatataaacctattcaagtcttttttatacaattttctatactcgtattttgcatggcattaggaacatatattggcaatacttttaccgatttaaccggagttaatattccaatgtatgttggttcaatgtttgtagcagtaattattagaaatgctacagactttattggttgggatatcgttgatttaaaaatgagcgaacaaataggtgatatttcattaggcatctttttatcattagctttaatgagtatccaattaactcaaatatattctttagctatcccactaatcataattgttcttgtacaagtcgtatttatggtactattctcgattttcatattatttaaaggactcggtaaagattatgacgctgctgttatggtaggaggatttattggccatggtctgggagcaacaccaaatgcgatggctaatttagatgttatcactaaaaagtttggcaactcccctaaagcatatctagtagttcctattgttggtgctttcctcatcgacttaatcggtgtaattattgttatgagttttattcaacttttcagttaaataattaaccttttttattataagtacaagctttataataaaaatccattatatttcggcataacaataaaaaaacgataattcctataaatctcacttgggaattatcgttttatttgtatgtcgaaattattacaatatactatctcattttttattttctatttaaatgaaggccacgttgattgatccatgatattaactccgggctcattacgatatctgcttgtcgtaaacgctcaatgttcggcgcatctaacatcgtcataatttttttcatatgttgaataaaagactctacatagtctacggtatttgtgatacctgattgttctacttgatttaaaaacggtcgagacatccctattgcttttgcacctaatgctaaacattttacagcatcgagtggtgtacgtaagccaccgctagcaaaaatatttaatcgatcttgaaattcagtactctcaagtaaggattctacggtagattgtccccactgagataaataattcatatctttattcgaacgtctttcattttcaatatcaacgaaattagttccaccgcgcccactgacatcaacatagttaacaccaatatcatataacgcttgtaatgtttctttactcattccgaaaccaacttctttaataataactggaacatcaacgcgtttaacaatagattcaatatttgacatccatgaagcaaattcacggttcccttcaggcatgactaattgtgtagagcaca

SEQ ID NO: 3809 - DNA, 2996 bp, Artificial Sequence
  Description of Artificial Sequence: synthetic nucleic acid sequence
ccataatctgtttagcctctttgactaattgagtaatactaagtaaatcatctttagttgctaatctaatcatcttactaaaacacctcttttttagaattttaacgagtggtaacaataaatataaatcatgttgatacttttaagactcaatcaattaacgaaaatctgaaaaagttaagaaatgattgggattataccttaataggaataactttttattaaagttgtattttcaacaaatcagaattatcagatatgattaagagcctgtacatatactatatgtctcaggctcttaattcaaacgtgaatggttattaaatttaaggaatccaaccctttaagtatgaaattacacttaaagggttgaatacattatttttgtttaatgatttactcgcaagtttattttagtttgtttagtaaatcgtttaaaacagtatcttttttattcgctttttcaactagtttttcagtaaatttatcatttgtttttttatcaaaattgccattaacttttaaattattgtcttgttgaaatgttttaatagcagattctaattgttcgtcaaatatgtttgtttcgttatcaattggataacctaaagcttttagacctattttcatcgttttaacatttttatctttttcaccttgatgataagttttgttatctggaatgacattgagtgattggtattttggtgttgagatactaacatctggtctaattcctttaccatgaatataatggccatcaggcgttagccatttcatctctgtatatttaattaatgaaccatcactaaattcacgagtggtctgaacgatacctttaccaaatgttttagaaccgtaaactttagctttatgatagtctttcatagcacctgtaaacacttctgaagcactagctgatccctcattaactaagatggatactttcatatcttttgcttgttttagtgcttgattagaagtttttaattcttccttatccttacctttttctaattgaacgacagtatttcccttatcaataaagatgttagccatcttgactgcctcatctaataacccccccggattatttctcaaatctaaaatgatatgacggatgccttgcttatgcgctttgatgattgcagatttgagttcaccagaagtattgctttggaatttattgattgttagtacgcctacattgcctttcttctcatactctacactcttaacgtgaatggtatcgcgtttaatcttaatatccttttcttgcgaaccacgttttatagttaaagtaacatatgttccttttttgccgcggaccattttaacaacttgatcaagtggtttaccgactaccgaatgatgattcacttgtgtgacgatatctttaggttgaataccagctttttctgctggtgaatccttcattgggctagtaacacttatctgttcatttttcttttgcatttcagcacctatgccaacgaaatcacctgatacaccttcattaaattgttttgtttcttcagcagtcatatattctgaatatggatctttaagttctttaaccataccatctatggcagattgagttaatttatcagaactttgctttttgtaataatctttattaagtgtttgatagacatattcaattttttttaaatttgcacgttgttctttatttaaaccacttttttgatggctaattaaaattgttgatactacagtaatgatggatgttaaaagaataatacccaaaataacgagtatgaaatgccataatttaatttttatatgcttgctattcttagatggtgttgacattgtgttatcatcttgagatgttgcatgatttttttgatgatcattcatggtatcacatccttatacgttcatattgagttatacaaaatataaattcatagattatattcaaacttaatcattaacaagttatttaggaatgttcattctgtatgtattcgaatatttttaattatgatgtatgtaagtgaaaatcgcatgaggcttgagtagtacatgcaaaaaattaatatattaaacgaatgtttcattgagaaaacagcgtaattattttgtgtgcatctagcagaagttataattaaaaagtgtagagtttgaatccctttacattaaaacacctgagacattgagtcgtgtcccaggctctatcaatatttattaatgaaaagaatttaaaacttcaaccattctgtatagtcctcatataagtcatcaaatacagacattggtagggtgaattcgctatgtgtctcaatatattcagataatgtattaaaatcatcttcgtgttttggaaaggcaaggtcttcaaaaatttgctcagcaaaaacccctttatcgtcttttcttccgcgcacggtcataataaattgataaaatgaataattcttaaccattagcttactgtcacatcaataacttgtgtttcccctttaactactgcttgtacgtcttcaatatgaattgattcagtttgatcagagtttgtaataataataggagaaataatagattttgcattattattaatatattctaagtcaaaacgtataagtgggtcacctattttaatgtcatctccactttcaacaagtacttcaaaccctttgccatccaattgaacggtatctaatccgatatgaactaataactctaatccattttcggcttttaaccctacggcatgtttcgttggaaaaacattatcgactttgccttcaatcggtgaaacaacttcaccctctgtaggattaataccaaagccttctcccatcattttttgcgcaaacactggatcaggaatatcttcaattttgacatactcacctgtcaaaggtgcgtagattttaatgtttttgtcaacttctttagcttttccaaataactttttaaacatgtaaatgcactcctattttttaaaatgtttaattaaatctcca

SEQ ID NO: 3810 - DNA, 3597 bp, Artificial Sequence
  Description of Artificial Sequence: synthetic nucleic acid sequence
ttattggagaattaaaaccccatctatctcctatgagcgtcatcgcaagtttgctaccaacgggtactgtctcaggtgcacctaaacttagagctatacagagaatatacgaatcttatccttataaaagaggtatctatagcggtggtgttgggtatatcaactgtaatcatcatttagattttgcattggctatacgtaccatgattatcgatgaggaaaaagtcagtgtcgaggcaggatgtggagtagtatatgattctattccagagaaagaacttgaagaaacaaaacttaaagctaaaagtttattggaggtaactccatgatattaataatagataactatgattcttttacctacaatcttgtagatattgtagaaaaacaatgtgaaacgattgttaaatatcccgatgatacagatatatgtaatctgaaaggtattacagcagttattatttcaccaggacctggacatccattagacaatcaattattaattaaattaattgaaaatttcgaaaatttacctattttaggtgtttgcttaggtgcacaagcgctcacttgttattacggtggcgatgttatacaaggtagttgtgtcaaacatggaaaagtagatactttaactattgttaatcagtcaccactatacaaaggaattaagtcaagtttcaaagttatgcgttatcattcattaattagtgatccatgctcatttccagaaagtttattaatcactggccaaacatatgatagtatacaatctttccaacacaaaaacagaaaacattatggcatacagtttcatccagagtcattcgctacagaaaatgggaaacaaatcattattaattttataaatatagcaacgagaggaagttgaaaatgacccttcttgagaaaattaaacaaaataaatctttatctaaaaaagatatgcaatcatttattgttacactgtttgattcaaatatagaaaccaatgtaaaggttgaattattgaaagcttatacaaataaagacatgggtcaatatgagctaacgtatttagttgaatattttatccagacaaactatccaaaccaaccattttataataaagctatgtgtgtttgtggcacaggtggagatcaatcaaatagctttaatatttctacaactgtagcttttgttgtagcaagtgcaggagtgccagtcattaaacacggtaataaaagtattacttcacattcaggaagtacagatgtattacatgaaatgaatataaaaacaaacaaaatgaacgaagtagagcaacaattaaatttgaaaggattagcattcataagtgcaactgattcttatccaatgatgaaaaagcttcaatcaattagaaaatcgattgcaacacctacaatttttaacttgattggaccattaattaatcctttcaaattaacttatcaagtgatgggggtatatgaagcttcacaacttgaaaatatagcacaaacattaaaggatttaggtagaaaacgagcaattttaattcatggtgcaaatgggatggatgaggccacgctttctggtgaaaatatcatttatgaagttagcagcgaaagagcattaaaaaaatatagtttaaaagcagaagaagtcggtttagcttatgcaaataatgacacgttgataggtggttcacctcaaacaaataaacaaattgcattgaatatcctaagtggcacggatcactcaagtaaacgagatgtagttttgttaaatgctggaattgctttatatgttgctgagcaagtggaaagtatcaaacatggcgtagagagagcgaaatatctcattgatacaggtatggcaatgaaacaatatttaaaaatgggaggttaagtaatgactattttaaatgaaattattgagtataaaaaaactttgcttgagcgtaaatactatgataaaaaacttgaaattttacaagataacggaaatgttaagaggagaaagctgattgattcacttaactatgatagaacattatcagttattgctgaaataaaatcgaaaagcccatctgtacctcaattaccgcaacgtgatcttgttcaacaagttaaagattatcaaaaatatggtgctaatgctatttcaatattaactgatgaaaaatactttggcggtagttttgaacgattaaatcagttatcaaagataacatcgttaccagttttatgtaaagattttattattgataaaattcaaatagatgttgcaaaacgagctggtgcatctattattttattaatagtaaatattttaagtgatgaccaattaaaagaattgtattcatatgcaacaaaccataatttagaagctctagtagaagttcatacaattagagaacttgaacgtgcacaccaaattaaccctaaaattattggtgttaataatcgtgatttaaaacgatttgaaaccgatgttctacatacaaataaattacttaagtttaaaaagtctaattgctgctacatttcagagagtggcattcatacaaaagaagatgttgagaaaatagtagattcaagtattgacggtttacttgtaggggaggcattaatgaaaacaaatgacttaagtcagtttttgcctagtttaaagttaaagaagaatctctatgatagttaaattttgtggttttaaaaccgaaagtgatattaagaaaattaaaaaattagaagttgatgcagtagggtttatacattatcccgatagtaagagacatgtctcactgaaacaattaaaatatttggctaaaatagtgccagatcatatagagaaagtagtggtcgtagtaaatcctcaaatgtccaccataaagagaataattaatcaaactgatattaacacaatccaattacatggaaatgaaagcattcaattaattagaaatattaagaaacttaattcaaaaataagaatcataaaagcaattccagcaacaagaaatttaaataataacattcaaaagtataaagatgagatagacatgtttattatagatacaccatcaatcacatacggagggacaggtcaaagttttgactggaaattattaaaaaaaataaagggcgttgattttctcattgcgggtggtttggattttgaaaagataaaacgattagaaatatattcatttggacaatgtggttatgacatctcaactggcattgagtcacataatgaaaaagattttaataagatgactcgaatattaaaatttttgaaaggagacgaatgattaatgaaaattcaaacagaagtagatgaattgggctttttcggtgaatatggtggccaatatgtacctgaaacattgatgccagctattattgaacttaaaaaagcatatgaggacgcgaaatcagatactcacttcaagaaagaatttaattattatttaagtgaatatgttggtagagaaacgcctttaacatttgctgaatcatacacaaaattgttaggtggtgccaaaatatatcttaaaagagaagacttaaatcacactggtgctcataaaattaataacgcgataggacaggc

SEQ ID NO: 3811 - DNA, 2977 bp, Artificial Sequence
  Description of Artificial Sequence: synthetic nucleic acid sequence
atttctctgctttgcgcttctttaacttttccttaagtttgcgatcttgttcttctttacgacgttttcgttcttcgttacgttttcttagtcgctcttcttcttctggatcacgtggtttttttaattgttttgtaaccttttccataagttcttcttcggttaacgcagcaagtggtcgattattgacaaatgcaaatgttttacgtcgacctggtccacaataagattgacagcctatttcaatttcagcttccggatctaatttttctaattttcgcttcaaagactttaaatttacagcctgacactcatcacagattaaaaatttattttaaatcttgcatatgtgattcgccaatgtttgtgatgaccgctatatcaggttgtgcgatatgagataacaactctatttgatgaaaacctgacatccccatttctagaatagaaatttctgtgtcttcatcaagttctagtaaagtcaacggcattccaatttcattattataatttccttgtgttttcttaactttaaattcagttgataatacactttcaatcatgtcttttgttgttgtttttccattagaaccagtaaccgctatcaccttaggatttacatgatttagatatgcttttgccaattgctgtaaggctattaaagtatcttctacccaaataataggaccttggttcccttcagaatgtttattctctttttcactaaaaacagctccagcaccatcgttcaaagcttgtgtgataaaacgatggccatcaacattctcacctttaaaaggtataaataacgccccttcattgatttttcgtgaatcaattgaaacgccatttattgttttttttaaatgtttttcatcaatttcacaatctatccagtttttaatttgctctaatgttacgtttatcataactaaaacctctaataatcaattttatatttatttttctttttatcttcataacgttctttagctaaatcaatcaatttagcaattaaatcagggtaagataagcccatatttttccataagtttggatacatactatatgcagtaaatcctggcatggcatttgtttcattaatataaatttgattatcatcagtaacaaagaaatctgcacgaactaatcccgaacaatcagtagctttaaaggcctctaatgccatgtttcttaatgtcatttgaacatcttgatctaaatctgctggaatatctaatctaatcttaccgtctttatactttgatttataatcataaaacgctacatccttaacaacctcaccaggccatgtcgtttcaggataatcgttacctaagacagctacttcgatctctctagcattaatcccttgttcaatgacaagtttacgatcaaattggaatgcttcagctatcccagattttaattcttcttcattgttacatttacttataccaacacttgaaccgagattagcaggttttacaaataccggatatgttaacttatcattaactaatttaatgatattattttcatatttttcatactcacttcttaaaaagctaatataaggtaattgaggtaaacctctatgctcaaataattgtttcatcacgagtttatccattgagcttgaagcagctaacacaccattacctacatatggtatatcaagtacttcaaaaagaccttggatagttccatcttctccatttggaccatgcaataatgggaatactgcatcatatgattttcctaaactacctttactgagtaactgtgagatttctccagtctctacatcgttaatgacgagttcatcagtattttttatttcttgtgtaatattatcttttttcttccattcaccatcgtttgttatataaatgatatcaacttgatatcgttctttatcaattgcgtttaaaacattttgtgcagttaaaattgaaacatcgttttctatagaacgtattcagatgcattaatgccttacaactttatgagttcagtgtttaaaaataatgatggtcaaccaggggtgttagctgatgatgaaacattaacgaaacagctagacgatttcccatcaaccgtatcaaaagaagaccaacagtgttcatttgatgacatatttaaacactttaatcaacaatactatggtgtgccaattgcttatccaaatgagacgtttgtagtgagtgataaagtaaaacaattcaaattctctggacttacggatgcaccaattgattataaagcgttgaaagttaatgaatagcaatgctcaaacgtacaattaaattcatactttatttaatcgtaagttcgtttattatcttcattttagttgagaagacatctggtaatccagcgattctgtatctacaacgtcatggttatacgtcgattacgcaagacaatattgaagcggcacaacatcaacttggcttaggacaacatgtgttactaagatatatcgattgggttggacatgcactcacgggcaacttaggatacggctttagtacgaacgaagcagttaccgctatgataatggaagccatcgtgccgacgcttgtgctaatcattgtctctagttgtatcatgttgccatttggctatattgttggttacttcgttgggacgcgtccgcatacacgttacgctaatggaattcgtggattcgcccaagtgatgacctcaatgccagaatactggttagctattttattcatttattatttaggcgtacgttggcaattgttaccatttgtaggtagtgattcatggcaacactttgtgctgccaatcttcacaattgttgttatagaagggtgtcatatcttattgatgacagcacatctgattacacaaacgttagatcaagatgcgtatcaactggcgcagttaagacatttttcgttaaaagcgcgtatcatcgtacaaattaaagagatatttgcaccac

SEQ ID NO: 3812 - DNA, 2979 bp, Artificial Sequence
  Description of Artificial Sequence: synthetic nucleic acid sequence
aaaaacaattagaaatatttagtgatgagattattgaatttataacgctaaataactatgtcttaataaaaacatctcctggctttgctcaaagtataagttattacatagatcaattacaaatgaaagaaatattaggaattattggaggtaacgatactttgatgattttgacttcttcaaatgaaatagcagaatttgtttgttatcaattattcccttaaaaattaaatgattatattaataggaatgattactaatacaaaaaaatgagtaaaaaatctttttgcttgaataagataaggttttaacaatgagatttttcaaattattcactattatatagtacaaaatacatattcatacaaaattttgcattgaataaatctatatatgtgaaaaccctccctaaacaattgtgaattaaatcacacgatgttttttgaaagcgttttataatgtgaatgtaataaagcaaaggaggaatttgaaatggtacaaggacccattcaagtaaatagtgaaataggcaaattgaaaactgtgttgttaaaaagaccaggaaaagaattagaaaatttagtacctgatcatttaagtggtttattattcgatgatattccctacttaaaagttgcacaagaagagcatgacaaatttgctcaaactttgagagatgaaggaatcgaagtagtttatttagaaaaacttgcagcagaatctattactgagccagaagtacgcgagaacttcataaacgacatattaacagaatctaaaaagacaatattaggtcatgaaactgaaattaaagaattcttttcaaagttatctgaccaagaacttgtaaataaaatcatggctggcgtacgtaaagaagaaattcaacttgaaacaacccatttagtagaatatatggatgatagatatccattttacttagatccaatgcccaacctttattttacaagagatccccaagcttcaattggtagagggaatgacaattaacagaatgtattggagagcacgacgtagagaatctatttttatgacatatatactgaaacatcatccaagatttaaagataaagatgtaccagtatggttagatcgtaactcaccatttaatattgaaggtggagatgaattagtattatcgaaagatgttttagctattggtatatcagaacgtacatcagctcaagcaatagaaaagttagcacgtaatattttcaaagatgcaaacacaagttttaaaaaaatcgtagctattgaaatacctaatacacgtacatttatgcacctagatacagtactaactatgattgactacgataagtttacagtacatgcagcaatatttaaagaagaaaataatatgaatatatttaccatagaacaaaatgatggtaaggacgatataaaaattactcgttctagcaagttacgtgaaacacttgctgaagttttagaagtagaaaaagtggactttattccaacaggtaatggcgacgttattgatggtgcacgtgaacaatggaatgatggctcaaacacattatgtattcgaccaggggttgtggtgacatacgatcgcaactatgtatcaaaccaacttttacgcgacaaaggaattaaagtgattgaaattactggtagtgaacttgtacgtggacgcggaggcccaagatgtatgagtcagccgttatttagagaagatatttaaatttgaaaggtggtaaaagtcacaagtaattcattcattaaatcaaataacaagatttttaccacctttattaggggagattaatatggatgaaaataaattaggtaaaacttccttaattggtttagtcataggctctatgataggcggtggtgcattcaatatcatctcagatatgggtggccaagctggtggacttgcaataattatcggttggataataactgctattggtatgatttctcttgctttcgtatttcaaaatttaacaaatgagcgaccagatcttgatggaggaatttatagttatgctcaaacagggtttggagattttattggtttttcaagtgcttggggatattggtttgcagcatttctaggtaatgtggcttatgcaaccctattaatgtcagctgtgggtaactttttccctatatttaaaggaggtaacacacttccaagtattatcatagcatcaattttattatggggtgtacattttttaatacttagaggtgtagaaactgcagcgtttataaatagtattgttacagtagctaaattaatacctatatttctagttattatatgcatgatagttgtattcaacttcagtacttttaaatccggtttttatggtatgactagtggaagtgttggcgtttttagttggggagatacaatggcacaagtaaaaagtactatgttagtaactgtatgggtattcacagggattgaaggagccgttgtcttttctggacgtgcaaagtctaaaaaggatgtaggaactgctaccgttattggtttgatttctgtgctagtcatttatttcttaatgactgtactagcccaaggtgtcattcagcagaaccaaatttcaaaacttgctaatccatcaatggcacaagtattagaacatattgtaggtcattggggttcagtgttagttaatataggcttaattatctctgttttaggagcttggttaggatggacattactagctggtgaattaccattcattgtagctaaagatggacttttcccgaaatggtttgctaaagaaaataagaataaagctccggtcaacgctttaattattactaatatattagttcagttatttttaattagtatgttgtttacagatagtgcctatcagtttgcgttttcacttgcatcaagtgcaatcttaattccatatacactcagtgctttttaccaggttaaatatactattcaaaataaat

SEQ ID NO: 3813 - DNA, 3001 bp, Artificial Sequence
  Description of Artificial Sequence: synthetic nucleic acid sequence
ttagtaattggactttcatcattattgcgataataatcatccctatttcattttatgtgaatcatcacttttataataaagaagcaaatacacgcatataaaaagacttacactcaaaacgtttattttgagtgcaagtctttattttatctcaatttaatttattagaaagacatctaaaaagaaccaaataaccattacaatcattattagaccttgagcaattgtactcgctaaaaatgcaatcactgagccaaaactcacctttatagcttgttgaaagttaaacccttgaaccaattcaacaatgaacacagcaacaaaaggaataatgataataccaaagggaggaaaaacgaaacaacctacaatcacacctatgagcgctgtgtattcacctattttacttcctccaaagcgattgacgaaatatttattcatcacaaaatcggctactaatatcataatggtaaagataatcattgcaacataaaaaatccacgataatcttccctcatgaaaaccaaattgataaattaaaaaaccaatccataacattaaaagtgatggtatcaccggtttaattaaaccaataaatgctaacgcaaaggctataataattaaaatccataatatcgctgtcatctctatctactccacatcttctattgtaattttttgatctttcgtaaacaagatgagtatcatccctacgaagatagaacttgctgagacaaagaatacattttccaaaccaacccaatgactcatcacaccacctagcaaattaccaccaagttgtcctattaccatggcattggcaaaaagtgttgatgcataacctggaaaatcaggaagaatatcttgaaaataactaatcccaagacctagtaatattgctagaaagatggctaaacatatttgtccaacaagcatcatatgaaaatttttaaatacaccaatactaaagtaaaatgcgccaccaaatacagaaccaattatcaataaagttcgagttggcaatttagctgataatatacctaatataaccataaacggcacttctaaacctgcacataaacttgctaaatagcctacatatctttccttttcatttaaataatctgtcacaaaaagtggcatattcatcgtatacatccattgcccaatatgaagtaatataaacgctcttcaaatgttacgaagaaaccagcatttttatcagcctgtttcacatcgaaacggaaagcacccattaagtatttaccgtagatttcattttcaatccattgaacagaaacgtctgtacggtctgcaaataacacaccgcgttttacatcaccaataaatgctaatgcatctccatttttacctaacaagtcatcacgcacaactgttacattcatacctaacacagtgttacctgcagtgttgatgatactgtcttgtagtaaataacgaccgttaccatcttttaatgtatctagtttttgatagaaactttgagtacagataatttggcggtcataaccaggatctaatttaacgttgataatttcttttaagtcgtcaacattagaaacactagtaggattgaatgcttttaaaacttcaccaatacgttcatttaaagtgttgattttttgttcgttaatattttcagaaacaatagcagttaagttagcaactgaatcatctaatgcttcttgtgaaatcggaatagatccacgataagtgtctacttcccaattgattgtttcgaattccggacgagctaactcagggtttttctctaattcagcaacagtgttgaatttagcgttagcacgttttaagatcgggtatttcccacttgcagttgatactgaagttttttgtaccaattctgataagtcttggactgtcttaacttctttttcaggaatatatttaatatcctctgggatagttacgccaacgtcatcagatttaacattgtcacgtttagccccttttgatttcatgtactgttcaaatgctagaatttcttcgtttgtctctggattttggtttaatttagccatagaacgtttcgctccttcttttttgtctttttctttttttaattcttcttctgttggttcttctactttttcaatagtaggtgtttctggtgtttcttcaggtttgtcatctggttttggtgcatcatcaggtttttcttcatctgaagttccttctggttcatcatcagaaggtttgttctctgattcttctccagaattaccatctttgttatcttcaacttctgcaccttcatctttaggtggttcatcttgtttaggtgctgacgcttcaatttcttttgaaagctgttcgagttcttcgtactctttcttttgagcatcaatatcagcttttaaattacgagcagtttcgaggtcgcctttttcgactgcttcttgcgctttagaaatcagattagcgatttcttttttgcgctcatctaaattagccatgtataagcctccttattaaatttgggtataaaaaatagccttacgtttcaaaacgtaggctttctaaatccaatgctatcttcatttgttccaactgtttgaatttctttaagtctttcgcacgttgaccgacttcaaccgatgtatctttgtaggctggcactgtaacaatactaacctcaatcaattcatcgattttatttatggtttgaacgtactcattatctatgttttgccacgtacgagccgttgagtcattaggtggcaatgtgtaaaagaaactgcactgattaacgttgcctgctttaatattctcataaatatctcttgcgtatgatgtattaggtaagtggcatttaaagtatagccctttttcatccacctgtagctcaagcgttcctgcttgtgtgcgtcctataacataactaaaatcatgattgattagacatttcacatcacttacatctacatcatttaaagcattaggcgctacaatttctcta

SEQ ID NO: 3814 - DNA, 3919 bp, Artificial Sequence
  Description of Artificial Sequence: synthetic nucleic acid sequence
taccagaatatttatcagttcaaacgtgtgaaacaatgttaaagtcaatcgaaagtgacctattgcaattaaatattcagcatatgacaatacaacttgaaacaccagaacacaaacacgatgaatcaacattgtgctcaggtatacatgaacactctcattagtgagtttatttctatcgatactttttaaatataaataaagatgtagattgaaggttctatttcattcaaagactcaacctaaaaatcttatcttaatttaaaagagagtttttgtgagtagaaccccatttcaatcattctatatattaagagcgtgggacatcagttatgttcccacgctctaaaaattttcaataggttttataaatttcagatgaatctatctcaatatttactttttcacatataaacatcttactttaaatgaaattcttaaatataaattctctagctggtacttgcttttcttcaaatcctgctaaaaattcttcattattgtacgctaatttcactctctctactgaaattcctttttcattaacggtaataataccatatacggtgtttgaaccattgttcaaacctactgatccaggattaaaatatactgttgatttatcatcaaacatatgcaacctatggttatgtccaaataaaattaaatcggcttctttgtctttaaataattcagaaatagcttgttcgtcatcttttgtaataggtgcaaaaggttgttcatcaataggagctgacattttatcattttcaatttcataatgaataaataaaatctttttcccttttatggtcatttcaatatatctaggcaattgattaatttcatcgtaataggactcatctaaatgtccttctatccattgatgatgctcataaaatttcccttttaaatcttcaggataaggtgttccattgacgagtgacataatagcttcatcatgattacctgcaatcatttccatatcatcccggtcaaatatagtatccagtactttatttgtctcatgtccaatccctatgttatcacctaggttataaattttttcgatatcatctctactatcaatatcatctaaaacagtttgaagcgcatcaaagtttccatgaatatcagtgataacagcaaatttcatgatattatctcccttcaatgttatcttattagcatattctaacattttgtgctctattatgttagatattaatttaaaatttattagaattttgatattgtatttatatgaaaaaaaaggagtgcttaaaatttgtttaattattataaatccggatttcaaaaagcaaaaccacataatctaaagttaatactactctcattaataacttttgtcatttgctatattacttctaatattgcattctcattagttatattaagagctcaaaggttaccaatgttagctcaactcggtgaatctactacaaaacctataatatctattatttttattttactcattttagctttattatttatttttgtaggttacccattgataactggtacagtatatgcaattcaaaaagctattaataaagagaaagttctttttagtgatttattttttgcttttaaaaaaggcaaatatgctaaatcagtaattttagctttaataactttagttttattcattgtaatcgtacttattctagtgctattaaataaattatatagtttagctcttagcccaatattaatcggcttacaacaatcaataagcggctacgacaatccaatgggaattttaattacaatacaaattgtgttgttactcataacaggtttcatctcatcaattttctattggtttgtaattatattcattattaattatactaccgcttatacagaagattcatctcgtaaagtaatgagtaatttaaaagaaggatttaaaggtattaaaaacggtaagaaaacttggtttaaatttttcattggcgtattacttattagtttacttgcaagtattattaacaaaccgctattattcggtgtacaatacttaacaagcagtatgtctcaaacggtggctcaaactattattataatagctagaatcgtatctatagtattacgcctatgtctttattacattttgatttttggaattattaattatttcgttagacgtggtgacaaaccagtcaaaagcaaaagacgtcataaaaataaagatattaacaaaggtaatgtaaacgacaaagtagatactaaattaaatgcttccaactccaaagatacagaagcagataaaatgaaagatcaacaaacacatatacaacaagacaaaactgatagtcaagaaaataacatatatgattccatcaaagaaaaagtaaatgaaaataaagaaaatgttacagaacaatctaaaaatctatttgataagaaatagttgattgtccttagattactttattaatttaaatttaaagtattttgcccaacatgaaattttattagtctttcatgttgggctttttatattgtaattgcatttttgtgaaaatcctctttaaatattttattaatgctcatgcatataatttaaataagcataatgaaccagttgataaatatataatttaaataggcaaatggacactctcatatttaatcatgaaagtgtccatttgcctatgtttactgatataaactatcgtgatcgaccgtttaacaacaagatactgacctgaaaactagttatctaataaatgactttttaagtaatgtgctgcaccatcttcttcgttcgtgtattcggtaatatcatctgtaagatttttaatttcttgtcttgcatttttcattgcaacagtgtgatggccaaaattaaacatagctctatcattatcactatcaccaataactaaagtttcttcttgcttaataccatagtgatcaatcatttccttgatacctgtacccttatctgtatgatatggcatcgtttcagcattataacgcgaagaattagatacggtaatacctaaatttgattggttttcaacaagctggttgcgaaaatcagttattttatctaagttgggactaaataaatatattttagaaaagtgtgcatcaggtaaggtatctcgccaatctatttttcctttaattgcctctcttcgcgatgaccactcactttgacttacagcgtcaggtggctctatagtggaaatcatttctttcatccaatcttcatcttctttaagagatatacgattactttcaaaaggaaaaacttcataataaatatgttgttttttagccaattccacaattttctgtactcgttctaaagttaaactatgtctaaacaaattatctccatgaatttcacctgaagttccattcgaactgataataccatctacagtgaatccatcaggaacaagctgactgatttctgaataagatctcccagtagcaaggaaaactttataattttgctctctcaattcattaatcacttgtttagtatattccgaggctttattattttcatgtaaaatcgttccatccatatctaaaaaaattgcttttatatttttcatattatcctccattcaagactctaacttatacacttaaattgtgtcacttatcatactaaagtgcaacggctttgattacactttgaacatactataacgttgtcttctcttatttacaatgacatccctatcaaaaaaattgtcatccgataaagatctcataacatcttaaatattaaccttgttaaatatttaaaagtctttaagtaaatctttttcaaaaataacggcatttcttctattatatgtgttacaagtatgacagaaagttgtgaatcatttaaaatatgcttaccaaatgttttaaatagttgtct

SEQ ID NO: 3815 - DNA, 3050 bp, Artificial Sequence
  Description of Artificial Sequence: synthetic nucleic acid sequence
taccattttctatataggtgagttatcattttagactatataatagaagaaacacatcgttctcattcataaacatttcattcattatattaaaaaagagagtgagaccaatgaataatgcttcatccatggtctcactcccgagatttttatttaaaattaatacgtcttaactccccatagtacttcttcacattttctaataattgttttaagtacttcaatccgactcgtttttttatgatctgccggaacaatataccaaggggcatatgaagtgtttgtagattcaatcatatcatgacttgcttctaaatattcatcccatttttctctattacgccaatcttcttcagtaatcttccattgtttatcaggattattttcacggtctttaaaacgcttaagctgctcatctttatctaaacataagaagaattttaatatgattgtaccttcatctgtccacatcttttcaaattgattgatttcatcagatgctcgttgccattcattctggcttgcaaaaccttctacacgttcaactagtacacgaccataccaactccgatcaaatatttctatatgacctgattttggcatctttttagcaaatctccacaaataatgatgcttaagttcgacatccgtaggtgcactaataccattcacttcatatcctgttggatctaatttttctctaatacgtttaatattgccacctttaccagcagcatccataccttcgaaaaccaaaacaaggggaatctttctttcatataaagcaaattggatttctctcattctctgttgcaattcaacaatgagatttttatacgtttttttgtctactttctcaagattattattaaataaagaagtcgtaaagcttgatgtgaacttaccgttgactttagttgtttgttgttcaactttttttatagcttgctcaagtctatctattaaatgtaagtacattttttcaaaagcatgctcgcgctctgtgtaatcgatcactttccaatctttatctttgttgatgaattgatgcatttgatttagataactttcttgaggtataacattttcatattcttgaactttccatctagttaatggattatcttttgtctgttgaatatgttcattgcgtttttcttcatttatttctatgaaaaattttataatttcatagttatcattctttaacatcgattcaaaatgataaatttgattgactaaaacatcataatttttatattgatcatgcttaattttattttctttataatctaaaaagtgtgaataccaacttctaaaataaatatttatattgcccttttgtggtaaagtattccaatatttttgtaaaaattggtaacgtaaatcgtttgactctggcgatttagtagctataaatcgcgaatatttggcatctaggtgcaatagtaattcatttgataaacgtgtcttccccgaagcaggaatcccctcaaataataccataattggaatacctaattcatgagtacgtcgacttaatcgagctacttttaattgtaattcttctagtttccctgacatcgtttcaccctctatatatgttaaagttagatgttatattgttatattttaacatagaaaaatctcttcaacgttctaaacgtcgaagagatacgaagctttatcccataaatttaaaaatatcattctcatacaaatgaattaatcttctaagtattaaatctaaaatccatgcaactagaaacggcacaacaaaaaaggcgatgacaataagtaataaacttaaccatgcagaatcaacatgcataaatttaaaggcattaataggcccaaccattccgataaaaccaaatcctgctgattcttttgttcctgaaataccaataatccctgaagcaataccagatattgccgctgtcaagaaaatcggaatcataatgacagggtatttaaccatatttggcatcatcattttcaccccaccgaaaaatattgataaaggaatacctacatgattaactttgctggtaccaatcaataatacagcttctgtcgctgctatacctattgaagcagatcccgcagcaatacctgataatccaatagcaatagctatggctacagttgacaatggtgatatgattataaaactaaacaccatagagattaacatactcataaacactggttgtaattcagtaaagctattaaccatgtcaccaattcccgttgtaattaaccttacatatggtaaagtaaatacgccgattgtagctgctaaaccaccaacaactgtcggaaaaacaattaaagccatactaccaacacgttcttctattaataaaataagtaacacggcgatggatgcagttaacatcgtattaattaaatccccaattcccgcaattacccatgtaccttgtttaaattgagctgcaccactaccaacatatgaggcacttgctactacagctattgctaaaggtgtcatattgaacttcatagctatcaatgctccaataagcgctggcactgtaaattggatggcttgaacgacccctaataaagttttgaaaataggatgatattgcataaagtatttaaaaatttctcccaaaattgcatttggaacgagtccggctactattccaattgctacccctgataacactctaaaaacaaaatcctttggtccatcgatattttttatcgtcgacataagttaaacctcccaatgtgctaagtgaaattatgtataaaaagagtctcgaagcccatatatgattcaattaaatctttcttagatgctgtaacttagagggataattagtgaaatgcatatatgacattcaagactatgctcaatagtatatcatatttttctgaaaattaagataacttattcgacatttaattcaaaacattaatttttttaattaaaatacacttcataacctttagtttaaatactaacgttatgaagtgttagctaactcgtcctatttgaaataataagtgctttactc

SEQ ID NO: 3816 - DNA, 3402 bp, Artificial Sequence
  Description of Artificial Sequence: synthetic nucleic acid sequence
gtaaaaatcagatacgtacatatatattgctataaaaacgttagatataataacatatttttaatctatatcattatgtattttcatatgttgaataattttaagagtttaaacaagctaatttgtttaaactctttttctacttataataaatgggggtatattatcaaccacgttaaatttaatgcaatcataataaaagcaccaaatgccattaaaaatcatatgaactcattaaactaaaaactaaagataagctaatccaccaaatgtgttttattgtcttttatgcttttattttgtctttttttaattaataatattccacacactagccaagatataaaagtaatcatatttaaacttaatattgcacctataatataaaatacaccacttgctatagtattagtttttttcttcatcatacctataattccaaaaatgattgaaaaaattgcaacgatgaatataaccaaaaatccaacactaaaaacatgctgtgcggcttctgcactatgaactgttgtttcaccattaactgttgtagtaaaattagcatccatcgctccagtaattgaaaataccaagaaaactaaaaacaatagactagaaaaactttgtaaaatgattcctatcaatgatgttatattaattgctttattcatcataattctcctttcattttctacgtatatccttacaatcaggtttatgttctttaatataatctttaggatttatatctcgtttatagtagactttctttccctttatttcatatgcaacataaaatagttgctctttatttttgaataatttataactaataataatcaattttccgtctttaaaaacgtatctatttactttttctttttcaaattttggtctaactttttcacttttatgggccatttcttgatgtgttttttcttgaatttttaatatcttttttatttcatcatgatattgaatattattatgttgattttttgcccccttattacatccaactactgttataataagaattaacaaagttaagatgaatattttttatattatcacttcatatttaataatatacacataaaaaaagagattaaatatatatattcaacctctttttataaattactggagcaatttaatgatgttgtaccccaaagctacaacagctacaattatagaaatctgtaataattgtgccccttttttctcatcatattttttgtatttaatactacaaatgatactacctacaccaagtaatggaataattactgatgtaacaataaaaatccatgcccacacttttagagccttccctgttttttccataaatgttctatcctcctgttaataactataacaataactgtttataatcaccgttactctcattatatgaaattcccattcattttcatataataaattaaatataattatattttttcataatagaactatcttttaaatatattgtaaactgaaattcatgtcgtaattatctttaaaatgataaataacacaatgataaaaagcgatttaatagtgatgaaagaaaatttttccttttgatccataaaatgaaatcaatgataaagtaagtaatagagactagcataacaattatgagaatagtttcgatttcttacaattcattaattttaatttcaggcactgtagtaaatatatgtgccataaataacattctcaagaaaactattgatatgtataaattgaccctcgataattggatatttattgacatactctcgtattgttctggtgtcaattttttcttatgagttatctataattttttctaactttttcattgcattagcaattttattactcatcttaatatcttttttagtcatcaaggatttagcagatttaccaccaccgtataaagcatcgcgatatccatttaattccattttcaattgaacgaattggttatttttcaaataagtagtgtataactgcttaataaaactaaagtttcttgctattagtagcaatcactcggcatatctttcacttttgaagccattgtagctacaggtgcaatcatattcaataagttcgcatcatcaaaatcatgtttaacttgaaaatctttgaagtcacccaaagtaattttgatatgcttaatcaaatctttacctttaacttcattatttgcaatagcttgtgtttctgtaatatcttcaacacttttacagtggaatccattttatttaacgaattgtaatactaaatgagatactaaaaaatttcataaaatagactcatgatcgatactcttataaaagatgttattcaacaataaaagcagatattagagccgacatgagctgtatcaatcataaattaactactatttaattttttcattgttaccaactgaatttgacataaaaataaaacaaccaacgaatcacaaacgattcgttggttgttaatcatattataattgaattaatattaaccaattgagccttccatttcaaacttaattaaacggttcatttctactgcgtattccattggtaattcttttgtgaacggctcaatgaatcccataacaatcatttctgtcgcttcttcctcagaaataccacgactcataagatagaataattgctcttctgatactttagaaactttagcttcatgttctaatgaaatattgtcattgaacacttcattataagggatagtatctgaagtcgattcattatctaaaattaatgtatcacattcgatatttgaacgtgctcccttagctttacgtccaaaatgaacgataccacgataaatgactttaccaccatttttggagatagatttagaaacaatagttgaagatgtattaggtgctttatgaatcattttagcaccagcatcttgaacttgacctttaccagcaaatgcaatggataatgtgctacctttggcaccttcacctaaaagtacacagtttggatatttcatcgttaacttagagcctaagtttccatctacccattccatattaccattctcatggacaaaggtacgtttagttactaaattatatacgttattagcccagttttggatagtagtatatcttacatgtgcatctttgtgtactataatttcaacaactgccgaatgtagcgaacttgtagagtatacaggtgtaaatcaatcgctaatatgccatcttttaatcttgaaccacccttagcttcaataattgcttgcgtatgttcatttggtttaatacgtacatcggtaagtcgttgtatttcatctttgatttgttgacgcttttcattaaatcttgcatagcgttcttctgatattaaacctaattcactttagagcacagtggcgatg

SEQ ID NO: 3817 - DNA, 3581 bp, Artificial Sequence
  Description of Artificial Sequence: synthetic nucleic acid sequence
aaaggtggtcataagtaatgaaaggtaatttgttacattcaatcatcgaatattactcactgaactgggcctttcttctagaactgttcttcaaacatctattaatgtcggtatatggtgtgttgtttgcatgtataattggaattcctattggtattttcatagccaagtataaacgtttatcgtggccggtaattacaattgcaaatattatacaaactgttccagcaatcgctatgttagccatacttatgttggctatgggattaggaccaacaactgttgttgtaactgtattcctatattcgttattacctattattaaaaatacttatactggtattgtagaagttgatgaaaatattaaagacgctggtaaaggtatgggaatgacggggaatcaaatattaagaatgatagagttaccattatctttatctgttattattggtggtgttagaattgcacttgttgttgctatcggaatagtagcgattgggtcatttatcggtgctccaacactaggtgatattattattcgtggtacaaattcaacagatggaacaacattcatcttagcaggtgccataccaattgctttaatagcaattatcatagatataggattacgttatctagaaaaacgtttagatcctactcgtaaaaacaaaaaagattcaatgcaaaaacatcaagtacaaaaattacgttaattgatattaataaacttagttaatataaaaagaataggcagtgactgaaacagagattattttagtcaacagttgcttatacattaacaatgcctggaacattattttgtgttccaggcattgtttgtttaatatattaagttttcagggctattttagatatatttatagttttgggtaattataataagattggagcaaggataggaactactgctacaacaataacgccaacgatgacaactgcaatacttcccattgattcttcagtctcacccaattctttagctgccgcgacacctaaagtgtgtccacttgtccctagtgcaagtcctctggcaatagggttagatattttaaataatttaactattttagcacctaaagcagaaatgacaactgcatttaaaataactgcgagtgaggttaattctttgacaccaccgataccgtcagatacaggtaatgcaattgctgtcgttgcagcttgaggtagcatagatgctataatttgattgccaaattggaatgttattgcaacaagataaattaataacaaggcaataattgtaccaacagctataccaccaaatatttgtaaccaatacctttttaatacttcgcgcttgcgatataaaggaatcgcaaagcatattgtagctggttctagaaagaaattaataatgtcgccaccgattttataattctcataactaattcctgtcaatttcaaaaaagcaatacctgcaaccatacttacgaataaaggtgctagtaaaaagaaaccattcgtttttttataaaaataagtcgctatgacaaatggtattaatgatactaatatcccaaaataaggtgtattaattcctaaatgttcaatcattgcttaccctcctatgtgacttgtttcttcatttttctctttagaagggaaaagtgatttcgtcactaataattgtgacgcaaagccagtacaaattaataataaaagtgttgaaataataataagtaaaataattaaaatagggctttgcttaaggattggtaaagagttaatgactgaaataccggctggtacgaataggaatccaatattattggttaatgcagttcccacagtctcaacttgacctaatttcacaatgcctgtacacaatgcgataaataatagtacaagtccaattactgaagctggcattggaataggcataaatgattcaataatttttgatataagtaaaatcactgcaatcgttaatgcttgttgaaaaatactgtatttcattgacttcttgttatcaaccgctttgtttttaacgagatgcgtttgttccaaaataaccattcccctctgttttcttcatggttacattatagaatgaaagcggttactatagatattttcatagctcacttacaaatattttagggtgaggtgcaccattttaaaggtgaaactcataaagcatgatttaaattttattgaagaccaagttgttgtttaaaagtcttcatataagaacgactaacttgatatttaaattcatgtgttaacgtcagctgatacgtataattaaaccaatgctctattgtttggatatgttctttattaacgatagtagcgcgatgtattttaataaatagagaggaaggtagttttttctcgtaatgattaagtgtttcggtcgtttcataactttgttttgttgtatctatcgttgtaatcccattattaacagataatgcgataatgtctgtgaaatttaagatgtgaatacgttcatccacttcaattgggagtacatgtgtttgagcgcgctcatcatcactataatcaatatatttaggtgtgatagttttatctttgttttttgatttatctttagccatgtcaaccttatttacagcttgattaatacgttctttttcaaaaggttttaatatataatcggttgcatttaattcaaaggctttgactgcaaatttctcgtgagcggttgcaaagataatatgtggtgatcgcttcattttattaattttttgagctaaatcaataccactttcatccattaaatttatatctaagaatattaagtcaaatgtgttgtagagtaacttctccaatgtttcttctatgttttctgcttcttcaatttcatctatagcatcattaagatttaaaagatattgtaattcatttcttgcaagtggttcatcatcaacgattaacgctttcattaaagtgttcctccttagaagatttatatggaattaaacaacttacagtcgtgcctgattgagaagattgaatgttcagtgccgatgttgttccaaatagtccagtaagtcttttattaagattgactaaggcattaccagtaccagtggtagacgttactgtcgtatatccaatagtatctaattgatcagctggtatgccttgaccattatcttgaacagatatacttaagtagtcttgcttcatgctaacatccacatcaatatgattattctttttacgatttttaaatgcatgtttaatagaattttccactaatatttgaattataaaaggggggatgagcgcatcttgacactgatcatcaattcgatagtgtatgttaaatctatttggatagcgagcttgctctaaggataaatatgctgctacttgttgtaattccttttgtaaagtaatcgtattattacgtgcaccattaagattagagcggaagaactgactgagttgaatcagtaaacgtcgtgctttttcgctatcaattcttactagtgctgatatagtgttaatagcattaaaaaagaaatgtggattgacttgtgcctttagagcacagtggcgatgatatc

SEQ ID NO: 3818 - DNA, 3066 bp, Artificial Sequence
  Description of Artificial Sequence: synthetic nucleic acid sequence
tagacatcacatttagggtgcttattaaaagtagttttttataatctacttcgcaaaagcaaataaaaagccaatccattttatctgggttggctttttatttttatatgcctttatttgaattttaagggggcattttaaagattcagggggtaaatcatatagttttatacctaaaagtctatgtttcattccatcatgatgcatgctagttataagcaattccccagcacctaaaagctctacttcttgtacccaatcatataccctgacatcagttaattttttaccaccgtgcgtagtacagaaataatcctttctgtctttatcataaaagctatcaatagcaatacaaatacattgacgaccaaatttctcgcttgcttgtcgaattaattctggatgttttaaagcgcttgaattgagtgatattttatctgctccgtgatttaatagttgcgtaatatcatctaaattttgaatccctcctcctactgttaaagggataaataattgttttgccgttgcttctatcacttctatcataagatcatgtcctgcttccgtcttcgaaatatcaagaaagactagttcatctgcaccggcttcattataataaagagccaaatcaactggattaccgatatctcttaatgactggaactggataccctttacgacgcgtccatctttaacatctaaacatggaatcactctttttttaatcaagataatccctcccagaattcatccagatgtgctgcttttcctacaatagcagcatgaacatttaacgattctaatcgaaacaagtcctcttgatgtctaatacctcctgaagcaattacaggcaacgatgtataaagtgcgagacgacctgtcaaatcaaaattaggtccagaaagtttcccatctttcgaaatatcggtataaatcacaccacccaaaggtaaatgctcaattttggcaacataatcaaataaattgagtttagcatcctctttccatccattaatctttattttctctccaaaagcatctacggataagtagagtttatttggaaattgatgtgtcatatgtgttaaccactctatatcttggataccttttgtacctacaatacaatagtctattcctgaatgaatataattttcaattgtttgttttgaacgaatgccgccacccacttctataggcttagtggtcacctttcttaaggaacggatgtagtcgaattcttttacctcttttgctttagccccaattaaatctacaatatgtatacgtttcacacatttaaattgactataaaatcggtgactgccattgtacatcgaaatatctgaataacctcattgagcaagatcaccgtcatattaaagtaagaaagacaaggtatcaaagtatcaatacagcaaagaatactttaaaaggtattgagtgtatttacgctctatataaaaagaaccgcaggtctcttcagatctacggattttcgccatgccacgaaattagcatcatgctagcaagttaagcgaacactgacatgataaattagtggttagctatatttttttactttgcaacagaaccaaaaaagtagataaaataaatgaatgtttaatcgtttctaatgaaagtgggagtgaaactttaaaaatatcaaaagtactaactcaaaacattgagtcttactttagtcaaaaagaagagctattacttgcaaatgaagtagttgagatgataaatttacaaattggtaatcaaagtaatagcatttatatgggtggaaaggttaaacttattgatgcgttaaatgagtccaacgtttcatctattcaaccgattcttcaatatatagaatcaaataaaataactgaattattagaagatatatcaacatctcaaatcaatgtccgaattggtaaagagattgatgatagtttaagcgatatatcaattgtgactagtcagtatcattttgatgagtcactaaaaggtcaaattgcagtaatcggaccaactgcaatgcattatcaaaatgtaattcaattattaaaccgtatatggtagtaattggaattgtattggaggtcagactatgtcagaaaaagatcagtcagtgaataatactgaggaagatttcaatgtagaaactgaagacaatcagaatgatacaaatattgaaaactcagtatctaacacagataatagtgaagctaatgctagcgattcagaaaataattcagaagaaagtatcaaggatgaagagtcagagtctcaagatactaaaattaaagaattagaaaagcttgcaaatgacaatgaagaaaaatatttaagattatatgctgaattcgaaaattataaacgtcgaattcaaaaagaaaatcaaattaatgctacttataaagctcaaggtgttttaactgacattttaccgtctatagataatattgagcgtgcactacaaattgaaggtgatgatgaatcgttcaaatcacttcaaaaaggagtgcagatggttcatgaaagtttactaagagctttaaaagacaatggtcttgaagaaattttagctgaaggtaaggaattcgatcctaatttacatcaagctgtcgttcaagatgacaatcctgattttaaatcaggagaagttactcaagaattacaaaaaggatacaaacttaaggatcgtgttttaagaccatcaatggtaaaagtaaatcaataatttgattgaaaatacattgaaataaataaaatgattaaattggaggaattatattatgggtaaagtaattggaattgatttaggtacaactaactcttgtgtttctatcttagaaggagatgaaccaaaagtaattcaaaacccagaaggtgcacgtactacaccatcagtggttgcatttaaaaatggtgaaactcaagtgggtgaagtagcaaaacgacaagctatcacaaaccctaacactgtacaatctattaaacgtcatatgggtacagattataaagtagatattgaaggtaaatcctttagagcacagtggcgatgatatc

SEQ ID NO: 3819 - DNA, 2815 bp, Artificial Sequence
  Description of Artificial Sequence: synthetic nucleic acid sequence
cattcactttaaacaaccatgggtttcatcagtaatcactttaatgtgatcatcgttattattaaatattttcatttattttatcataatattatccactattctaaacaacacttatcattaaaggttgatttaaaaaattaaaaatgcaagtatcatcgttagacacttgcatatcatcatcttttatttagcaatgacactcccaagtaacggcattatattaatcattatcccaccaagtttaagcataccacttatttccttatctcttattgtgattgcagcgctaattattccaagaatcgccacaaatcttggaatcatcatagatggataatgtggtaattgtaaaaatatccctgctcctgaaataatgccacaaactagagaaatatatataaattgcttcacaaagcctctctccttatatcacctatacataaattggtatatttttaatatatattaaatgtaactaatgattagtttaaaatctccttcgaaaacactatctaaatcttcagaagttaacacaaagtttgaacctttagatatatcatatatatcaccatctacaataagtttaccttgtccatctaaaacagaaacaagacaaaattctctaggcttcatataatttagagtaccagaaatatcccacttaaccatagtaaaaaaatcactagatacaatatgtgtacaattgtgattttctatcacttcattttgaggagtgatattaggtagttcatttgaataattaataacatctaatgccttatctatatttaattcacgttcctcactattatcagtttttctatgataatcataaattctatatgaaatatctgatgattgcatgacttcatacgccataatgcctgcacctatggaatgtatcgttccagctggtataaagtaaaaatcacctggttgcacttgtattgttctcaaataattttcaaatgtaccttgctccaattgctcttcaaattcatcacgagatttcgcatacgtacctatagtaatctttgcaccttcatcagcttcaatgatgtaccaacattcagattttccatattgaccttcttcgtgttcatatgcataagaatcgtcgggatgtacatgaatagacaatggcgcagcagcatctacaattttagccattaatggaaaatctttacttggaaaatctccaaatatttctctatgattgttccatacttgatccaatgtttgaccagcaaatataccattttcaatcacactttttccgtgtggatgtgctgaaattccccaacattcacctatgtgattattaggtagttgatacccaaattgacgaagattatcactgccccatactttatccagaaaaatgggttttaaaaataacggcatgttcacacctccattattaaaagcttaaacttaaatcattatctatgcttgaatatcacacaatgttaaataataaaactacttttgatacaacatagcccttcttttaagatatgtatttgaagctaactatctttctcactcgtattgagtgtagcatatatgattatttcacaaactactatatgaatatactatcattttataaactttctatcctgtgtccatttgacgtaggattcttacatattatatcaactgcctaataaattgaatagcatcatttttactaatctaataaagcgttttattgattactataccattattttctgaaaatgaccctttaaaataacaatgctttaaattggattcaatagaatcaagcattacacttttttcaagttcatttaaaagtagaaaatttagtataattatactcattaaaatatttaactttgaatataaaaagggaacaagataagacttttgatttccttatcttgccccctcaaatactgattagaaattgaagtatttaaaaacaaattacaacaattctaacgataataggaacgaactttgtatcaagttgtattataaaagacaaataatttttaatacgtacttaattttaaattttaagattcatagtttttcaatgcatctttaacaccatgattgccacttaaaatttggaattcttgattattaaaaccatcagaagttactacttcttttaaaactgtagcaacatcttcacgtggaattgatcctgctttgtcgaaatataaatcagcttctatttttccagttccagcatcatctgtaagtgaacctggatgtacaattgtataattaagatctgatgttcttaagtaatcatcagcataatgctttgcaattgtatacggttttaaatctccactcgcatcgaatgcttcacgtctagaatcgtatgttgataccataacataatgtttgatacccgcttctttactagctttaattgtttttacagcaccatctaaatcaacaatgattgttttatccgctccagtgcttccaccagatccaactgaaaagataactttatcataatctgtaaagatattttttaaatcattaatactatttttttctacatctattaatatagctttaatccctttattttctaattctttaacttgatcttccttacgtacaccagctgtaaaatcaacgtgttcttcatttaattgacttactagtttagaacctacgcctccatttgctccaataactaaaatactcatttcaaacgtcctccttcaaaaaatcgtacttagtatttaccacttcaagagaatattaaacgttagtttattattgacatatttcaatcttctcattatattaatatatg

SEQ ID NO: 3820 - DNA, 3315 bp, Artificial Sequence
  Description of Artificial Sequence: synthetic nucleic acid sequence
tgtattcatttatattggaatgaaaccactcacagcaccatttaaaaatcttggtattacaaatgacgcgggatacattgtcacacaagatgacatgagtactaaagtacgaggtatttttgctgcaggtgacgttcgtgataaagggttacgtcaaattgttactgctacaggagacggtagtattgcggctcaaagtgcagctgattatattacagaattaaaagataattaaaatttaactcattttacacatagctagaacattgtttgcgtcaaagtatcgtcatcaatgattctagcttttttaattacaatataagtatgttactttgcatatttgagtgtgataagatgaatttaatataatgatattgattgaagattataattggcggtgacttaagaaaatgacaagcaacgaaaaagaaatgggtaaaagtgaattgttagttgttacaggtatgtctggagcgggtaaatcattggtgattcaaagtctcgaagatatgggatttttctgtgtagataatttaccacctgtactattacctaaatttgtagaattgatggctcaaggaaatccttcattgcaaaaagtagcaattgcaatagatttaagaggtaaggaattatttaaatctctagttaaagaaattgatattattaaaagtcgtaatgacgtgattttagatgttatgtttttagaagctaaaactgaaaaaattatttcacgttataaagaatcaagaagagcgcacccactaaatgaacaaggacaaagatcattaatagatgcaataaatgaggaacgtgaacatctatcagaaatccgaagtatcgctaattacgtgattgatacaacaaaattaaaacctaaagaattaaagcaacgcatttcaaagttttatttagatgaaaactttgaaacatttacaatcaacgtgacaagtttcggtttcaagcatggtatacaaatggatgctgatttagtttttgatgtcagatttctacctaatccctactatgtagaggaattgcgtccatttactggtttagatgagccagtgtacaattacgttatgaagtggaaagaaacccaaatattttttgataaattaacagatttattaaaatttatgattcctggctacaaaaaagaaggtaaatcgcaattggttattgctataggttgtacgggtggacaacatcgatcagtcgcattagctaaacgtttagctgaatatcttaacgagatttttgaatataatgtttatgtgcatcatagagatgcgcatattgaaagtggagagagataatgaaacaaatgaatgtagtacttattggtggtggcactggactttctgtccttgctagaggccttagagaatttccaatagacattactgccattgttactgtagcggacaatggtgggagcacggggaaaattagagatgtcatggatattccagcgcctggtgatattcgtaatgtcattgctgctttaagtgactcagaatcgatattaactcaattgttccagtaccgttttggtgaaaatcaagtagatgggcattcattaggtaatttagttattgctggaatgactaacattactaatgattttggacacgctattaaagagttaagcaaagttttaaatattaaaggccaagtcatcccttcaacaaacgcaagtgtgcaactcaacgcggtgatggaagacggtgaaattgtacatggagaaactaatatacctaaaacacataaaaaaatagatcgtgtgtttttagaaccaagtgatgttgaaccaatgaatgaagcgatagaagctttagaacaagcagatttaattgtcttaggaccaggttcattatatacaagtgttatatcaaatttatgtgtcaaaggtatttcagaagcattattacgtacatctgctccaaaactttatgtatctaatgttatgacacaaccaggcgagactgataattatgatgtcaaagagcatattgatgcacttactcgacaagttggtgaaccatttattgattttgtcatatgtagctcagaatcctatagtaaagatgttttacaacgatatgaagaaaagaattcgaaaccagtagcagtacataaagaacaattaaaagatagtggaattagagttttaacggcatctaatttagttgaaatatctaatgaacactatgtcagacataacacaaaagtattatcaaaaatgatttatgaacttgccttagaattaacaagtacaattcgctttactcctagtgataaaaagaaataattataagcgaattcgtagttatgatatgatagcttaagtgtgtgtttagaattagaaaataactttacacctcattggcgatactataaataagaatagaaaaaagggttaggaagggtgagtgttcaatgagctttgcatcagatatgaaaaatgaactaacacgcatagaagttgacgaatcgaatgctaaagcagagctcagtgcattaattcgcatgaatggcgcacttagtctatcaaatcaacagtttgtaattaatgtacagacagaaaatgcgacaacagctcgtcgaatttactctcttatcaaacgtatatttaatgttgaagttgaaattttagttagaaaaaagatgaaattgaaaaaaaacaatatttatatatgtcgaacaaagatgttagcgaaagaaatactaaatgatttaggaattttaaaaaagggagtttttactcacgatattgatccggatatgattaaagatgatgaaatgaaaagaagttatttaagaggggctttcttagcaggtggttctgtaaataatcctgaaacatcttcatatcatcttgaaattttttcacaatatgaagatcattccgaaggtcttactaaattgatgaatagttatgaactcaatgcgaaacatttggaacgtaaaaaagggagtattgcgtatcttaaagaagctgaaaaaatttccgactttcttagtttgataggtggctatcaagcattgttaaagtttgaagatgtaagaattgtccgtgatatgcgtaattcggttaatcgtcttgttaattgtgaaacagcaaatcttaataaaactgttagcgcagcaatgaaacaggttgaaagtatacaattaattgatgaagaaattgggcttgaaaatttacctgatcgtttaagagaagtagcgaagctcagagtagaacatcaagaaatatcgttaaaagaattgggtgagatggtttctacagggcctatatctaaatcaggt

SEQ ID NO: 3821 - DNA, 2993 bp, Artificial Sequence
  Description of Artificial Sequence: synthetic nucleic acid sequence
ataagtaatattacacataaataaaattgaatgctatcacacttattaagcttgttattaaaatatacataaaggaggagcgacgtgataggcaaacactttattataactggagcaacgagtgggttaggttttgcaataaccaatgaattacttcaaagaggggcccatgttactatacttgcaagaaatatagataagttcaatcgaatcaaagaaaactattttaaacctgaacatatcaatgtgattaaatgtgatttaatgcaacgaaaagatattgaatcattacaaaaatttttaaatacacctataaatggtttcatctacagttcaggtgttggatattttaagtctataagtgagcattcaactcgtgaagtagtagaaacttacgaggttaatcttacaaattttaatttgttatacaaagtgattcaaccacaattagtaaaagcagcatatatcgttggtatatctagtcaagctgctcttgtttcacaggctaatgcggcacattacggtgcatcgaaagcagggtttagcgccgttcttaatgcattgagattagaacaaccggaattaaaagtgctcaatgtacagcccggtccaatagatacaccattccaaaaaaacgcagatcctactctaaagtattttaaaaattatagacacatgatgatacaacctcaacaacttgccaagcaaatagtggaaggaataatactaaataaaattgaaattaatcaaccatcatggatgcaaataatgcttaaattttatcaattatgtccacgtacactagaaaaattatgtccaaatctatttaaaaataaagtttaaacacaggtcaattttaaggtaatcaaaagtattgactgaatgaacattttataaatgattttttcaaaaactcatctttggcttttgtcaacgttatcaatatgatttttgtattgccttaaagtaaagagatcctacagacgtcatttaaccgtttcatctgttggatctctttatttaagtatagtcatctaggtatttaacaagttggttaatatccttttatttcaaatgttgtgtatattcaatatctttaactctattacgtgcagatttgatttgatctaaactgatttctttataataattgcggacattctcttcaagttgttcaacgctactagctcctacaataattgaccccatagcatcatgagaagttaaatatttaaatgataacgcggttaaattactttccaattctttaatagaagcaatcgtgctacctaattcgtcttgagtgtaatctaacacaccgtttttaaatttttcatctataacatcaacactttttgaagttaataaacctttaaatacagggccacgtgctagaattttaacttgcttatcatgaacgtcattaataagactttcagggcgattatctattaaattaaactgggacataagtgtttcaatttgactatttttaagataatagtctatcacgttaggccgtatagatgaaattccatatgcacgaatatatccttcttgctttaattcatcaaatgcactaatagtttcgtctagaggatcatctattgttccgccatgtaattgatataagtctaaatggtttaatcctaatcgtttcaatgatcccttaacactttctttaatatgttttttcgaaggatcccacgtcatatgtccatcgtcagttaatcgatttccaactttagttccgataacgatgtcatcacgattttgatatttttttaaggctttaccaacaatttcttcattaactccttgatcgtaaatatctgcagtatcaaaatacgtaataccattatcaattgcactttcaataattggttgcgcttttttataatctgtgcctaaactcatgcaacctaacccaagttcagaaatttcgatgccactttttagaatatttttttgcatgtccagtctcctttcgatacactttaactgacgaattcagtttatcaatttataaaaccaattaaaaggaacgtgtttaaatatgagattaaacgaaaaaacaatcgatagaacagttatatataatggtagtattattgatttagaagtacatgatgttgaattacccgatggtagcacatctaaacgtgaacttgtatttcatcatggtgcggtggcagtgtgtgcaataactcctgaaaatgaagttttattagttaaacaatttcgtaagcctgcagatcaaccacttttggaaattcccgcaggcaaattagaaaagggtgaagatcgtaaagaagcggctattagagaactacaagaagaaacaggatatattgcttcagatttgcaatttgtcactaatatgtatgggtctcctggattttcaagtgaaaaactttctatatacttcacagaccaattaacggttggagaaaccaatttagatgatgatgaatttgtggagcttcacaaagtacctttaagtcaaatcgattcattgttaaaagataataaaattgaggatgccaaaacaatcattgcattgcaacatctattattaaattataatcattctaaataacaagcaaatctccttgctttttaccgacaatattggtattttattaaatgaatcatggattaaattaaaatgattataattcttagtagaggagtgaggcttccgtggaagaacgattaaatcgcgtgaagcaacaattacaacaatcttcatataaattgactccacaaagagaggcaactgttagagtattaattgaaaatgaaaaagatcatcttagcgcagaagatgtgtacttaaaagtcaaagataaggctccagaaataggattagctaccgtttatagaactttagaattgctagctgaaataaaagtgctagataaaataaattttggtgatggtgtagctcgttttgatttaagaaaagaaggagccaagcatttccatcatca

SEQ ID NO: 3822 - DNA, 3036 bp, Artificial Sequence
  Description of Artificial Sequence: synthetic nucleic acid sequence
tgtaccacttactccaaaaatatctccaagaacgacataacctacgtaaccgattgttgatagaagtaatattcccattgcttttttaaattctgggttatcggatttgccttcgcttttggctttaagtgatgttaaagaaatacctacaaccaataagatcattgctataagtcccatcactacttgaacaatcgtgctccattcacctaagaaaatagcgctaaatagagtggtaccgacaagttgcatacccgttgaaataggcatcgttttagatacacctattaaatgcactgattttaattgattaccttgaccaaaagcccatagagctcctgatactaaaccgacaataattactgtaaggttatcaaacgctgcgtgtccagtagcaagtagagaaaatccgataaaaagtgtacctaaagttgtacctcgaatctgattatatggtccaccacctacaaaaacatttataatgactacactaccccaaaatagggctggtaaaagtgctatcaaaaaatctacaatttgcacttattactcactctcctaagaacaaaattaagtgtcccaattacactcgaaatcattctatagtaattaaaaaaagaagtaaaaaacaacaccttaaaagtgttgaaatttttagtaagtaaatattcgtattaagtgataatgtgtttttgaactatatgattgaacaagatatgtatatataactatcttaattaattttatatatagtaatttacaaaaagatacatgttacaatgtatgtaattctataacatgacgtattttataaatgtgaaaggaaaattaaaatgaaatctttaatcttagctgaaaaaccatctgtcggaagagatatcgctaatgctttgaatcttcaacaaaaaagtaatggttatatagaagggaaacagtatatagtaacttgggcattggggcatcttgtgacaaatgcaacgcctgaacaatataacccttcatataaagaatggaatttagaagacttacctatcattcctaagaaaatgaaaacagtagtgattagtaaaacaaatagacaatttaaaattgtaaaatctttaattttagataaaaatgttaaagaaattattatagcaacagatgctggacgagaaggtgaactagtagctcgtcttattttagataaagtaggtaataaaaaaccaatcaagcgtttgtggattagttcggttacaaaaaaagccatacaagaaggatttaaacagttaaaaaatggaaacgcgtatcaaaatttatatgaagcagcacttgcacgaagtgaagcagattggatagtagggattaatgcaacacgtgcactaacgacaaaatatgatgcacaattatcattaggtcgtgtacaaactccaacaatacaaatagttaaatcaagacaagatgagattaactattttaaaccagaaaaatattacacgttatccattaatgttgatggttacgatttaaaccttaagcaacaaaagcgatataaagataaaaaagaattagaattgattgaacataaaattaaacatcaagaaggaaagatattagaagttaaaggaaaaaataagaaatcttacgcgcaacctttatttaatttaacagatttacaacaagaggcatataaacattacaagatggggccaaaggagacactaaatacattacaacatttatatgagagacataagttagtaacctatccccgtacagattctaattatttaacagatgatatggtcgatacaattcaagaacggttaagagcaattttagctacagattataaatctcatgttcgagatttaatttctgagtccttttcttctaaaatgcatatttttaataatcaaaaagtttcagatcatcatgcgattattcccacagaggttagaccatctattgaacaattgagtcaacgagagtttaaaatttatatgctaatcgcagaaagatttttagaaaatttaatgaatccttatttatatgaagttttaacaatccatgcacaactgaaagattacaattttgttttaaaagagataatacctaaacaattaggatataaagctttaaaagatcaaacctcttcgcatactttaacgcattcttttaaagaaggtcagttatttaaagtacatcgtattgagattcatgaacatgaaacaaaggcaccggaatattttaacgaaggttcattacttaaagccatggagaatccacaaaatcatattgatttgaatgataaaaagtatgcaaaaacactcaaacattcgggggggattggaactgtagcaactagggctgatattatagaaaagttatttaacatgaatgctttagagtcgcgagatggcaaaattaaagttacatcaaaaggaaaacaaattttagaattgtctccaagtgaattaacctcacctatactaacagcccaatgggaagaaaaattaatgcttatcgaaaaggggaaatataattctcagaaattcatacaggaaatgaaaaactttacatttaaagtagtaaataaaattaaaagcagtgagcaaaaatataaacatgataatttaacaacaaccgagtgcccaacatgtggtaagtttatgataaaagtcaaaactaaaaatggacagatgcttgtatgtcaagatcccaaatgtaaaactaagaaaaatattcaacgcaagactaatgcacgttgcccttattgtaagaaaaaaatgactttattcggtaaagggaaagaagctgtttatagatgtgtatgtggccacacagaaactcaatcacaaatggacaaaagaatgagagataaaacgaatggtaaagtttcacgtaaagaaatgaaaaaatatataaataaaaaagaagaaatcgacaataatccattcaaagatgctctgaaaaatctcaaattgtagataaatatcgaacttctttgtgactttcaactaaaaagttcgtttttggtattgttttttaagaaat

SEQ ID NO: 3823 - DNA, 4158 bp, Artificial Sequence
  Description of Artificial Sequence: synthetic nucleic acid sequence
caagaaagattccctaagaaaagtgcatattggtacaaagaacttgcagaaagtaaagaaattaaataaaagctaaatattaactagtaaataagtcatctaactaagagcacttattaaagtatttaaaacaaaaacgattatttccaatgaaaatgatttggaaataatcgttttttaatacgtatattcattttcaagtaaagtagtttaaaatgaagttatgtctaattgtgatatatcttatcgaaccaagattattttaaagtaatcccataaatcaaataatttattactaataatagtataattaataaataaacatgaagagggctaatgatgaagtcaaaattcacaattctattatttacaatcttttctacaacagtattagttttggttattatttataacaaaactcaatcccaatcatacatttcgactcactattctaataataaaataaaaacaacagcaacactttttttacatggttatggtggtagcgaacgctcagaaacgtttatggtcaaacaagcgttaaataaaaatgtaaccaatgaggtgataaccgctagagtgagtagtgaaggaaaagtatattttgataaaaaattaagtgaagatgcagcaaaccctattgtcaaagtagaatttaaagataataaaaatggaaattttaaagaaaatgcttattggattaaagaagttctatcacaactaaaaagtcaatttggaattcaacaatttaattttgtaggacattcaatggggaacatgtcatttgctttttacatgaaaaattatggggacgatcgacatttgccacaacttaaaaaggaagttaatatagcgggagtttataacgggattttgaatatgaatgagaacgtgaatgaaattatcgttgataaacaggggaaaccaagtagaatgaatgccgcatatcggcaattgttatcactgcataagatttattgtggtaaggaaatagaagttttaaatatctacggagatttagaagatggctcacattcagatggacgtgtgtcaaatagctcttctcaatcgcttcaatatttactaagaggtagcactaagtcttatcaagaaatgaaatttaaaggtgcaaaggcacaacatagtcaattacatgagaataaagatgttgcaaatgaaatcatacaattcttatgggaaacttaaaagtagtaaacaaaacgcacgattgaatgataacttgactttcaagtgaatcaatcgtgcgtcttttagtaatagtctaaaattcatcgcgtgaacaagatggaatcaattcattcgcaattaactcaattaattccattctagcgtcttcaccaaatacatgaggtaagatgatgatttcatccactttaaattgttgatgaagtaaggtaagttgttccgcaacatcatttggcattcgtatatgattttcgatttcatcttttcaagcttttctaattctcgttgactataatgcttgttctgtgctgtttcaatcgatggataactcttaggttgatttaaatagttaatacgcatcaaccaaagttgaagcgtatgtagcaattgtttaactctagataaattagaagctgttaccacaaaagttgctaaaataacatatggtttcgcattattaatttcaccatgataagctttaaaatattttctataagtgcttatagcttcatgaaggtctgtctcagattgtcccattcgtgcaataacaaaaggtagtccgcgctgagcagctaattttgcgcttctattactcatacctaaaatatatagttgaggaaatgaagtaaccataggtgtagctaataatgatttaaaacgatggtcttgagttgtatcgttattgaagtatttaagcaaatcagtaatctgagtattgaatggtaatttttcatttttgttttcatttagtgctgcattaacatttttaaagcttggcgaacgtccgatagccatatcgatacgttgggggtgtcttgcttccataattttaaattgctcagctactttataaggactataatgtggtaacatcacacctccactaccaactctgatgtgttgtgtgtgttctaaaatcgacatcattattatttcaggtgcactagaaacgacagaataaacttgatgatgttctgcaacccagtatcgtaagtacccaagtttctcagcgtgttgggctaatttaatactatgctttagggcgtcatttggggtacgcccttcgaacaacgggacataatcaagtaaacttaatctcatgaacacacatctcctcttcatttatattcaggatactataaatattattatacaaatgatatgtaatgattgcgattgaattgtttagggtaacacaataacataaactactattataaggatgatgatgatatgaataatgaacaaatagtatttaataaagtaccagacggaatgccacaagacgatacatttaaatatgaagatatagatgttattgaaccttcagaaaatgaattgcaattgaaaacattatatatatcggttgatccatatatgagaggacgtatgacaaatgctgattcttatgtagatccgttcaaacaaggggaaccgttcaatggacatacggtatctaaagttttgaaatccaaggatagtaattttgatgaaggtgatatagtagtgggtatgctaccttggagaaaaataaatacagtaaatagtgagtatgttaacaaagtacctacttctgacgtaccattacatctttatcttagtgtgttggggatgcctggtcagactgcttatcatggattacttgatattggacaacctaaagaaggtgaaacagtagttatttcagcagcttcaggtgcagttggttcagttgtgggccaaattgcgaagcttaaaggttgcagagtcgttggtatagctggtggagataaaaaagtgaactatctaaaaaatgaacttcgttttgatgctggtatcgattacaaaaaagataatttccctgaagcgttaaaagaagcggtgcctaacggtatagatgtctacttcgaaaatgtaggtggatatattggcgatgaagtcttcaaacatctcaatacacatgcaagaattcctgtttgtggtgcgatttcatcctataatcatccagaaaaagatattggaccacgcattcagcaaacattgattaaaaatcaagcaatgatgagaggtttcatagtagcagaattcgctgatggttttaaagaagcgagcaaacaattagctcaatgggttcaagagaataaaattaaaacacaagtttcagtagaagatggttttgataaagtgccgcaagcctttagaaatctgctaactggtgataattttggtaaacaagttattaaagtggcaagtgaataaaagcaaagcattaatttacttgtcgataaaacgtttgcactataagtggtaaattgaagtgatataataaaattaaataattttaaagaggtggcactatgaaagcgataggatttaagtcttcattccaattagatgaaggaaattgttttgaggaatttaactttgatatacctcatccatccggccatgaattattagtcaaggttcaaagtattagtgtgaatcctgttgatacaaaacagcgtacaatgccagttgacaaagcgccacgtgtacttggctttgatgctgttggtgtgattgaaaagataggagatcaagtgtcaatgtttcaagaaggggacgtcgttttttattcaggttctcctaaccaaaatggttcgaatgaagaataccaattaatagaggaatatttagtagctaaagcacctacaaatttgaaaagtgaacaagcagctagcctacctttaactgggctaacagcttatgaaacgcttttcgatgtttttggaatttcaaaagaaccatctgaaaataaaggtaaatcattgttaataattaatggagcaggtggtgtaggtagtattgcaacacagatagcgaaattttatgggttgaaggttattacaactgcttcgagagaggatactataaagtggtctgttaatatgggtgctgatgttgtactgaatcataagaaagatttaagtc

SEQ ID NO: 3824 - DNA, 3068 bp, Artificial Sequence
  Description of Artificial Sequence: synthetic nucleic acid sequence
cttcattaagttcttttgctttttgtaaggcttcttgaacttctggtttggttgatgcttggttaactaatgttttttcagcaagaacctgtccaggatttaatgcttgtaaattatcaatttcagcaatagcttgatttttagcctcttgaagtttttgctcaccatgtaaactttctctagcattttgcaattctaataaagcatcttcaattgtagctttatctaaagtgctacttggaacgccgttgataatgtctttagctttttgaagtgcattactatattcattttgtgccgcttcatcttcattgataaagtcgcttaattttttaacactgttttcaagagcaacttcattctcaagttgacgcatagcttcattaagtgctttagcatgatttaaatcattagaaacttcagttcttgaaggagcagagttaatctcatcatgctcgctttgtctttgagaattgtttagatttgttaaatagtttaattcattggttgcatcttgttgtgctttttgtaatttttgatcaccatgtaaatcgtttttagttaaatgaatgttttgaatggcatctgctattttattgttgtttaaaacatcatctgtagtgccgtttaatatttctcgacctttttgaatggagtcattataaatattttgaacttgcggatcttcattaatatatttactttgttgatgaacgtttgactgttcttctacgagtgtttttagtgtgcccatttcgttatttaacttattagcttgtgcaattatttctgccacttgctgtttagtttgagcatgattaattaagtcatttaatgcttgcttttgtttatcatttaaatttgttgattgatttattattaaatttgaatctgcttgattttgtgcaagtttattcgcaccgtgcaatgaatcttttgcttgaatgaccttttgagtaatagcttgaatattacttatatccatagttgggtcgttaagttgatttatgagttgttcagcttggcttacagcattatcgtacgctaactttttctcagaatcttcattgagatagttactagaatttagagtagcatccttatcggctatactttgtttaagttgttgcatagcttggtttattgcttttgcttcttctagtttctgagttactgcaggtttagttgttgttctgcctatatcttggattaattttgttatttgagctgaatttaatccgtctagattttgtatttcattctttgcaatttcctgtgcttgtcttaatttattttcaccatgaagattttgttcagcatcattaatttcttgaatggtacgattgatatcagtactacttattgttggattattttctgaattaattatttcctgaccttttgcaatagcttgttcatatgcttctttttcagagacatcttcattaatatagttactattttgtcttactaatgacgctttggctactgcaacttttaattcttccatttttccatttaagaatttagcatgacttaactgtttagcaacatttgctctacttgtttgttggttaatgatgttttccaatgcttgtttttgtggttcagttaaaccagtaaagttagtaatttgttgtttagcatctgtctttgcatcttgaagtttttgatctccatttaatccatttatagctgtatttatatcttgagttgcttgtttgattatttgaggatccatcgtcgcattgtcttcaccaataatgttatttatattatctactgcatgattataggcattttgttgagctaagtcttcattagtataattgctatttttacgaatttgctcttgattcataatgctatctctcattgctttcatagcatcattaagctcttttgctttctgcaattcttgagctaaactttctagagttgtcacatggttgatgttatccttaacagtttgacgttgtggaacattgagactgtttaagctatctatgtcgtttaaagcattgtctaaagcctgtttaaatctggattctccatttaattcgttatgcgcttggtctatcttgtttaataaatcttgtaatgctttatgatctaatgtatctggatgattatgaattaaatcctcagcttctttaatagcattatcataattttgttttttatcattatcagcattaatgtaattgcttaaatgttgaatttgatctttatcatttatgactttatgaagtgtactcatatcaccatttaattgtttagcaatctctagttgtttatttacctcatctcgagtatcagcattattaattaacggtttaaaatggtttttttgttcttcggttaagtcatctaaatgatttaattgattattagcgtcttgtttagattgagctaatttttgatcaccatgtaaattattcactgcatctttaatattttgaagtgtatcagcaattttttgtttatctaaggttggattagatgtttgattaattatttcttttgcagcttggattttatcattataagttttttgtttgtctgagtcttcatttatgaatgggctgctatttgaaatttgatcatcttgattcacttgatcttcaagttgtttcatagcttcatcaagcgcttcggcctctttaagtttttctgcaacttggtccctagatgtagctccattaatagcttgtataagcgcatctttttgaggttgattaagatgatttaagttaccaatggcttgattagttgtatttttgtcttgctgtaatttttgagctccatgaaggttatcttgtgcttgtttaatattatttaaagcattagtaatgtcttgtgcatttaagttaggatttgagctgttattaataatgtcttccgcttgtttaagtgcattattatacgcatctttttgtgcagaatcttcatttgtataatcactgttagcatgaacaccatctttttgcgcaacttgttctttaagttttttcattgcgtcatttagtgcttttgcttgctcaattttttgcttaatatcatctcta

SEQ ID NO: 3825 - DNA, 3302 bp, Artificial Sequence
  Description of Artificial Sequence: synthetic nucleic acid sequence
aaagacaaacggttcgaaaaatatttccgtgatcctaattataaatactttagacatagcttttcgcaaaaagcaccacaaggagaaagttatcaagatgtctatgatagagtggttactttcattgaaaatgagcttaatcaacagcagagacgtgtagtgatagttgcgcaccaagttgtaattagatgttttttcgtctattttaaaatgataactaaggaagaagccttaacgacggaaattcataattgctatccatatttaattaaagaagaaatgaagttttgaatacatatataatcatttgagttgtaaaattgtaattgctggctaaattgatattaattctctatcaaaagatatgattgatgtctataaacaaccgtagcaatattgttatactcattttagctgcttcacttataatttgatttgtagcaggcaaaatgaaatctgcaaattgtatttcggcaataggtctcttacctagcattgctgcaccaatagcagtaccaataatattcgattccgcaagaggtgtatcaattacacgttcatcaccatacttactttgtaatcctttggttgtgccgaaaacgccacccttttttcctacatcttcgccaagtataaatgcattactaaaatgatttagtgctaagtcttgtgcattttgtatagcttctaagtatgataatttagtcatttcgttgacctccctcttcataaacatatgtcaaagcttcttcttctgaaggatatggtgctgcttcagcagatttagtagcttcattaatgagttctttatgctctttttccaattgactcaaccaattttcgtttatgatgccttgatcgagtaaggccgttttaaattttatattacaatcctcttgtttcaataggtctctttcttcttttgtacgatatgtatcatcatcatcagatgaatgtggtgtcatacgtgaagtgacagcttctatcaatgttggaccttcacctgctagcgctcgttctcttgcttctttcatcgctttgtatactgcaattgggtcatttccatctacctgtattccatgcataccgtaacctaatgcacgatctgataacttttcagcagcatattgtagtgaatctggtacagatatcgcatatttattgttaattattacacagacgaaaggtaatttgtgaactgcagcaaagttcataccttcgtgaaagtcaccttgatttgaactgccttctccaactgttgcggtagcaatatttggcttgttatccattttaagtgctaatgcagcaccgacagaatgtggtatttgagtggctactggagaactttgagataaaatgcctttttctttgtgactaaaatgagaaggcatttgtttacctcctgagttaatgtcatcacgttttccaaaagctgataacatagtatccaatggagaaattcccatataagtgacaaatgctaaatcacgataataaggtgatgagatatcacctttttgcattgcatatgccataccaatttgagttgcttcctgcccttgaccactgacaacaaatggaattttacctgcacgattgagtaaccatagcctttcgtctgtttttcttcctaagtccatccatttatatatttttttgaggtcttcttctgtaaggcctgctgacttgtaatctatcatttttttacctccaactatacatgaattgcttgaccattagcttttaaacctaattccatgactacctcggataatgaaggatgtgcatgtgttgttaaaccaagttctaaagatgagccattcataaattgtaacaatgaaatttcatttattaattctgtaacatgtggccctatcatattaagacctatgatttcatcgtcatctttgttaactaccatctcgcaaaatccttttgattgggttacatcctcaattattgcctttcctatagctttaaaaggaactttgatactttttgctttgatgcctgctttttttgcttgttctaaatttttaccaattgaagcaatttctgggtttgtataaacacattttggtatcaggtcataattgataggtataggagaacaatcaaacatatgttcaactgcaactatagcttcttttgaaccgacgtgtgccaattgtaattgccctatacaatctcctgctgcgtatatatgtttatcttcagtttgctgataaccatttgttataatatgaccagcatcagaagtcttaatttgagtgttatttaaaccaatatcatttgtattaggctttctaccaattgcaacaagtactttatcgaattggacgggctcatctgaaatattaatagttacacccttatcagtttggttaaaatgatctttggtcaattgaatattttcgtagaatgtaacgcctcgattagttaattcttcttttagcaatgacgcaacttgtgtgctctcggtaggaagaactctgtcattcgcttcgattactactacatcagcacctaaatcattcatcagagatgcaaattctaaaccaataacacctccacctatgattgctaatctttgtggtagtgtatttaaccttaggatatcatcactcgatagtatttgtttatggtcaaatttaatgaacggaagagactgtggtgatgacccagtagctataagcacatttttattagggagtatatctgattcgccgtcttcatattccacagaaattgtaccgctttgaggagaaaatatagatgttcccataattcgtccaataccgttataatattcagagggagattcatggtaacgacggtcaatgttaggtaccacaccttcaaaaaccattttacgtttacgagtaccaccatttcgttgcgtgaaagtaaattcaatttctttttctccagaaccattcataagtatatttttttgtctatcagtcaattttttatatggcttatccatattaattttgtagacttcacatacacgttttaataaagttggataaaaatccgaacttgttggttcccatggttcaattgcaccttcatttaaagttttatttttatcaggaatgactaaatctaggtctacttttagtttttgacctaaaccatcacaagttggacacgcaccaaacggactgttgaaactaaacattctaggttctaattcaccaatagagaaaccacatataggacatgcgtggttctcagagaatttaagttcttctccattaataacgtcaactgttaaattaccttcagcaagttca

SEQ ID NO: 3826 - DNA, 4047 bp, Artificial Sequence
  Description of Artificial Sequence: synthetic nucleic acid sequence
atagagaaataataataatgacgttctctatctaaaccgatagaacgatatgagtataaaatgactaatatggtaataataatacttgtgatgatgagtagagcgctaaaaatatcgactacaaatacaatgctgtatggggctttccaagagcccagttcaaccttgattggtccatctcgtagcacattctttaagttaatcaatgcaatgaccaatgttagcaatgtaccgacaagtgcaacatatctttttattattgggcgctttccaataaatatgagtaaaattgcagttaggataggtatgactaaagttaaaacaagcaagttactctctatcatcttctggcgctcctttcattagctcaacgttatcagtgcctagttctttatatgttctaaatgcaagaactaaaaagaaagctgttgtagcaaaggcgataacgatagctgttaaaatcaatgcttgggggatagggtcaacatagcttgatgttcctttttcaaatattggaacagttccgtgctttaaacctcccatagtaattaaaaataaatttgcagcatgagttagtagtgtagtccccataatgatacgtatcaaacttttagacaaaacgagatagacacttatagatgtgagaataccactaacaaagatcatgataatttccactattcgttctctccaatcgaaataattatagtcataatagttcctacaactgcacataaaacaccgaaatcaaaaaacatcgctgtcgtcatgtgcataggttcaagtaaaggcaaagggatgtcaaaagtgacatgtgtaaaaaagtttttagacatgaaccaacttgttaatggtgtacccacgcaaaataataaaccaataccaattaagattttaaaatctaaaggaaaaatctttcgcatcgtttttacatcatatgcaattgtaataactaataatgcactagcgaaaagcaaaccaccaacgaaaccgccaccaggtgtataatgtccagctaaaaataatgaaaagccaaacacaatgaccatgaagaaaataatcacggcagcgtattgaaagataaggttattttgttgtctattcatggtcattcacctcacttgattgatttttctgttttaatcgtaatttaatcattgtatatacgcctaaacctgcaatacctagtacagatgactcgaataaagtatccataccacggaaatctacgaggatgacatttaccatatttttaccatgtgctaaatcaaaaacatgttcttgatagaatttagtaatagagtcaaagtgtctattaccatagccaattaatcctaaaataatcactgataatcccactccaattgaaatcacagcatttgtcagtttaaaggttggtttttcattgtagcgatttaaattaggtaggtgataaaagcatagtaagaataatgctgtagaaatagattccactacaaattgtgttaatgctaagtcgggcgctttaaagaaaataaataatactgatatagcgtaacccacagcgcttaacatgataatgctaaacaaacgtgattttgcaaatataatgaaagttgaagcaatcagtaaaaacaatactgttgcaccttcaaatacgcgtaaatgactcacgtttttaaagtcaatactgaagggtacactgatgactgtaacaaaagttaaagcaatgagaatacctaagataatcaccaaattatttctagaaaaacctgtaacataactatttgttatattttcggaatatcctggaatacgttggcctgaagtgtcataccaatgattcaacgttaactgatatggatgtgcttgtaataaacgaacccaataactaaatgaaattaataataaaataccaataatataaatacctattgttgataggaatgctggagttataccatggaataaatggaactcagcagttatatttgatgtttgactaactgctacagatgccggctctataatagattgcgttaatatacttgggaataaaccgaatactataactagtgatgttaaaatgataggtgaaataagcattaaaattgaagattcatgcgcttgttttggcagagcttcaggtttataagaaccaaagaatatatgcaatataaatttaattgaatatacaaatgtgaaaatactaccaataatggcaatgattggtaaaagaatacctaaagtatttaaactcattaaatttaaatgtgtaacattaatcattgactctaagaatttctcttttgataaaaagccgttaaaaggcggcacaccagccatacttaatgttgtaataactgtaagcgtgaatgagataggcatgattgtaagtaaaccgcccaactttttaacatcacgtgtaccagttgaatgatcaataccacctgtaatcataaatagtgcacctttaaacgtggcatgattaattaaatgaaatatggcagcaacaaatccagcaacataaagttgactattagcgccttgataatgataacttacagcaccaataccaagcatagacataatcatccctagttgagacacagttgagaaagctaaaataccttttaagtcatgttgttttgttgcattgagtgatgcccaaaatagggtgattaaaccaacaagtgtaattgtccatacccaaccttcggatattgcaaaaataggtgtgattcttgcgattagatatagtcctgcttttaccatcgttgcagaatgaaggtatgcactcactggcgtaggcgcctccatagcatctggtaaccaaatataaaaaggcacttgtgcagattttgtaaatgcaccaatcataaaaagtatcattactaagataaagaaaggactattttgaatgtcacttgcttttgaaatcatagcctgaatactaaaagtatcagtagctagggaaagtaaaatgataccacctagcatgctcaagccacctaatacggtaatgattaaagatttttgagcaccataaattgaagcttttttctctctccagaaagagattaataaaaagctagagaaagaagttaactcccaaaataaatataaaataataaaattatcagagagtacaactcctaacattgcacccataaatagtaataaataacagtaaaaattcccgagttgttctgatttgcttaaatatccgatagaatataaaaccactagacttcctatgccagtgataagcaaactgaataataatccgagaccatccacatataaattaaaattcattccaatatgtggcatccaatttaagtttttcattacgttattacctgacatcgtcattgaaatcaatgatatgaaatatataaataagacaataggaacaggtaatacaaaccatcctaaatgtatacgtttaacgaaccggtataggaatggaataatgagtgcaaatattaacggtaatagtaccgcaatatgtaacaaactcactatgttttcctcctttaaaatttatttacgacacatattatacatcattgcgcttcttctgaaaaaccatgtaactgcttgaaactcttgatttaaagactcttttaaataagaagaaacacgtcaaaatttgttcgaaaattttaactatatgaataattatttcgctttattactaaaaatttaatatggattagtcgaagtgtcttttatattgaatagcgtaatcttcttttaaacgatttaaattatttaaagacaatcgagaatactctgtcttctctttttttagttgattctcaagatgtgtaatagcatgttgaagtgagtcttcataaggcatggcctcgacattaaaatcacgaagttgagaaggtgtagcgtaacgtttctcaaaatggcttaaagctttacgttcatgaaaaaagacgccttctgtttcattggggtggtgtaaatcaccttgtttgggatgtttaattacttgttcaatttgtacgagtatttgatttccagtttcctctttgacacttacaccataaa

SEQ ID NO: 3827 - DNA, 3246 bp, Artificial Sequence
  Description of Artificial Sequence: synthetic nucleic acid sequence
gtaaaattaaacctaaagctaataatagtccatgtatcaaaggttgcaacatattctaactctctttcctttcatagttcggtgtaaaaatatctttaactacactataaaagccaggcaatgtagttttaaaaaatccagtacaatgatgagcatttcgatatgctgtataactagtaaatactggaaatgcaacaaataaacaagttatccatttattccaaaacttatttgtaaataaagatcgatgacaagcttcatgcattaaattatcaaatgctctcattctactaccaattaatataatagctacaagatagatcaaaatgttattaaaagttacagaaattaaaatactactaaaaataacaaaccaatcaaataataacgcaatcacgttattataaatgttcttttttatttatcgtaatattaacaaaattcagaattttaatcaactatatgtgcatgttataaatgcatacctctatccgtttttgattcttttgttcttgtatttgttctagctctgaatagaattctgggttcatttgtttatctaagtgtactgctgacccatttagttatgattcatcttctgttaacttattaactctttccgcaaatgtgtttcttcattagctcttttagtaaaatttttaaaagctttaaagctatttctacattctctttaaatggctttgccatttcgtaaagtcgattgaaattatcgtatgtattttcaatacgcccaactgctttatttaataaatcatctttctctcgtatttccttctctttatcttctaaggcgctaacagattttatacattcgtaatcctccataattctttgtgctatttttattactcttgaaactgattaaattcatctttgtttataacaacattagcagtctcttgtaattctttatcaaacaaaccgcctactttttctgtttcaaccttatatagaacgtttaaaggctttctaagcgtttctagtgattttaggtatgttattgtatcaattcttcgttattttgttttatatgggctgaattttatacctacgttcatattctttcttatgatattctgttttttgtttataactattaacttgatcgtgttgtctatttgttaattctcttgaagttccttgttctaattcataaccacgttcatttacatactcattaaatttatcttgaaagcttgctaatgcttttttattacctacaacatctttagcacttaatcgtccatcttctgtaattggtacaatttcaaagtgcacgtgaggcgtttgtccatatgaagctttgcgtataacaaattatctttcccgtattcttgttctaaaaattctttagcctgttcaaaaaaattttgtatttactggtgtctgattactaaaaaattcattatctgatgtaatcattccgtctatatgttttactgcgtcttttctaatttttcttttgcctgtatagttccgctcaattttttcatcaatcaaatcattaaaattttgttttccgtcatttatcaaatcataatttagatgtttttttgaatggtctatatcttcattttcataattaatattttctctttgaacatgatttttgaatacctattgtgtttgttccagtttttaatttttctactctgataatcgaataagacatattaaaatcactcctctacataaaggttttgcgtgtattttataattaaagtctaacagacaagacttattttcaataagtcattaatacatatgctctgccgagagcaaaaaatatcgcttataatggatttaaaccattataagcgtcattacagaaaagactaggtcatgcaaatattgaaattacttggcgtgtttatagtcatttattaaaagtattaaaaagtgaagaagttgcaatgccggataatataatatatttttaagtgctcaacgaaccagacaacttgtctttaatttaatcaatattgactacgcattaatcaaaataattaaaacagacttttacagattttcaacaaaataaaaaagaacgctgatatatcaaggttctagcgtaatttagttaatcagaattaaactgatttttattaatgaacggaaacgtaatttaatattgcgggtggcgtttttatcaatttaacaatatagaggaacgtttagtttaacttacgaggtttaacgatagataacaagatataacaaaaccccgtcaaatcaacgttttgttttacgggatttaacgaggtataaacaaataacggaaacggagggattcgaaccctcgcgccgctctcgcgacctacacccttagcaggggcgcctcttcagccaacttgagtacgtttccatatggctccgcaggtaggattcgaacctacgaccgatcggttaacagccgatagctctaccactgagctactgcggataaataataattaatctgtctctatcaagcacaagtattattatatcaatcttgttgaatttttcaagagttatattaaaaaaatatacggaacatttacacttatttaatattaacgtcccgcatattttaaattgaaacactgtcatcaatttttaaaatcaatagtttgggaaaaaagctaattttcttcaaaaagggagtagcgtgagagcgcctcgaaaatatttagagaagactgattatagtcaatgggttgttcagggttgttagatttcattcgtgattgcttatctaccatgtaataatagatgattgcattcgtatattgatgccacaagctatgaaatgatacattgagcgttaacgaatcaccattcgcaaaaattattttactcttacgatttttaagttctttaacattttcaatataatgcatattaatccatatattttcttcttgacggtctgagtgagttggaaaaaagtaagtaggaaaaagaggcgtaagtaaaataggtggtttactagagattccagtaatacgattcgtttctgcttttttactaatataattattaccataaaatttacatgatctttcgataattctctgtactttaaatggactttctttgcgagtttgatcaaatctgataatttcagtaccatttgtttgctgatattcatcatatttaggtcgtattaccatatcaccttttcgtataacataaatcgtttcgggtaaatgtgtcattaaaaaacctcactttattcgatta

SEQ ID NO: 3828 - DNA, 3164 bp, Artificial Sequence
  Description of Artificial Sequence: synthetic nucleic acid sequence
taatagcaatcgtaccacgcatgacactgattaattggtcatggtcatctttgatatcaatattccaaacttgtgttgtttttccttgatgtattaaagaagcaaatgctctcactagaggtctatcaactcgtattgaagtacgctcagttgaccctgcagctaacccgtacatggcattagcagcaatcttagaagcagggttagatggaattgagaataaacttgaggttccagaacctgtaaaccaaaatatctacgaaatgaatcgtgaagaacgagaagcggttggtatccaagacttaccttcaactttatacactgcgttaaaagcaatgcgtgaaaataaatcaattaaaaacgcattaggtaatcatatttacaatcaatttattaactcaaaatcgattgaaagtccatcacccaatcgtttaaggaggctatatcaatgattcctggtgaaattattgttaaaaatactgaaatagaagtcaataaacatcatcccgaaacggtgattgaagtaaaaaatacaggcgatagacctatacaagtaggttcacatttccactttttcgaagcaaataaagcattagaatttgatcgtgagaaagcatatggtaaacatttggatattcctgcaggagctgcagtgagatttgaacctggagatgaaaaaaaagtacaacttgtcgaatattctggacgacgtaaaatttatggattccgtggtttagtcgatggcgatattgacgaagaacgcgtattccgtccaaatgattcaaatcaaaacgccgccgttaaaaacgatgcaggcgaagacaatgcgaataaaaaaggtggtaaataagcatgagttttaaaatgacacaatctcaatacacaagtctttatggaccaactgtaggagactctgtgagattaggagatacgaacttgtttgcacaagttgaaaaagactatgcaaattatggagatgaagctactttcggtggcggaaaatcaattcgtgatggtatggctcaaaatcctaatgtgacaagagatgataaaaatgtagccgatttagttttaactaacgcattaattattgattatgacaagattgttaaagcagatatcggaattaaaaatggttatatttttaagatcggtaaagctggaaacccagatataatggataacgttgacatcatcattggtgcaacaactgatattattgctgctgaaggtaaaattgttactgccggcggtatcgatacacacgtgcacttcatcaatcctgaacaagctgaagttgcacttgagagtggtattacaacgcatatcggtggaggaactggtgcttctgaaggtgctaaagcgactactgtaacaccaggaccttggcatattcatcgcatgttagaagcagcagaagagatgcctattaatgtaggatttactggtaaaggtcaagctgtcaatcatactgcacttattgaacaaattcatgcaggcgctataggtcttaaagtacatgaagattggggagctacaccttcagcattaagtcatgcattagacgttgcagatgagtttgatgttcaagtcgctttacatgcagatacattaaatgaagctggatttatggaagatacaatggctgctgtgaaagatcgtgtattgcatatgtatcatactgaaggagctggtggtggtcatgcacctgacttaatcaaatcagctgcatattcaaacatcttaccttcttctacaaacccaacattaccttacactcacaacactgtagatgaacatttagacatggttatgattactcaccatcttaatgcttcaataccagaagacattgcatttgcagattctcgtatacgtaaggaaactatagcagcagaagacgtattacaagatatgggcgtatttagtatggtaagttcagattcacaagcaatgggacgtgtcggtgaagttgtaacacgtacttggcaagttgcacaccgtatgaaagaacaacgcggaccattagatggtgactttgaatatcacgataataatcgtattaaacgttacattgcaaaatatacaatcaatcctgccattacacatggtatttctgactatgttggatctgtagaagcgggtaaacttgccgatttagtaatgtgggaaccagaattcttcggtgccaaacccgatcttgttgttaaaggtggcatgattaactcagcagtaaatggtgatgctaatggctccataccaacatcagagcctttgaaatatcgcaaaatgtatggtcaatttggtggtaacattacacatactgctatgacttttgtttctaacactgcatatgaaaacggtatttatcgtcaactcaatctaaaacgaatggttcgaccagttagaaatattagaaatttaactaaggcagatatgaaaaataataatgctacacctaaaatagatgtagatccacaaacatatgaggtattcgttgatggtaataaaatcacaagtgaagcagcaacagaattaccattaacacaaagatacttcttattctaggaggacataagtcatgattatagaagaaattcaaggaaatattgctaatttatctcaagatgaaaagcaaaaacatgtcgaaaaagtttatcttgaaaactcagatttggttaaacgtatacaacgtgttaaaacagatcacggtaatgaaatagggatacgtcttaaacaacctattgacctacaatatggtgatattttatatcaagacgatacaaacatgattattgtcgatgttaatagcgaagacttattagttattaaacctagaaatttaaaggaaatgggagacattgctcatcaactaggtaatcgccatctgcctgcccaatttacagaaactgaaatgcttattcaatatgactatcttgttgaagatttattaaaagagttgggtatcccctactcacatgaagacagaaaggtcaatcaagcatttcgacatataggacattcacatgattgatcaccaacatttaagactttttcagttctgtgattctcagtttcctacaggtgcatttagtcattcttttggacttgaaacatatattcaacgagaaactgtacatgatactgagacatttattaaatgg

SEQ ID NO: 3829 - DNA, 2557 bp, Artificial Sequence
  Description of Artificial Sequence: synthetic nucleic acid sequence
tacaactgctttagatgtgacaatgcaggctcaaattttagatcttatgaaagaactacaaaataagattgaaacttcaattatctttattacgcatgatttaggcgttgtagcaaatattgcggacaaagtagccgtaatgtatgggggacagatggttgaaacaggggatgtgaatgaaatattttatgatcctaaacatccctatacctggggattgctttcttcaatgcctgatttaacaaccagtaatgacacggacttaattgcaattccaggtacaccaccagatttacttcatccaccaattggtgatgctttcgcacgtagaagtcgatatgctttagatattgattttaaagaagaaccaccttggttcaaaatttcacccacacattttgttaaatcttggttattagatgcaagagctccaaaagttacgccaccttcaatggttcaaaaacgattaagaacaatgccaagtaattatgaacaaccacatagagtagagagggtggcttttaatgagtaatgaaaatgtattattacaagttaaaaatttaaaacagtattttaatcaaggtaaacataatgaagttaaagcgattgataatataagttttgatgtttataaaggggaaactttaggcctagtaggagagtctggatgtggtaaatcaacgactggaaaagccattatcaaattaaatgatattactgatggcgcaatcgagtatgatggtaaagatattcatcaaattagaaaacgtaaagagcgattgaagtttaataagaaaattcaaatgatatttcaagatccttatgcatctctaaatcctcggttaaaggtaatggatatcgtagctgaaggaatagatattcacaaacttgctagtagtcagcgtgatcgaaagaaacgtgtatacgaccttttagaaacagttggtttaggtaaagaacacgcgaatcgttacccacatgagttttcaggcggacaaagacaacgtattggtatcgcacgtgcattagctgtagagccagaatttattattgcagatgaaccgatatcagcattagatgtatcgattcaagctcaagtcgttaatcttttattaaagctacaacgtgaacgtgatattactttattgtttattgctcatgatttatcaatggtgaaatatatttccgatagaattgcagtgatgcacttcggtaaaattgtagaaattggaccggctgatgatatttataattatccattacatgattatactaagtcattattaagtgccattccacagcctgatcctgatgttgagagaaatcgtcaacgtgttttatatcatgaagatgcaacgcttaatgaagaacgtcaattaaatgaaattagaccacaacattatgtattttctactcaaaacgaagcagttaaattgaaacaaaagtatggtttgtctgtttaataagttaagaaaggaggaattaaaggatgaaaggttttaaagtcttaattattttattaagtgtatgcataattttatctgcttgtagtaataagcagagtttatattcagaccaggggcaagtttttaggaaggtaatcacacaagatatgactacactagatacagctttaattacagatgctgtttctggtgatatagcagctcaagcttttgaaggattatatactttaaataaagaagacaaagctgaaccagctattgctaaatcttttccaaagaaaagtaatggtggcaaaacacttacgattaatttaagaaaaaatgcaaaatggtccaatggagattcggtaactgcatatgacttcgtatatgcgtggagaaaggtagttaatcctaagacggcttctgagtttgcatacataatgagcgatataaaaaatgcagatgaagttaatgcaggtaaaaaatcagtcaaggatttgggtatcaaggctataggtaaatataaattacaagtagatttagaaagacctgtaccttatattaatgaactattagcacttaatacatttaatcctcaaaatgagaaagttgctaaaaagtttggagaacaatatggtacaactgctgaaaaagcagtgtacaatggaccatttgaagtaacaaattggaaagtggaagataaaattcaattagttaaaaatgaacaatattgggataagaagaatgtaaaattagataaagtgaactataaagtattaaaagatcaacaagcaggtgcatcgttatatgatactggctcggtcgatgatactatgttaagtatactgcacaagcatctagtccatcagaaggtttagggttcttgtaaaatgtcgcgttatgaacgtcaaacacgctttgcaccatttggagaagagggtcagcaaaagctatcctcctctcaaatacttatttttggcgctggtgctttaggaagccatattgtagatcaactcgcacgcatgggggctcatcatattgcaatcgtcgatatggatattgttgaaatttcaaatttacatcgacaaacactcttcgatgaagaagac

SEQ ID NO: 3830 - DNA, 3163 bp, Artificial Sequence
  Description of Artificial Sequence: synthetic nucleic acid sequence
atccaaatgtcaaagacaaatccaactttattaaacgtgtcattaaatcagaggaagaacgcttccatgaaacgcttgaggaaggtcttacgattttaaatgaactgataaaagaagcgaagaatagtgatcaggttattaaaggtcatgatgcttttaagttatatgatacttatggattcccaatagaattaactgaagaattagcaactcaagaaaatttgtctgttgatatgcctacttttgaacaggaaatgcaacaacagagagatcgagctagacaagctcgacagaattctcaatcaatgcaagttcaaagtgaagtactaaaaaatattcaagatgaaagtcaatttgttggctatgaaactacggactatcaatcattaataactcatatcatatacaatggtgaagaagttaaacatgttgaagcaggagaaacaatttactttattttaagagaaacgcctttctatgcagtaagtggtggacaggtcgcagataagggaacagttggtaatgagagctttgaaataaatgtaactgacgtaactaaagcgcctaatggccaaaacttacacaaaggtattgtgcaatttggtgaagcaacacagaacgcgaaagtagaagcacgtgttaacaaagaggatagacgacttattcaaaaaaatcatagtgctacacatttattacatgctgcattaaaagaagtattaggagatcatgttaatcaggctggttcgttagtagaacctgaaagactacgttttgatttctcacattttggtcctatgacacaagaagaaattaatttagtagaacgtagagtaaatgaagaaatttggagagctatcgacgtccgtattcaagaaatgagtattgaagaagccaaatcaataggcgctatggctttatttggtgaaaaatatggagatattgttcgcgttgtcaatatggcaccattttcaatagaattgtgcggtggaatacatgtgaataatactgcggaaattggtctctttaagattgtgagtgaatctggaacaggtgccggtgttagaagaattgaagctttaacaggtaaaggtgcattcttacatcttgaagaaattgaaacacagtttaataatattaaaaatcatttaaaagttaaatccgataaccaagtagttgaaaaagttaaacaacttcaagaagaagaaaaaggactgcttaaacaattagaacaacgcaacaaagaaataacatcactaaagatggggaacattgaagaacaggttgagttgattaataatttgaaagttttagcaacagaagtagaaattccaaatccaaaagcgatacgttcaactatggatgactttaaatctaaacttcaagatactattatagtgttagtcggacaagttgatggaaaggtttctgtaattgctacagtaccaaaatcacttacaaatcaagtaaaagctggagatcttatcaaaaacatgacaccaattattggtggaaaaggtggaggtcgtcctgatatggctcaaggtggcggaactcaacctgaaaaaataacagaagcattacgctttattaaagattacattaaaaatctataactccaatgaataatggtgtagaattaaagtgagtcagaatacgcttattaaggagtgtcgtatatggaaaattttgataaaacaatgaaatttagttatgaagaaattccaaaggaagatgtcaaatcagttcttcagaatgtccatcgtacattagaagaacgtggatataatgcagttaatcaaatagtgggttacttattatctggagatcctgcatatattccacgtcaaaatgaagcaagaaaccaaatacgtcatatagaccgtgatgtaattatggaagaactcgtttcaaactatttaaaagagtctaagaattaatatgctaaagcataaaattttaggactagatgttggaagtaaaactgttggcattgctataagtgaccttatgggttggactgctcaagggttagacacactccgtatcaacgaagaacaagatgatttaggaattgatcaactcgtgaagattattaaagataatcaagttggaactgttgttattggcttgcccaagaatatgaacaattcaataggttttcggggagaggcttcaataaaatataaagaaaagttacaagagtctatcccttctattgatattgttatgtgggacgaacgtttaagtacaatggctgctgaaagatctttacttgaagcagatgtttcaagacaaaaaagaaaaaaggtaatagataaaatggcagctgtatttattttacaaggctatttagattctattcaataaaggagaaattaaaaatgacagaacataatcacgatgctgagttaacaataaataatgaagaggaattacttacgttatatgatgaaaacggaaatgaagttttataccgtaaaatgttagaattttatcatccagaattcaaaaaagaatatgtcgttcttgcagaagaaggtgcacaatcagatgacgaagatatgattgaacttgtaccaatgataaatgaacctgatgagtctggtgatggtgggaaattagtccctattgaaacagatgaagaatgggatatgattgaagaagttgtaaatactgagattaacgaataatctttaaaagatgttgtatgagaagtgtaattgagattctaggtctcttacatcaaggaattatattgagagggaaagtttaatattattaaattttcaacttagttaccatcttaaattactttcaaaatgcctgagacaatcaatgctgtcccaggcattttaatattagaattatttaaatttaccctactaataataatgcttggagacatattcgtataattgcctcttataaaaatctttgaattatggtaaaatgtctaaagttaatttctatgaatactcatatttacttctaatataaaagtatagaagaattactattataatcagtcattttcattgattaactatcaacataatcaatacatgggctgatttattttgtttttgtaattgttaatgataaaggaagttttaatgatatggattcaaatcaaaaatatttagcacaattacatcaatcaatt

SEQ ID NO: 3831 - DNA, 3931 bp, Artificial Sequence
  Description of Artificial Sequence: synthetic nucleic acid sequence
aagatgatgactttgaaaaaggtaaaaaagaaaaagttaaaattgacggtgaaacaaaaaatttaaaacctatcactttaaatataagtcgtgataaagcaaaaaaaatcactgtcgcagcattaaaaaaagctaaaaatgataaagaattacaacgtttatcaagcattaatgaaaaagagtataaaaaagaaatcgaagagcaacttgaagatgctcaagataaacaaactaaagaatttccaaaaattaaatcaactatctaccaacaaaagcatcaaatactaaaacgtaacatcacaattactgatagcgacggtgaaaaaactactatcaaaggcacgaatgtgatagatgacaatatcgaagtcgattataaagtaactagtgatggaaacacacataacattaaaggatcttctaagaaagatggaaagcattataaagatgactataaatatagtggtgacgtagactatgaacgtctaaatgttcatttaaataataaagagagcgtaaaagattcaaaacgtaaagatactggaactattactatcgataatgctatcgatcattataaagtaaattatgaagacaatttagaaacagacgctaaaaataatcttcaaaaacaaacattaaatattggatttaaactagacgaagagcctattaatattgttatcaatgctaattcaaaacttaaagagcgcattgattttaataccgataatgcaacggactttaattcattatctaagaaagataaagataaattatcagatgaaattaaggataaacaaaaagacattgtcaaatcagtctttaaaaagctagatgattaattcatagaatgctaagcgattgaacgacaatgactttcaccacctataaaaggtaggtcatatactggttaatctcacggggtgggactcacattcaattaaaactttacgaatgatagtctcaccccttttatcttgaattcgctaggagtggtcacttgaaatctttcaaattgtttcatatataccactcatttttacttaaaaagtggtatctatttttatatttaatattgatattattgacgctcatcgtaactttaacaactatccagcacattaatcaaaatgattcaaaatttaatattggtatcgttgataaagatcattctaaagaaacaaaactaattttaaacactgtgggtaaaggcaacaatcttggcaaaaatgctgctctcaaaacttataatgagaatcaagcgcaacatctgcttaaacagaatcaattacaaggatactttgtcttcgaccgtggtatgaccgatactttttataaagatggtagccttcctataactatttatacatatgatgaacaatcaagtaacagtgtcgtggttaatcaattaacacgctcagtttatgaccgtttaatgttatcaatgggcggtgtgctaagctttaatcaattagctaaagatccttcaaatgaagacgtagcaatgacattgattgatatgttatttaccggtttaaatcgttcaggttcatttaattttgaacccatacatatttatgacaccagtagttattatgtagtcactggatttcttttgtctatctttatattgtgtttatcactttatacagtactaaaaatgaatcaagaaactgcactcaaagaacgcttgcaaatgtttcatttttcctttgaaaagctcacgatagttcgaggtatcattgcatggttttattcactcatatgggcatttattggctttatctggattactcatgctctaaatgccccatttgaaaaatacaattggccaacggtagctttacaactcacttattacgttacgttactcgtcctatgcttattacttatagacttaattactcgttcatggataaactttctactcaaattattacttagctttgttatcgttattttttctgggataattatccctactatcttctttaaacacatgcttaatgatgtaatcattacacaaccatttagtttggttactaatcaaatgttagaaataacactcaataactatattttagacacacatccagcattttatttaagttttattacactattgatactattcatcattgttttagtatggaggtatcgccgatgaaaccatacattcaactcgtcattaagaaacaatggttacaatatgtgtttcttattagcacgatactaatcgctttaggaactctatggttaggacaaaaattggctcagcaaaattttaaaatacctatcgccattcaagatatggaccatagttccgcttcgaaaaaattaattaaagatatagagcaaaatcagtatgtaacagtaaaacatttatctcatgatgatttttatattgatgatttggtaaaaaagaaagaagtcattgcaagccttgaaatacctaaggatttctcaaaacaccttaaagataatgatttaaataagactcttccattatatagcagagatgattttataggacatattgctatggaaataatcagtcgatcattatacgaacaacaaatccctaatattattcatgaacatcttgatgatatgaaacaaccacaatccttagataaagtgaaacaatcttattattcgcttacacctcaatctaaaataaaaagtgtagctatcaataaacatgctcatcaatccatttcaattggcattgtatttgttgtcgtcatctttgtaagtgttatccaaatcctattacatcaacgtcttaaacagaacgcacctctcgaaagattatatttggtaccttatagtcaacttaaactatacttgacttatatcagtgtacatgtggtcatactgatgctcatgctattgatgattagccttttaatgcatcaaccattaagcattcttttctacttaaaaacactgattatagttttattttatgaggcaggtattgctttattactttttaaaattaatgttcttagtcaccgtatattcatggctattatttatacggtagcgataggtattatatatttatggattcaattgtaaaggagtcatattcaatgatagatattcaaaatgtttccaaaagctataaaaagaagcatattttcgattccctagatatgcaatttcaaaatcataaaattactattttattaggtgaaaatggtgctggaaaatctacattattgcgtttaattgcaggtattgagaatgcagacgaaggacgtattcaatacttcaatcaatatttgtcaagacgtcgaatacgtcatattgtaggctatgtccctcaagacatcgcactattcgagcatatgactgtcatggagaacattgagtttttcaagtcactttgtgaaaatcctatttcagatgaaacacttcattcttatttatcacaattaaattttactgatacaaaagtgaaagtatctaacctttctgggggaaataaacgtaaagtcaatattatgataggtctacttagtcggcctaaaatacttattctagatgagccaacagaaggcattgatttagaatcaagatatgatattcacaacttattacaacaaatgaccgatcaatgtttaatcatcatgacgacacatcatttagacgaagttgaagcactagcagatgatattaaagttataggtcaaaatcctttttatcatgatattttagaaaataaaggttggtcttttaaaaaatatgcaaatgccttagctgataatacgaaatcttaagctgtactttcactccatcacttcatcaatatttaacatcaaaaaggcttgccctttcgtcgtatatttctcgattgaaaaggcaagccttaataaattttatacacatttatttatcgtgtctaacttatctgtacact

SEQ ID NO: 3832 - DNA, 3775 bp, Artificial Sequence
  Description of Artificial Sequence: synthetic nucleic acid sequence
gctggtattcgtccgctaattcttgaaaaaggtaaagatccttctgaaatctcacgtaaagatgaagtttgggaaggtgaatctggattattaactatagcaggcggtaaattaactggttatcgtcatatggcactagaaattgttgatttattagctaaacgtttaaaacaagaatacggattgaaatttgaatcatgtgccacaaaaaatctaaaaatttccggtggtgacgttggcggaagcaaaaactttgaacactttgttgaacaaaaagttgatgcagctaaaggatttggaattgatgaagatgtggcacgtcgcttagcaagtaaatatggttcaaatgttgatcaactatttaatattgctcaaacggcaccatatcatgatagtaaattaccattagaaatttatgttgaattagtttatagtattcaacaagaaatggtttacaaaccaactgacttcttagtacgtcgttctggcaaattatactttaatattcaagatgtgttagattataaaaatgctgtgatagatgttatggcggatatgcttaattatagtgaaactcaaaaagaagcttatactgaagaagtagaagttgcgattgatgaggcacgtacaggtaatgatcaacctgcaactaaagcttaatcattcctattgattgaatatctaatagattataataaactacttgtagatggaatagatctttttatctacaagtagttttttattttaatgctataagcttatataaactcaatatgcgtacgatttgatatgatatctcacacacggtatattaaatatgatataggtagatgtactataaatgacataacaaataaaaaaaggaataggggcagatgttgtgagtcaaagtcattttaaaataacagttgaagatggaacaatgttagaggtgaaaattgataaagcaaaaaagagtactattggtattgttcatcttttccatggcatggctgaacatatggaccgttatcaagagttagttgaggctttaaatacacaaggttatgacgttgttagacataatcaccgtggacatggtaaagaaatagatgagaatgaacgtggtcattttaatagcatgaatcaaattgtagatgatgcttatgaaattattgagacattatatcttgaagagctcaatgtaccctatattatcataggtcattcaatgggctccattattgctagatcatttgttgaaaagtatcctgacattgctcaaggtttaattcttacaggaacaggtatgttccccaagtggaaaggtgtaccaatacgtttagcaatgaagttagttacatttatttttgggaaacgacgtcgactcaagtgggtgaatcaattattgaataaaactttcaataaaaaaatcactcaacctcgaacagatagtgattggatttctacacgtcaggatgaagttgataaatttgtggaagatgaattttgtggattcaaagtatctaatcagctcatttatcaaactttaaagaccatgatgaagacagtagaacgacaacaactaaaaagaatggacaaagaactacctatactatttatttctgggaaagatgatccttttggtgaatatggtaaaggtataaagcatttagctagattatataaaagagcaggtattaaacatataacagtacaactatataaacataagcgtcatgaaatattatttgaagaagattatttgaaaacatggcaacacatgtttgaatggatggaaaagcaaattttgaaaaaacaaaagtgagtgaatcttaaatgactgaaatgacaaagccttttttaatcgttattgtaggtccaactgcttcaggtaaaactgagttaagtattgaagttgctaaaaaatttaatggagaaattattagcggagattcaatgcaggtctatcaaggaatggatattggtacagcaaaagttacaactgaagaaatggaaggtataccacattatatgatagatattttgcctccagatgcttccttttctgcatatgaatttaaaaaaagggcagaaaaatatattaaagatattactagaagaggcaaggtgcctattatagcaggaggaacaggactatatatacaatctctcttatacaactatgcttttgaagatgaatccatatctgaagataaaatgaaacaagttaaattaaagttaaaagaacttgagcatctaaataataataagctccacgaatatttagcttcattcgacaaagaatcagccaaggatatacatcctaataacagaaaaagagtgttgcgagcaatagaatattatttgaaaacaaaaaaacttttaagttctcgcaagaaagtgcaacaatttactgaaaattatgatacattattaatagggattgaaatgtcgcgtgaaacattatatttaagaataaataaacgtgttgatattatgttgggccacggattatttaatgaagtgcaacatctcgttgaacaaggttttgaagcgagtcaaagtatgcaagccattgggtataaagagcttgtacccgttattaagggaaatataagcatggaaaatgctgtagagaaattaaaacagcattctcgacaatatgctaaaagacagttgacttggtttaaaaataaaatgaatgttcattggttaaataaagaaaggatgtcacttcaaatgatgttagatgagattacaacccaaataaataaaaggagttctaaccatgattgcaaacgaaaacatccaagaccaagcactagagaactttaaatcggaaaaaactgaagtcacaattttctttttaaatggctttcaaatgaaaggtgtcgttgaaaattatgacaaatatgttgtaagtttaaattctcagggtaagcaacatctgatttacaaacatgcgatcagcactttcactgtagataatgaatcgtctgaagcaactgaagtgaatagtgaagaataaaaagttgtaatcaaagtgcattcataatgcatcacctcaatagaagtcagatttcgacttatttaagaatgttattaaatattgaagcacatgttttaaacgtagcactttaacacaaaccaaggaatgtttgtaataaaaaatgcttcatctaatgtaaatattgaattcattaattcagttcaaaaacattagatgaagcattttcttgttaaaatttattatagtaatttttcaatttcagtcttaatttgttccggtttcttttgaggggagaaacgtttaatcacattaccttcacggtcgattaggaatttagtgaaattccatttgattttttcgtttatcatacctttagcagcgtttgttaaaaagtgaaataatggatgttgattatcacctttaacatcaactttttcatgaatagggaaagtcacaccatagttaattttgcaattttgagcagcttcttctcccgatcctggttcttgaccgccaaattggttacatggaaatcctaaaataataaatccttgatccttatactcatcatataacttctgtaaaccttcgaattgaggtgtaaaaccacattcgctagcagtgttgacaataagcataacgtcacccttatactgctctaatttataactttcaccattgtttttttgtacaacaaaatcataaatactttccattttatcaccctttcgatatacatctaatttaacacaatttgtgtagttagtctttgttcacact

SEQ ID NO: 3833 - DNA, 3429 bp, Artificial Sequence
  Description of Artificial Sequence: synthetic nucleic acid sequence
ctccctgattaattttgatatttatgttctctaatacatgcttattatcgaaataataatctaaatttcgtaattcaaaaactggtgttgtcatggttttcacctcgcatataactatacaacttattaatttttatgtaaatagtaatgtttacgactattttaaattacatatagttttgcttgttctataattagtctagtgactttatagtcgcaattaaaacgatgttatttttatttaacatgatgaaataattaagccattcactgaatgaaaagacgatgaatggcttaattttataaatattttattgagttaaaattttgtttttgagttctggatcaaatttttgtgattttaacatgtctatttctaatttatacggtggttttttattttttttatcttcaccaacatatggagtttctaatattttgggaatatttttaaaagtatcatgatgtactacgtaattaagtgcatcaaagccaatatgaccaaagccgatattttcgtgacgatccttctgtgcacctcttaggtttttactgtcattaacatgtactactttaattcgatctactccaattatgctgtcgaatttttctagtacaccatcgaaatcttctttgacgttataaccggcatcatgagtgtggcacgtatcaaaacatactgataagcgatcattatgtgtaacaccatcaattatttgagcaatttcttcaaaagatctccctacttctgttcctttacccgccatagtttcaagtgctattcttacatcattatcatgtgtgagtacttcattaagtccttcaataattttttgaattcctttatctacacctgctccgacatgcgctccaggatgcagtacaatatctttcgctccgagcgcttgagttctttcgatttctttttgtagaaagtcgactcctaaattaaatacttcaggtttggttgtatttgcaatgttaatgatatatggtgcatgtacaacgatatttgataagccatatgttttcattgcctgctggcctttttcgatatttaaatcttcaatatttttacgtcttgtattttgaggcgcacctgtataaatcataaatgtagattcaccatatttatgtgcttcttctgctgacccttgcagcatttttttgccactcattgaaacatgtgatcctattaacattcatttcacctatcctttattattttttcgtttttgtctattttgctttttactatactgctttctttcttgacgtttcattttttcaacttcttgtttaaacttctttttatagcctggtttaactttacgttttgatttacttcttactttgtgtttaacttcatttgttaaatggtcatctttgcgctgtcttgatttacgcatattgtatgcctttatcggttttaattcaccattcttaatatctacattttcaaatttataacctctgtcttcaataagagtaatattactttcttcatcaggactatataatgtaatggctacacctttataattacctcttcctgttcgacctacgcgatgtgtgaagaaatcgatatcattgggtacatcgaaattaataacatgacttacgccttcaatatctattcctctagaagcaagatcgcttgcaatgacaaattgaaaatctaaatttcttattcttttcatttgttgtttacgttctcttggtgttaaaccaccatgaatcatacctattttaattccttctttatttaaagtgtctgccaattcatcggcattttcacgactgttacagaaaataatacatagataaggattcaatatatctatcaattccaatgttttatctaccttagcagaaccttttgtaggaattagataaaattcgatattttctttattatgagctttgccatcaacttctacaaattctggttgacttaaatatttatttaaaaatggttgtaatgatttaggtattgttgcactaaataccgctagatgagcattttcatcatctaatctcgctgcaatatggtcaacatcttcaatgagaccgaggtcaatcattaaatcagcttcatctataattaaatatgacgctaaatgtgcatgaagataacctgaatgtgctaaatcattaattcttgttggtgtaccaataatgagttgtggttgatggctacatcgttgtttatctttttctaaatcggtaccaccaatgaaaagttttacatttataccttttttgaattttactaaatgcatagcaacttgatatagttgctgagcaagttcacgtgttggagctactacgatggcttgtggctcttgaatgtcactttctataagttgaattaatggtaaaagaaaagcgtgtgactttccagttccagtttgagattgtcctattaaatttgttcctttaagaattctcggtatgattctattttggatttcagtcggtttttcaaaattgagatttttaacagcttcaattaaattctcatctaaattaaagtgttcaaatggatgttttgacataatttgttctcctttaaatgtttatcaataacatttatttatatttaaatggatctgtgttgatttcagaagcatatattggaaattgattttcatatttaaataaccatttttctaataattcttttaatccttctttcataacatactcactataatgattgatgtctaataaatttacattttggattttagcatctaaagcatcatggtgtttaatatcaccagtaacaaaaacatctgctccaagttggctagctttatactcaaatcctatacctgaaccacctatgatagctactttcttaattggactatcatgttgacctgtatatcgtacgctcggtatattgagctgttttttggcatattcagaaaattcatctaaagtcatagtttggtttaattgtccaataatccctaatccatactcactttctttgttcattttaataaaatcaaaaactggtgtttcgtatgggtgattatctaaaatagcacgtttagttatttctaattcattgtcttttatcataaactcaagttttatttcatcaacatattcgatactatctaacttccctatataaggacttgcatcacctactggtttaaattgccctttaccttcactttcaaagaaacaatattcgtaattaccttctttagctaatccaagttcgtttaaactgtctttgaaatcttcaatataatttttaggtataaaagtttgaactttgtaataatatgagctatttgtattaatcattgatatgttctctaaacctatttgatccgctaacattcgattgacacctttaggatttacatcaagattagtgtgtaatgctataagattgatattattttg

SEQ ID NO: 3834 - DNA, 3380 bp, Artificial Sequence
  Description of Artificial Sequence: synthetic nucleic acid sequence
attaagtcatcaatcattagatgatttgaaagttggcgctcgtattgaagctggagaacaaaaagaagatgcgctagattttactttatggaagaaagctaaaccaggtgaaattagttggaatagtccatttggtaaaggtagaccaggttggcacattgaatgttcagtaatggcttatcatgaactagggtctacaatagatattcacgcaggtggttcagatttacaatttccgcatcatgaaaatgaaattgctcaatcagaggctcataatcatgcacctttcgcaaattattggatgcataatggttttattaatattgataatgagaaaatgagtaagtctctaggaaatttcattttagttcacgatatcattaaagaagtcgatccagacgtattacgattctttatgattagtgtgcattatcgtagcccaataaactacaatttagaattagtaggtgcggcgcgaagtggtcttgaacgtatacgtaatagctacaagttaattgaggaaagagaacaaattgcctcagatttggaagaacaatcagaatatatacaacaaatagataaaatactaaatcaatttgaaacggtaatggatgatgactttaatactgctaatgcagtaactgcatggtatgacttagctaaacttgcaaataaatatgtattagaaaatacaacttcaacaaaagttttaaatagatttaaagaagtgtacagcatttttagtgacgtccttggtgtaccacttaagagtaaagaaactgaagagttactagatgaagacattgaacaattgattgaggagcgtaatgaagcacgtaaaaataaagatttcgctcgagcagatgaaattagagatatgttaaaagcacgtcatatcattttagaagataccccccaaggtgtaagatttaaacgtggctaaacatatgaacgtaaaacttcttaatcctttaacattggcatatatgggtgatgcagtacttgatcaacatgtgcgtgaatatatcgtgctaaaattacaaagtaaacctcctcgtttgcaccaagtatcgaaaagttacgtttcagcgaaaagtcaagctaagactttagagtatttgttagatattgactggtttacagaggaagagctaagtgttttaaaacgaggacgtaacgctaaaagttatacaaaagctaaaaatactgacattcaaacttatcgtaaaagttcagcgttagaagctgttatcggatttttatatttagaccatcaatcagaacgattagaaaacttattagaaacaattgttaggatagtggatgaaaggtagtgtgaatgtggaagatatagtgatagtaggtagacacgcagttaaagaagcaattatatcaggtcacgccataaataagattttgattcaagacggtataaaaaagcaacaaattaacgacattttaaaaaatgcaaaatcacaaaaattaattgtacaaacggtaccaaaatctaaattagattttttagcaaatgcacctcaccagggtgtggctgctttagtagccccatatgaatatgcaaacttcgatgaatttttacaaaaacaaaagaaaaaagcccgttattcaactgttatcattttagatggtttagaagacccgcataatcttggctctatattaagaacagcagatgcttctggtgttgatgcggttattatacctaaaagacgatcagttgcgctaacacagaccgttgcaaaagcttctacaggagcgattcagcatgttccggttataagggttactaatctttcgaaaactatcgacgaattaaaagacaacggcttttggattgcggggacagaagctaataatgcaacggattatagagatttacaagcagatatgtcactaggtattgtaataggtagtgaggggcaaggtatgagtcgtttagtgagtgataagtgtgattttcatattaagattccaatggttggacatgtcaatagcttgaacgcgtctgtggctgcaagtttaatgatgtatgaagtatatcgtaaacgtcatcagttagaggaaaagtcatgaagaaaagatacttaattatagatggttacaatatgattggccaatcctcaacacttagcactgttgctaaagagaatttagaagaagctagagagcaattattagacacaattgccaactacaatgcattaatagcagatgaaattgtctgtgtatttgatgcctatgaacagtcagggatagaaagggaatacttctatcatggtgtcaaaacaatctttactaaagaaaaagaaactgcagatagttttatagaacgctacgtgtatgaattatataataaacacacgacacacattaccgttgtaacaagtgatatgagtgaacaacatgctatttttggttcaggtgcatatcgtatttcttcaagagaaatgtggcgtgaattaaaagaaaatgaggttgttgttaacaagtcacttgatgattttagcgaaaagaaaccaagaattagaattccgttatctaatgagatacttgaagaatttgaaaagattagacgtggcaatcagaaaaaagactaattttgctctgttgtgattttagatagatttcatataaactaatttcaacttactcgaaaggttagatatatgaatctgaataaacagcaacatgaatatacagcactgtgtctatcgcaaacagaaaataaatcttctgaagaactatttgagtctttaatagaagagctaaagccactgatttacaataaaataaggtatatctcccataataagtatgacattgaagacatgtatcaagagattgttattaaattctaccgtgccttgcaaaaattcgactatcaacaaggtgtaccaatagaacactatatttattttttaattcgttcggttaaatatgactatcttagaaaagtaaaagcgaattataaacgtcaacctctacttgttaatgaatacattgttgaatataacgctactttggcattaaacgatatagaaagatcgataattagaaaagaattaacattagcttttaaaagaagcgaagtcaaactcagtcgaatggaaagacgtatcattcgattactacttaatgattacaagccaaaggagattgctatggttttaaatttggaatccaaagttgtttataatgcgattcaacgtagtaaatgtaaacttaaaagaagttttgaataagaaaataatatgcaaatagtatactgtatggtgaggaaattatagcgtggcgcataagtttgacatttaatacaatacttatgtatagtatattggtattataatgagtaaaggtgaata

SEQ ID NO: 3835 - DNA, 3319 bp, Artificial Sequence
  Description of Artificial Sequence: synthetic nucleic acid sequence
gagtatgtaatgcatctttgtcaccttctgagtatatagctactgtttgaatacctaaatcgtgtgccgctcttattattcttactgcgatttcaccacgattagcgattaaaatctttttcattatttcaccttaaataacggctggccatactctaccatttgtccgtcttctactaaaatttctatgatttcacctgttgtttcggcttgaatctcattaaataatttcatagcttctaatatacaaacagtactttcattcgtaactttatctccaacttgaacgtatgcttcttcatctggtgaaggtgatttataaaatgtaccaaccattggtgcattaatggtattgtattcattatcactactttgttcatctttagagctatgtgatggcttttgttgtgtttcattatgcgtatgatttatcggttgagttggttgttgagtaacttgcggtgtaactatttcagtctctttttctttttttaaattaactacgctacctttattatcttcaatatttatttcagttaaactagattgatcaagaatttcgattaattcttttatttctttaaagttcatttcttactgactccttaggtttgttttcatctacccatctattttacttgagtaaaagattcaattcaagcatgttcattaaacatcaaaacgtcggtatttatttaaatattttagagattgactaaaagcataaaaaagacactcgtttcgttttattttttgtattttaacgaaacggtgttttaaaagttactttgctgaattgtacactctgtatatcaactcgatattttagataagttaccatttataaatcaaatgatttcagttaatatttctatacctttttctaattgttttttagtgatggtcaatggcggtaataacctaatcacatttttaccagctgttaaaatgattaaccccatacgtttagcttctcgcactacttgactaggatcattagtgacctctattcctaccattaaacctacaccacgtacttcaattacatttcttttatttactaaactttttcttaagttttcaataagaaattgcccctttgattgaacatcattcagcaaatcagcatcattaatgatagaaagcgtttggtttgcagcagccaatgataatctatttccaccgaatgttgtaccatgagaaccgtagccaaatgcatgacctaaattttttttgcctaacattgctccaataggaaggccattacctaatcctttagctaatgtgatgatatctggagacaattgataatgttcatgagcatataacttaccggttctacctatgcccgtttgaacctcgtctacaattataaggatatctttttgtttacaatactcatttaattgcttcataaataaagaatcagcaggtagtactcctgattcaccttgaattatttctataattacagcagcagtattatttgaagttaatgatttaaatgaattaaaatcattaaaaatagcaaatttgaatccaggaacaaccggaccaaattgatctgtaattttcttctgtcctgttgcagacattgcgccgtacgttctgccgtgaaaagactttttaaaagcaataatttccgacttaccagtagctttacgtgcgagtttgatagctgcctcattcgcttctgttccgctattacaaaagaaagctaaataatctcgttgaccaattaatttttgagccacttcctcttggatactacttaggtataaattgggtgaatgccatattaaattcagttgattataaactgcttggtaaatttccatattaaaacccagatttgtcacacctatacctgacgaaaaatctaggtagacattattatctttatcaattaattcattttgattagcatcaacaaactctatattgtcacgcttgtaattattaaaaagataactcatcattaatcaccccttatgattgttcctttttgtaaattatttgcaattaaaatcgattcaacaccagattctaatgtttggattgcactctcaattttaggtatcattccgcctgtaattattttattttcaatttttgtttttgcttcattaattgtaagagtagcaagcgttttatctttttcaattacaccagggacatcagtcatatatactaatttttcgacttttagtttcttagcaattgcggtggcgagatgatcagcattaacattaagatactccccttgctcatttacacccaaactagtgataattggtattatgtcgcgtgataacattttttctaatagcatcgtgttgatttctttaactttaccaacgtaaccatagatatttttatttaaaaattcggcgcttacaagttcttttatcttttctttaaattgaaaaaattctaaattagattctttaagtctttctaaaagttgatggccaactatgttaattaaagcatcatatatgataggtaaatcatttttagcagttactctcatgccatcaattttaatagttgaatgattgtttttagttaataaattactgatgacttggccgccaccgtgaacaataattatttttttgttttcaaggtgccaagcattaatttgttgtataaatgcgtcgtttaaattttctatagctataccaccgagcttaattacgatgatgtttttcatatgttcctcctaagtggtgtatagtgcgttgattttaacgtagtcatacgataaatcacatccccatgcttgaccttcacaattcccttgatgaaggtcaagctgaattgatatttcttcagcactcattatttcttgaatttcttctttatcgtactttactggtgaggatcttattaatacaggtatcctacctataaaaatgtctacctgattaatatcaaaatatgttttagcataacctgcagcagcaataattctaccccaattaggatcttcgccaaaaattgcggtttttactaaacttgaacccaccacacttttagcaatcattcttgcagcactagattcttttgcacctttaaccgtgacttctattaatttagaagcaccttcgccatcccttgcaatactttttgctaaatcggtcataatatatagaagcatctgcttaaatttatagtagtcttcgctgtcttttttaatttcgttattatttgtacatccatttgacatcacaagcaccatatcatttgttgaagtgtcaccatctacagtgatttgattgaatgtaacttcaaccacatcttttaaagcctgttg

SEQ ID NO: 3836 - DNA, 3519 bp, Artificial Sequence
  Description of Artificial Sequence: synthetic nucleic acid sequence
aaaccaccaactgaaaatttaataattgctaacttcatttttaatcctccaatttaaatatgtctgactaagaaaatcgcaacagaaatcacaaaccagcaaagaattgcaaatactgttccacttctataatttttcttaccaataaaaattgaagtaaagaacacagttacaatacatgagacaatcccaacaattgctcctgtacttaaatgaattgacatttgaataagttgctgtcctttatggtctatagctaacgctataatagctgcaaggtagactgccggcatagtggcaataataccacctaattttcctcctactttatcagccataattgatgcaagtgcaacagcaaatcctccgataacgaaatgtagtatagcactagaaattgatataccaaacacaataacccttctcatccatatttattaaacgaaacgtatcgtttacttttagtttatagcgtaaatcaattgttgtaaatatattgtttaaatcacctaattttctaaataatgataatttttgtttcacgtaaaacattttaaagtcactttttcatcatttaaaatattatacgtttatctaatataaccgctctttcattgagtgacgcaatacaagttttctttgctatggttaagatgttattaggtacatttaatatgattattaatgttgatatttgctatttggatattttattgcacagaattttcaccgttatactattaaagataatgcactgtaatacgataaaaagagcctaatacatcatcaaaatatgtaccagactcttataattatttcttatatatctttattttaatttcataataatcttcatgttctttatctttttgttcaacgcgtatacctgatttttctatcgtttcaatactcttacctagttcttcttttgcttgtgttacatcttgagaaaattggaaagtctgcgcttttactttctctggtccagttttctgacgtactctatcctcagtttgtttcacattcaacttctgactaataacttgctcgattaattcttcttgtgtttcatcaggtaatactaataccgctcgtgcatgtctttctgtaatcttaccttcacgtaatctcttaatcacattgggtgctaacttcaataatctaagtttattagcaatgaagctttggctcttgcctagactttttgctaattcattttgagtcgttcccccgatttcaagtaactttttataagcttccgcttcttcgacgacagataagttttcacgttgaatattttcaatcaatgcaactaccgctgtttcttcatcatccatatctcgaacaatgacatctacttgaggtttatgcaacgactgtaatgctcgaaatcgtcgttcgccggctataatttcgaacatatcttcttcaattggacgtacaactataggctgtaataatccatgctcttcaatagactctgctaattctttaatcttatttggctcaaatacttgtctaggttgataacgattgggtacgatacgttcaatatgaatggattctacattattattacgttcttcttcagtataaccaatgatgtcatctttattttttaaaccaaataattttgaaaaaggtttcttcattatccattctctccctctcaattatttatcatactatgatgtcttaactttcaactaatggagatttgtttggcgtacctggttttcttgggtatttttttgatgtctgtctacgtttatcaataataatcatttgtcgctcaccggcattttcaggtaattcaaaagtataagtctctttcacattaccacctaaaatgttaatagcaaacgtcgcttcttgcaattcttctttaccttttgatgatttaagtgcaaggaactgtccacctttatttactaaaggtaagcacaactcacttaagacagtcaatctcgctactgcacgagctgtaacaatatcataagactccctgtagacacccttgccatatgtttctgctcgatcatgcacaaaactaacatcttcaagacctagttctgcagctaaatgatttagaaattgtattcttttatttagagaatctacaatcgttactttcaattcagggtatactatctttaaaggtatacttggaaaacctgcaccagcaccgatatcacaaagacttaattgaccgttaaaatcataatagaaactaggcgctattgaatcatagaaatgttttaaataaacatcatgttcatcagtaatacttgtcaaattcatttttttgttccattcaacaagtaatttataatatttttgaaattgctctttttgcgtattagatagttctatgccttgctcgcttaatttctctgataaccattcaatactcattattgtttcaccctttgaagtttaccttgttctaaataaacaagtagaattgagatatctgctggattcacacctgaaattcgtgaagcctgtgcaatatttaatggtttaacttcagctaacttttcgcgtgcttcagatgctaaactatctaccttgctataatctaaatcctcaggaatttttttcgcttccattcttttaactttttctacttgttgtaaagatttattgatataaccttcatattttgtttgaatttcaacttgttcctcaaccgcttcaggaagttgatgtgattcttctaagatttctaaaattgtttcgtagttcatttcgggacgacgtaataaatcaatcgctaatatgccatcttttaatcttgaaccacccttagcttcaataattgcttgcgtatgttcatttggtttaatacgtacatcggtaagtcgttgtatttcatctttgatttgttgacgcttttcattaaatcttgcatagcgttcttctgatattaaacctaattcataccccatatcagtaagacgtaaatcagcattatcatgacgtagtaataatcgatattccgcacgtgaagttaataatcgatacggttcatttgtacccttagtgactaaatcatctataagtacaccaatatatgcgtctgaacggctgagtattttttcacctgtacctaaaacattaccagcagcgttaatacctgccatgattccttgtcccgctgcttcttcatatcctgatgttccattaatctgacctgcagtatacaagtttttaatcgcttttgtttctaacgttggccataattgagtaggcacgattgcatcatattcaatagcataacccgcacgcatcatatctgctttttcaagacctggaatggtttctaacatttgacgttgaacatgttcaggtaaactagtagataatccttgcacgtatacctcattcgtattacgtccttcaggttctaagaaaagttgatgtcttggtttatcgttaaagcggacaaatttatcctcaattgatggacaatatctaggacctgtacctttaatcataccggaatacatagcagat

SEQ ID NO: 3837 - DNA, 3188 bp, Artificial Sequence
  Description of Artificial Sequence: synthetic nucleic acid sequence
ttcagtgtaagcaagtatcgtatcttcaggtaatccttcttctccatattgtttagctatcgcactacctgtaattacacctacatctcgctgttcattattaacaacataatttccggtaaaagagtgcccgttttcaatactatagcgtgcgtctgggtacagataattcaaatcgaatccttcatcaagatgatggttttgtgatatctctttcgtattaaccccgtcaaattgttctattaaacgttctatttgaagcgaagctgctttactatttggtttcaattgcgtcgaacgttgaagaagatctgttcttcctactaactcttctactgtttctaaaccaagtgaagccaaaatttcacgtaattcttcagctataaaatacataaagttaactacatgctgtgccttacctctaaacaaagctcttaaatctttgttttgtgttgcaacccctactggacacgtatcgttatgacaaaccctcatcataatacaccccaaaacaacaagtggtgctgttgcgaaaccaaattcttctgcaccaagcgcacaagcataagctacatctttacccgtcagtaacttaccatccgtttctaattttacgcgactacgcaaatcatttaatttaagtgtttgatgtgtttcggcaaggcctatctcccatggcaaacctgcatgttgaatacttgttttaggcgatgcacctgtacctccatcataaccacttataacaattttatcggcgaaagctttagctacccctgaagctatagttccaacgccagtttttgatacaagcttaactgcaatatcagctcttctatttgcattttttaaatcatgaatgagctgtgctaagtcctcaattgaataaatatcatggtgtggtggtggtgaaattaatcctatacctggtgtcgaacctctagtctcagcaatccatggatatacttttgaacctggtagttgtccaccttcccctggtttagcgccttgtgcgactttaatttgaatttcttttgcatgttgcaagtaatcactcgtcaccccaaaacgacctgatgcaacttgcttaatcgcacttatcttattacttccatccttttgaatttcgtaacgtgaagaatcttctccaccttctccactattacttttacctccaatttgattcatagcttgagccaacgtctcatgtgcctctgctgagatagagccgtaactcattgctcctgtattaaaacgttttacgatttcacttgctggttcaacacgactaatatcaatagattggcgtgtcttgaattctaataaatgtctaatatgatccgtacgttttaaatttacagttttggagaattttttaaataactcgtaatcattttctctacatgcatgctgcaataaaaaaatcgtacgaggattaaatgcatgatgctgaccttgctgtctccattggaatacacttccggattcaagataatcagaatcatcactttgtctcgctttattctctttgtctatttgttcaatacttataccagataattttgactgtgtacctgtaaaatatttttcaatgacgctattcgataaacctaccgcttcaaatatctgtgctccttgataactttgtacagtagaaatgcccattttagccatcactttaataacgccttctgacaatacattggtatacgtagcaacattttcagcgacagttcctgaaagttgaccttgacgcgttaattgttcaatcgttcgttgcgctaaatatggaactacagcgtttgcaccataaccaagtaaacatgcaacgtgatgaacttctcgtgtttcaccggactgcgcaatgaggctggtctccattcttaatccttctcgaattaataattgatgcacgtgacttaacgctaataaaattggcattgcataactattttcgtgagttaaagacgtatcgtctaacaccaaaattttcgcaccttcatgtacagcctgtattgctcggttccctagttcatttaagctactttccaaatcacctgtataaagtgtagataaatacgttacattaaaatacgaatgatcgattgatgataattgcgcttcatttaaaactggtttttttaattgaattctttctaaaactgattcatcaggacataagaggttcccttctgaacctaaatatgaaagttcactagttacaatcttttctcgataagcatcgatgggtggattggtaacttgtgcaaataattgtttaaaataattaaatagtgactcaggcttatcattaagaactgcaataggtgcatcatatcccatcgctccgatgggatcttttttattgatgactaaatctgtcatatatttattgatatcttctttagtgtaagcaaattgtttctgtaagcggaagagtgtttgatcatcccagtcggaagattggtaataaatattatctaaatcatttttatttttataatcttttagccattgttcgtagggcaactcattagcaatattagtttttagctcattattttctacaaccttattttgcaaaaagtctacaagtaataactttccaggattaagttgtcctttaaatgctacattttcttctggaacatcaatgacacctacttcggaagaaaaaacaataaaattgtctttagttattgtataacgcccaggtcttaatccatttctatcagtcaatgcacctatcttatctccattgcaaaaggaaatcatagttggtccatcccatggctccattaaataactataaaattcatagaaagagcgaacttttttatcgttagattcattgtataaccatggctctggaattaataacatcgctgctttttcaggctccattgctaatgataagaactctaacgcattatcaactattgatgagtcactaccatcttcatcaacaataaaatgcaccttatctttctcatcttcaaataatgtttcaactagtttattttggcgtgctcgcatccagtttacgttacccttaatggtattaatttcaccattgtgcataagcatgcgattgggatgtgcacgtttccaacttggaaatgtattagtactaaagcgggagtgtacaagtcctaattttgattgatatgcctcattttgtaggtctaaat

SEQ ID NO: 3838 - DNA, 3094 bp, Artificial Sequence
  Description of Artificial Sequence: synthetic nucleic acid sequence
tagatgaaacaggcatagacattcaatttaaaaattcaggacttatcaaaattgctaatgaacacgatgatatctcatctataaaacgacaatatcaatttctgaatagtcaagaccgtagtgtcaaacaattatcagatgatgatttgctacaacttacacatggtgaagttaaaccttcatacgcggccattcacataccacacgatggtcaaattaatgcacatcattacacactggcattattagaatcaatgaagttaagagatattaagcgttatgagtctacagaggtcacttcaatagaacggcataatggctattattcagtgaaaaccgatcaatcttcaacaattgaagcgcacaaaattatcgttgcaggtggcgcatggtcttcgcaattattaacacaatatcatctacaacgacaagtgattggcgttaaaggtgaagttatcttattagaaaataacgatctttcacttactgagacattatttatgactaatggttgttacatcgttccaaaacaacccaatcgttttttaattggtgcgacgagtgaatttaataattattctgtcggtactacagatgaaggtatggattggcttcttcgccatgcatatcatcgtgtacctcaactaaaagacagtcatatactgaagaaatggtcaggagtaagaccatacacagaaaaagaaatgccagtcatggatcaaattgatgatggcttatacgtgataagtggtcattatcgaaacggaatattattgtcacctattatcggtcgtgacattgccaattggctactttctggtattaaaccatcacgttattcaagttttacagttacaaggaggaataatcatgaagtgtatcattaatggcgacctcttcactttcgatcagaatcaatcgatacaagaggttttacattcacttgaattagacccaaaacgagtgattgttgaactaaacaaagaacttatcaagcaagacaaatatgaagaatatactgtaagagaagacgacagattagaattactagaaattgttggaggcggttaatatgtttaaaataggaaatttagaattacaatctcgtttacttttaggtactggaaaatttgaaaatgaagaggttcagtcaaaagcaattgaggcatctgaaacaaatgtacttacatttgcagtaagacgtatgaatttatatgatcgtaacctacctaacccacttgcaaacgttaatttaaaagattttatcacttttccaaatactgcaggtgccaaaacagctcaagaagctatcagaattgctgaaattgctaatcacgcaggtgtatgtgacatgattaaagtcgaagtcattggtgatgacgaaacattattacctgatccattcgaaacatacgaggcatgcaaagtattgttagaaaaaggttacactgtttgtccttacatctctaacgatttagttttagctcaacgtttagaagaattgggtgtacacgcagttatgccacttgcatcccctattggtacaggaagaggtattaataacccattaaatttaagttatattatcgaaaatgctagtgtacctgtaatcgtagatgctggtattggttcccctaaagatgcgtgtcatgccatggagcttggcgcagatggtattttactcaacacagccatttcagcggcaaaagatcctgtgaaaatggctgaagcaatgaaattaggtataaatgctggcagactttcatatgaagctggacgcattcctgttaagtatactgcacaagcatctagtccatcagaaggtttagggttcttgtaaaatgtcgcgttatgaacgtcaaacacggtaatgtttttagagtatggtcacgattaaacaatgactatcgtgatataaagttacagtccactcgaaaagcattcgaacaagaattacacccgtatgtgttgaaggatgcgggaacatttaatcaagcaatgatggagctaggggcgttagtatgtacgccaaaatcaccattgtgtttgttttgtcctattcaagaacactgtgaggcatttcatatggggactacacaagaattaccagtaaaaaccaaaagtttaaataagaaaaccattgagcaaaaagtttttcttattcgtaatgataatggtcaatatttacttgaaaagcgtaaagaaaaacttcttaatggtatgtggcaatttccaatgagagaacaaacaaatgcaaacgatgtgatatctgatgatttaggaaaaagtatcgaaacaattaacgaaccagtatttaaattaaagcatcaatttacccatcttacatgggaaattaaagtatacaatgttacagcacctcttaatataaaggaaaatgatttacctaaacaaatgacgtggtttaatttagatgatagggagcagtatatatttcccgtaccaatggataaaatatataagtttattgaaggttaatttataaacatcaatctcaaatgccacttataaatgataggttaatcaagcatattaaaatatgatataatctaaatggttaaatacgataaaggtggtgtggagtatggtaaaggaatccatacctaaagaaggagaaaacattaagattcaaagttataaacatgatggtaatattcatcgtgtctggtcagaaaccacaattttaaagggaacggaacatgtgattattggtggtaatgatcacactttagtaactgaaagtgatgagcgtacatggattactcgagaaccagcaattgtgtactttcattctgaatattggtttaatgttatttgtatgtttagagaagatggtatttattattattgtaatttatcttcgccttttgcatgtgacgaagaagcgttaaaatatattgattatgatttagatatcaaagtttatccgaacggaaaatatcatttacttgatgaagatgagtacgagcaacatatgaaccaaatgaattatccacacgatatcgatattattttaagaagaaatgttgatattttacaacaatggatagaacaaaaaaaggggccttttgctcct

SEQ ID NO: 3839 - DNA, 3264 bp, Artificial Sequence
  Description of Artificial Sequence: synthetic nucleic acid sequence
tatacatgaagtttcaatctggcttagatgtatcaacacagcatagagcacaaagtggtagatatagttataagatgaagcatttatattatttaagaatctctacattacctttatcattaggcaatgaaagttgtgtaattcgtatagtacctcaatacttccaaactacacgagaatcatatgaatttaaagattttaaacactttatgaaaaagaaacaaggtctacttttgtttagtggaccaactggctctggcaaaagtactttaatgtaccaaatggtcctttatgcacatcaaaaattgaatttaaatgtaatatcagttgaagatccagttgagcaaatacttaatggaatcacacaaatatcagtcaatgaaaaggcaggtataaattatgaaagctctttcaaagccattttaaggtgtgatccagatgtaattttaattggtgaaatcagagattctaccgtagctaaatacgtgattcaagccagtttaagcgggcatttagttttgtcgacaatgcacgcgaatgattgcaagggagcactattacgattattagaaatgggtatttctgtccaagagttgtgccaggcaatcaatttaatttctaatcaaagattaatcactactactacaaattatcgtcaactagtatcggaattaatgtttcaaagccaaataaattatttttttgaacataatcattctttacctaaaaatttcacaaaattagctacacatttaaacaaaatgtctaaagaaggtgttatatgtgaagaagttgtcgataaatacatttaaatataagaggaataaatatcttactgaaatacaatcaatagacttactacagagattacaacagcttttaagtcacggattcactttatatcaaagttttaaatttttaaactcctattttaaatataaagagcgaacaataaataaaaagattatccaacatctacaaaacggtgctacatgttatgatattttaaaaataatagggtatccagaattagttcttcttcaaataaaatttgctgaaaactacggcaacattgaggaggctctcgttgatactgttcaatatatgaaaagaaatctgaaagctaaaaaacgactcatcaaaaccttacaatatcctgttgcattaatttctatcttcttattcatattaaccattttaaatataactgtcatacctcaatttcaacaactttatgagactatgaatgttaaattatcaacatttcaaaatctactaactcttattattacccgtcttcccaaactaactttcatttttatctttattagtggtatagcattttttatcacttataaattctactattatctaccaattgagaaaaagttaaaatctattttaaaaatcccaatgattaatacgtattataaaatatatagaacttatcaactttccaatcaactttctttattttacagaaatggtacaagtcttcaacaaattgtccgtatatatcgtaatgagcaagataacgattttcttaaatttctgggtgattatctttttaaagaagctaataaagggctcccgttacctgttatattaatgaatttaaaatgttttcaaaatgatttgattaaattcatagaacaaggagagaaaaatgggaaattagatatagaattaaagttatacagtcaaatgctattacagcaatttgaagaaaaagtgttaaaacaaacaaaatttatacaacctatcatcttctttatcttgggaatttttattgtatctttatacttagtcattatgcttcctatgtttgaacttatgcaaacaataaaataatttgaggagtgacatcaatgaaaacattgaaaaggatttgaaacggaacgagaaagttgatttcttaaccaaagaaatcgaaagacgcacaactcaattacaaaaagaacttaatgaaatttcacatagtttaaagaaatagagtgatatagatatcattactgttgaggaacgtcgtacaattaaatgatttgtatagacgttctttcttttagattataattaagcgtttacattaaggtggataattatttttctagagcaaataattttgttttaatgtatggaatagaaaacgattttgtattacggtgttttaacgtttgataataaaaataagggatgatataaatgtataaacttttgcaacatttgggtaggtctctcatgttacctgtagcagttctgccagcagccgcaattattgtaggcataggtcatgttttagatgctttaaatatacttcctcaagctgcactctttttcacaagtgttgggaccactatattagagcaattaggtatattatttgctattggtgtagctatcggtatggctaagaagaatgatggcgcagtagcattagcggcagcgttaggattttttatagttacagtagtactatctccagaaaaattagcaactttgttacaaattaaagaatctaaaattgatttagcattcagtcaaatgaataatggaaatgtgtttgtagggattattataggtttgattgctgcatatagttataacaaatttagtgaaacgaatttacctatggccttatcattcttcagtgggaaacgacttgttccaatcatgacagcattcttttgtacaattttagcgattattttattattgatttggcctccagtttataatgggatagttacttttggtaagtggattgttggtatgggtccattcggtgcattattatatggtttttttaatagattgttaatacctactgggttgcatcatgcgctcaataatgtattttggtttgatactgctggaataaatgacataggtaaatttcaaagtggtaaaaatgccattaagggaattactggcagataccaagcaggatttttccctgttatgatgtttggtgtaccggcagcagctttggcgatgtatcatactgcaaagacgaatcaaaaaaaacaagtttatgcttggtttttagcaagttcagtttcggcattctttgtgggtgtaactgaacccatagagtttgcattcatgtttgtagctccagttttatttgttattcatgctgttttaactggattatcattatttatagcagcaatgtttcattggacagcaggattttcatttagtgcaggtcttatagattatgtgctttcattggttaatccgatatctaatcaaccttggatt

SEQ ID NO: 3840 - DNA, 3014 bp, Artificial Sequence
  Description of Artificial Sequence: synthetic nucleic acid sequence
acgtttggcattaatcatttataaaaagaagcgaagtagtttttatcgcttctttttttatatgtataattatattaatttcgtttgtagatgatctcatcttcatgatcgattgcatctacagttagtttttcatcttgaaaataccataaatctttttccgcaataacgacatttatttcatagaatgtttgttcaaaacctatatcaatagcatctttattttctacggtgaacgctggactaaatccttgttttaattggaattctcctccatattttacataaaattgaagaactttattgcttataggtaaatccaattcgtttttaaaccattctactgccttttgagttaattttatattcatagtgttatcaccttacttttttaaatttttatttatctaaattttaaaggcatgatagcataatacattggatatgctcttttattgtaatcgagtaaatataaattcatggaaaataatgaatcttttcaaaattttaagtctttattttattttggcaattaagttattaatcgctaatatattaataatgcctggaacattgatttgaagtcccaggctctaagcaattagaaatttgagttacatccatttaattttaggttcttctcctttaaaaattctaactatattagatttgtgtcgaattattaatatgattgaaacaattccgctaacagcaagtaaaatataatcatgaatgatgattgaaccaatcacacaactaattgctgcaatgatacttgataaagaaacatatttaaagatttttaatacactaaaaaagataattgccaagataagaagtaaaataggattgacacctaatacaactcctgcactggtagctactgcttttccgccattaaatttcagatatattggatacacgtgaccgagtattgcaaacaatcctactattaaaccatttgtaaagaaggtgcttataacaccatccgcatgaactgggaaccatagtggaaaaaagactgtaataaatcccttgaaaatatctaaaaacgtaactataaatccagctggtcttccaagaacacgaaaactgttagttgctccagtatttccactaccgtattgtcttatatcttttttaaaaaataatttaccaataattaacccgcttgggaatgcaccaatcagataactcaagattaacatgacgatgatcatcataaaaacttacacatcctttagaaacttagcttcattctaccacactcaatattaattagaacattgttaatttaatttaattcaataaagttactcaaacaacttagtaatttaaatgacacttgcaatttaggtgaatttatataagaataactattgtatagttttaataacgaacgtacgtttgtaggagggcgaaatcattggcaatgaataaacaaaataattattcagatgattcaattcaggtacttgaaggactagaagcagttaggaagagacctggtatgtacattggatcaactgataaacgaggattacatcatcttgtatatgaagttgtcgataactccgtcgatgaagtattaaatggttatggtgatgcgattacagtaacaattaatcaggatggtagtatttctatagaagataatggtcgaggtatgccaacaggtatacatgcgtctggcaaacctactgcagaagttatatttactgttttacatgctggaggtaaatttggacaaggaggttataaaacatctggaggtctccatggggtgggtgcttctgtagtaaatgcccttagtgaatggcttgaagttgaaattcatagagatggtaatatctacacacaaaatttcaaaaatggtggtattccagcgacaggtttagtaaaaactggaaaaacaaaaaaaactggtactaaagttacatttaaaccagactcagaaatatttaagtcaacgacgacttttaattttgatattttaagtgagcgtttacaagaatctgcatttttacttaaagatttaaaaattacacttactgatttacgtagtggaaaagaacgagaagaaatttaccattacgaagaaggaattaaagaatttgttagttatgtcaatgaaggtaaagaagtattacatgatgttactacatttgcagggcattccaatggaatagaggtagacgtagcattccaatataatgttcagtactctgagagcatattaagttttgtaaataatgttcgtacaaaggacggaggtactcatgaagttggtttcaaaacggcgatgactcgtgtttttaatgaatatgcacgtcgtataaacgaactgaaagataaagataaaaatttagacggtaatgatatacgcgaaggtttaacagcgataatttcagtacgtataccagaagaacttcttcaatttgaagggcaaacgaaatcaaaacttggcacttcagaagcaaggagtgctgtagactctgttgtttcagaaaaattaccatattacttagaagaaaagggccaattatctaaatcattagttaaaaaagcaattaaagctcaacaagcacgcgaggctgctcgtaaagctagagaagatgcacgctccggaaagaaaaataaacgtaaagatacattgttatcaggtaagttaactcctgcgcaaagtaaaaatactgataaaaacgagttatatctagttgagggtgattcagcgggaggttctgcaaaattgggacgcgaccgtaaattccaagctattttacctcttcgtggaaaggttattaatacagaaaaggcacgtttagaggatatttttaaaaatgaagaaattaatacgattattcatactattggtgctggtgttggtactgactttaaaattgaggatagtaattacaacagaattattatcatgacagatgctgatacggatggtgcacatattcaagtattattgcttacatttttctttaaatatatgaaaccacttgttc

SEQ ID NO: 3841 - DNA, 4140 bp, Artificial Sequence
  Description of Artificial Sequence: synthetic nucleic acid sequence
cgtaacaattttatttattgctagtgcttggtcaggtttaagcaagggaattcaatatttaagtaatttaaatataggtcttggtacgatattaatgattgtaaccttaattgttggaccaactgttttaatcttaaatatgatgacaagttctacgggtagcttattaaattcattcttatttaacagttttgatactgctgcgttaaacggtcaaaagcgtgattggatgtcaacttggacattatactattggggttggtggctaagttggagtccattcgttggtgtattcatcgcacgtgtatctaaaggacgttctataagagaatttatttcaggtgttttattagtaccggcacttgttagctttatatggttcagtgttttcggcgtattaggcattgaagctggtaaaaaagattcgggtctctttaaaatgtcacctgaaacacagttatttggtgtattcaaccatattccgttaggtattgttttatctatcattgcattattgcttatcgcttctttctttgttacttcagctgactcagcaacattcgtattaggtatgcaaactacatttggatcattaaatccaagtagtctagttaaagtaacctggggagttgcgcaagcacttattgcctttgtactattattagctggtggaggagatggctctaaagccttgaatgctattcaaagtgctgccattataagtgccttcccattctcattcgtcgtcataatgatgatgataagtttctacaaagatgcaaataaggaacgtaaattccttggattaacacttacgccaaataaacatcgcttacaagaatatgttaaatatcaacaagaagattatgaaacagatattcttgaaaaaagagaagttagaagaaataaagaaaaagaagaatagtgtgtaattgctttattaacctgagacaaacaaaattgtctcaggtttttttaataaaaatcattaatgtctcacaactaaaattttattatcatatctgcagatagatacagtatcaaattgatatcatttcatttttgagtgcatacgcttataagttttagtcattcaatatgtatgaagaaaccgaatagtagtttgagatttaaaatgatgttcattattgataaccattctcaattaataacattttcttattgcacaaatattttaagataagtttttcttatataaactgattacaaaagcgaaatgaaaataaagcgttttctaacggtacatagttgttttgataaacatataataatacaatttaattaacggcatataaatatatataaatatcaagggggatataaaatggcttctaatattaaagaacaagcaaagaaacaattcgaattaaatggccaatcatatacttactatgacttacaaacattagaagaaaaagggctagctaaaatttctaaattaccatactcaattcgcgtattgttagaatctgtgttacgacaagaggatgattttgttataacagatgatcatatcaaagcattaagtaaattcggaaatgcaggtaacgaaggtgaagttccattcaaaccttctagagttattttacaagactttacaggtgtgccagcagtagtagatttggcttctttacgtaaagctatgaatgatgttggtggagatattaataaaatcaacccagaagtacctgtggatttagttatcgaccattcagttcaagttgatagttacgctaatccagaagcattagaacgtaatatgaaattagaatttgaacgtaactatgaacgttatcaatttttaaactgggcaacaaaagcttttgataactataatgcagtacctcctgctacaggtattgtccatcaagtaaacttagagtatttagcaaatgtagtacatgtaagagatgttgatggtgaaaaaacagcatttcctgacactttagtaggtactgattcacatactacaatgattaatggtattggtgttctaggttggggcgttggtggtatcgaagccgaagcaggtatgttaggacaaccatcatatttcccaattcctgaagttatcggagtgcgtttaactcactctttaccacaaggctcaacagctacggatttagctttacgtgtgactgaagaattacgtaaaaaaggtgtagttggaaaatttgttgaattcttcggtccaggtgttcaacatttaccattagcagacagagctacaattgctaacatggctccagaatatggtgcaacgtgtggtttcttcccagtagatgaagaatcattgaaatatatgaaacttacaggccgtgacgaagaacatattgaattggttaaagaatatttacaacaaaaccatatgttctttgatgtagaaaaagaggatcctgaatatacagatgttattgatttagacttatctacagtagaggcatcactttctggtccaaagcgtccacaagacttaattttcttaagtgatatgaaaaaagaatttgaaaaatcagtaactgctcctgctggtaatcaaggacatggacttgatcaaagtgaatttgataaaaaagcagaaattaattttaatgatggatctaaagcaacaatgaaaacaggagatatagcaattgctgctattacctcatgtactaacacttctaatccatatgttatgttaggtgctggtttagttgctaaaaaagctgtagaaaaaggattgaaagtaccagagtttgttaagacgtcacttgctccaggttcaaaagttgttacaggatatttaagagattctggattacaacagtatttagatgatttaggtttcaatcttgttggttatggttgtactacatgtattggtaactcagggccactattacctgaaattgaaaaggcagttgcggatgaagatttattagtaacttcagttttatcaggtaatcgtaattttgaggggcgaatccatccattagtgaaagcaaactatttagcctcaccacaacttgttgtagcttatgcgcttgctggtacagtagatattgatttacaaaatgaaccaattggtaaaggtaaagatggtaaagatgtatatttacaagacatttggccttcaatacaagaagtttctgatactgtagataaagttgttacacctgaactattcttagaagaatataaaaatgtatatcataacaatgaaatgtggaatgaaatagatgtaaccgatgaaccattatatgatttcgatcctaattcaacatatattcaaaatccaacatttttccaaggattatctaaagagccgggtaaaattgaaccacttaaaagtttgagagttatgggtaaatttggtgattctgttacaacagaccatatttctccagcaggtgctatcggtaaagatacaccagcaggaaaatacttattagatcatgatgttgcaattcgcaactttaactcttatggttcccgtcgcggtaaccacgaagttatggtacgtggtacatttgccaatattcgtatcaaaaaccaacttgctccaggtactgaaggcggatttacaacatattggcctaccggagaaataatgcctatatatgatgcagcaatgaaatataaagaagatggaactggcttagttgtcttagctggtaatgactatggaatgggatcttctcgtgactgggctgcaaaaggtaccaatttattaggagttaaaactgtcattgcacaaagctatgaacgtattcatcgctctaacttagttatgatgggtgtactaccgcttcaattccaacaaggagaatctgcagaagcactgggtcttgatggaaaagaagaaatatctgtagatattaatgaagatgtacagccacatgatcttgtaaatgtgactgcaaaaaaagaaaatggtgaaatcattaatttcaaagctattgtacgttttgattcactagtagaattagattattatcgtcatggtggtattttacaaatggtactaagaaataaacttgcgcagtaatttaatatgattttgactcactattgagtacaagcagtcatgctaactattgtgttggcatgactgctttatgttatccttaattgaaa

SEQ ID NO: 3842 - DNA, 3137 bp, Artificial Sequence
  Description of Artificial Sequence: synthetic nucleic acid sequence
cagttttaaaaagaaattttatattaataccagcttatattttattacaaagtatcgtaccaatcattgttgttttcggctcattagggatcactgccatgataacacaacaggcaccaccacaatggttgtatcatttttcattaagtttaagttttgtgattgctcaaggtctaatattagttatcttttataaaatgcatcaatctgtaataaatgatgtgatgaagcaacaatggatagttgcaaagaataaaataattaaaattgtaatagttgcgattgtcgtatatttattattacttataatgcgggtgattggaacatcattacctaatcatttaagttatcatctcacgcaatacgaacaacgtacgctagggctatttaaatcaccatatgtgttgttagttacttttatatccatggtattcttacgtccaatggtagaacaaatcatttatagatatctcatcatccatgaattaggaaaagtatggaatagacaatttgtaattggtttgtctattcttattgaaacgatcgtacatgtttacgacatgtcatcgatttttgaaatttttccatatatcgttattgctacggcagctacaatactatatattaaatcgcgggataatttaattgtcgcttatatatttcaagtgattttgcagtgtatcctttttatagaaattttatgtaagtataccaacttttaagaagaaaagtttgaaagtggataacacccatactatttatagatattgttatttttacaccaatcattgaagaacttttatttcgtcatttaatcattcatgaactaggtaaaaaattaacttatggtttgatgtatattgtgtcaatagtgggatttacatattttcattgtactgatgcagtttcaccatttgaagcaggaccttactttattgcagcagtcgtatttgttataggttaccattttagccaccgtaatttagcagtacccattgctttgcatatgattacaaatttaatagcattttaaacagtactgctacttatacgattgcgtttaagtaaactattacttcatattagaacctaacaaccgcaaataaactagttcagataataagtattctagtggtgaaaatttagcagttgctatactagtgcatatgattttaagtgtggttgcatttataagtatgtatacatctataatataagtgagtgattgagtacaataatttaacaggtacaaacttaaatttaataatattaaaatagtcaaaatagggaatagagtttagtaatgtcgatataaggatgtgtttaaattgctacttaaggttgaacatcttacatacaaggttgataatcgtacgattttagatgatattaatttgaatattaataaaggagacacgattgctattgtaggtccttctggaagcggtaagagtactttactcaaacaattgaatcatttaattagtcccacgagtggagatttatatttgaatgatcaatcttactttaattataagccggaagagataagaacacgtgtgagttatttaatgcaacaaagtgagttaatcggttatacaattgaagataatatgaaatttcctgctgaggctagaagtgaagcttttgaccgtgataaagcgaaacaactcatctctcaagtaggattaggtaattatcagttagatgctcaaattgagcacatgtctgggggagagcaacaacgtattaccatcgctagacaactcatgtatgaacctgaagttttattattggacgaagctactagcgctttagatacacataataaaaagaaaattgaagaaattatatttaaactagcagataaagggattgccattttgtggattacgcatagtgatgaccaaagtatgcgtcattttaagcgtagaatcacaattactgacggtaagatatcgagtgatgaggagttgaatggtaatgagtaatacagcactttgtctgacagcacttttattactaatccctatctttatttcttataaagaaggattacatattatcaaagatttagttattgctacaattagagcaaccatacaactattgattttaggctttttattacattatattttcgaaattaatgaaaaatggttattagtgctatgtgtgttagtcattattatcaatgcatcttggaatacaataagtcgtgcttcacctgtcatgcatcatgttttttggatatcatttgtggctatatttgtgggaacagcgctaccattggcagcaactgttgctacaggtgcaattaaatttacagcgaatgaagtgattccaattggaggtatgttagctaataatggtttaatcgcgattaatctcgcttatcagaatttagaaagagcatttgttcaagatgtttctgatattgaatccaaacttacgttagcagcgacacctaagctcgcatcaaaatcagctattagagaaagtatacgcttagcaattgttcctacaattgattctgtaaaaacatatggtctagtttcaattccaggtatgatgacaggattgattatcggaggcgttgacccacttcaagcaattaaatttcaattgcttgtcgtgtttattcatacaacagcgacgattatgtctgcactcattgcaacgtatatgagttacggtcagttctttaatgctcgtcatcaactcattgctagaacgcaacgcacaagacaaagtagttaaatatcgttgttaatctacacagtacagctttaaatattatataataaaacagttataaacgatgataagtttgtagctgttttattttagtcaaaatcaatagttacgttattactttgaaaggggcatctagttgttatgactgtcgcacgcacaacaacatttatattaagtgttttcatcgtaggtatggttgagatgatggttgcaggtattatgaatttaatgagtcaagatcttcatgtttctgaagcggtggttgggcaactggtaacgttgtacgcgcttacctttgcgatatgtggtccgttattagtgaagttgactcatcggtttacttcgcgatcagtattattatggacgttaattgtctttat

SEQ ID NO: 3843 - DNA, 2442 bp, Artificial Sequence
  Description of Artificial Sequence: synthetic nucleic acid sequence
tgtattcatagctagtgctttaatatttgcatctgcaataatatagaagataccgtctttttgttctaatgctgccttagataatacatctctactttcaaattcgttaacaaaacgctgtccttccttattaacgaagacaaagtttgaaggtgttacaattaatccagtaaacaatgcacctgtcttcggatcagaaatcggcatcatttgagagaatcccatacctacgatgtcagcgcctgcctgcacacctaaacgtataccatcacctgtaattgcaggagaattcgttgtcttaatgtcatcaggaatattatcccaatacgtattatattgttgtagcatttttgtattcgctccaaagccaccagtagccaacactacaccatgacgtgtatgaatcttcactttagcaccatttgctttacgtgcttcaataccaacaacttgattaccttctttaattaacttttctgcagtagtttctgtaaaaatacgaccatgattatgtttaacgtagtctcctaaattttcaatgtactctaaaccttgtgctttcattggtttatgaccacgacgccataaagcacccacaggcatatctacaaacgaacgatcaaaatgtacacctttgtctttcaaccaatatactgattccaaaacgttatctgtgagtgttttaactaaatcataatcacctgaaatttcgacattattacgatctttacgtttaccacctaaatatgtttgaatacgatgtaattcgacagaatcaaaaagatattcatcttcattactgctattttcaagatagtctttaatttgacgttttaaagtattgaaatcttcaatgtaagcttcatctatatcattttcatcatgatttaataactgtatgagtgtctctttttcaccagcaagtgccgggaatgcattttgccatttaggctcagcagcgttgacttgaccacctgtacggatagtattgccacctatagctgcaaatttctcaagcatgatgacttcttttccttcatctaatgccgtagcagctgcactgagtccggcacctcctgtaccaatcacaacgacatcagtcgtctcttcaacaacctcatcagaccactgaacgactggtttaggacgcgcccgtaaaatatctgggtcttctcctgcttgttcaattgcatctgcaataccttgcacgatgccttcacttgttactgtcgcacctgaaatgacatctacattcagtgtttgcccattgataatatcttgaggtaaacgttcaaacactgggttcgctatgccttcagactctccgctatcatctacctcgatacttacaatcttatcttctgataattggactttcataggtaagttgccattatgaccttttgcatagacatgatacgtacctttgttaaatttaacttttttattttgaagtgcttttaatttttcatatttacgatgctcttcttctttatctaaaatcataaagtccattactttccataaaggggatggtatgtgaagtactttctgatcatgtatatcgacaaattgttctacttcttcgttttgtgaaattttatctgtccattgtggttccactaaataggctttcccaacacttaaaagatcatatcctagttcaagggcatgttctgcatcttgtcgttgggcaatactacctacaccaattaatggaatttttgccaactgtgcactttgcattttgatgtacttattaattaaaggttctgtatcttcttgattcacaatagatgtacgttgataactgtttgctgatatatggaagtaatcaggttcatattctgctaatgtatttagtaaaaacatggtatcttcaaaacgtatgcctggttcttcaatttcttcaggtgagaatcgatatcctataataaaatgagaagcctctttttcagcaacgacgtgttgaacctttgtcaaaacttcgattggaaatcgtgtacgtttttcacgactgcctccccatgaatcttgtctccgattagaatgtggagagaaaaattgttgtaataagtatgtgttggcgccatgaatttcgacaccatcaaaccccgcttctatagcgcgacgtgtagcctctccaaagtcatcaatcatctgattgatttgagcatgtgtcatttctctaggtggtacagcatcaggtcttaatgctgcaatggggctcgcagatatcggctgctctccttcattaaatttaggatttgccattcttccggcatgataaagttgcaaaatcgcttttgatcccttagcttgaatcgcttctgctaaacgtttgagtccaggtattttgtcatcattatcaatacctatagctcccggaaatcctcgtccgtgattttcaacaaaacaactttcaacaatgattgctgaagc

SEQ ID NO: 3844 - DNA, 3309 bp, Artificial Sequence
  Description of Artificial Sequence: synthetic nucleic acid sequence
ctttatatgatcatattttagatacgtctttattgttcaatattatccctgaacgtttccaaggacgcgaagtcaatgatgatttattatttgatattgctcgtggtaacaaagagcatgttgcaagtgcacttattaaatggtttaacaccaactatcactacattgtacctgaatgggacaacgtagaacctaaagttgaaaaaaatacgttattagaacgttttaaatatgcacaatcaattaatgtaaatgcgcatcctgtaattgttggtcctatcacatttgtaaaattatcaaaaggtggtcatcaatcgttcgaggaaaaagttgaaacattacttcctttatataaagaagttttacagtcacttgtagatgcaggtgctgagtatattcaaattgacgagcctattctagtgactgatgacagcgaaagttatgaagacattactagaaaagcatacgactatttcgcaaatgaaggtttaggaaaatatctcgtcattcaaacttactttgaacgtgttcacttaaaattcttaagttcattaccagtgggcggtttaggattagatttggtacacgataacggctataacttaaaacaaattgaagatggtaatttcgatcaaagtaaagcactttatgcaggaatcattgatggcagaaatgtatgggcggctgatattgaagcaaaaaaacaattaatcgaaacattacaacaacacacacaacagttagtcattcaaccttcatcatcacttctacatgttccagtatcactagatgatgaaacacttgatgaatctattgcagaaggattaagttttgctactgaaaagttagacgaattagatgcattgcgtcgcttattcaatgataatgacctgtcaaaatatgaacattacaaagcacgttatgaacgcttccaaagccaatcatttaaaaatcttgaatacgattttgaaagtgtaccgacacatcgtaaatcaccatttgctaaacgcaagcaattacaaaaccaacgtctaaatttaccagatttacctacgactacgattggttcattccctcaaactcgtgaagtccgtaaatttagagcagattggaaaaataatcgcattacagatgctgagtatcaagaatttttacaaaatgaaatcgctcgttggattaaaatccaagaagatattggtttagacgtacttgtacacggtgagtttgagcgtaacgacatggttgaattttttggggaaaaacttcaaggtttcctagtaacaaaattcggttgggtacagtcttacggttctcgtgcagttaaaccaccagttatatatggagatgtgaagtggactgccccacttactgtaaaagaaacagtatacgcgcaaagcttaactgacaaaccagtaaaaggtatgcttacaggtccagttactattttaaactggtcatttgaacgcgtagacgtacctagaaaggttgttcaagatcaaattgccttagccattgatgaagaagtgttagctttagaagaagcaggtatcaaagtcattcaagttgacgaaccaacgttgcgtgaaggcttacctctacgctctgaatatcacgaacaatatttagaagatgctgtacattcatttaaattagcgacatcatctgtgcatgatgaaacacaaattcatacacatatgtgctattctcaatttggacaaatcattcatgctatccatgatttagatgcagatgttatttctattgaaacttctcgtagtcacggagacttaattcaagatttcgaagatattaattatgatttaggaattggattaggtgtttacgatattcacagtccacgtattccaaccgaagaagagattactactgcaattaatcgttcattacaacaaattgatcgttctctattctgggttaacccagactgtggtctaaaaacacgtaaagaaaatgaagtgaaagatgcattaacagtgttagtcaatgcagttaaaaagaaacgtcaagaatctgaatcaacaacagcataatacgagctagaggtgaggcaaatgtcacagtatccactttggaatcaattaaatactttaaaagaggctcagtgggtcgatttaacacatactttcgacccaaatatccctcgttttagcgaatttgaaaaaggtgaagtctcaacgctattcaatgttaaagatcatgggttttatgtacaacgttggagtatcgtaactcaatatggaacacacattgatgctccaatccatttcgttgaaaatagaagatatttagaagaattagatttaaaagaacttgttttaccattaattgttttagattattctaaagaagctgcacaaaattcagattttatcgtatcacgtaaacatttagaagattgggaacaacaacacggtcgcattgaagcaggtacttttgtcgcattacgtactgattggtcaaaacgttggccagatatagaaaaatttgaaaataaagatgtagatggccatcaacatcttccaggttggggccttgatgcattaaaatttctcattgaagaacgtggtgttaaatccataggtcacgaaacatttgatactgatgcctcaattgatacagctaaaaatggtgatattgttggcgaaagatatatcttaggtcaagacacattccaagtcgaattacttaccaatttagatcaattacctaccagaggtgcaattatctatgcaatcagcccaaaaccaaaagatgcaccaggctttccagttcgtgcattcgcaataaaaccttaattgatgtctttcatctagcgttctcaaccacgtggtggttcaagtggtgcacaaccgctatgatattattccatcaatgttcatcatcataatatttgaatagcaatgaactctttctaactaagtaaaaagctataaacgaagtttttaaaacgacttcgtttatagcttttttaatacacacttttatgatataaaaaccgtgctccactaaatgttaaacttcatatttagatacaaccgtagcgataccttgaccgccaccgatacataaagatgccacacctgttggcttagcatcacttaattgatgtaataatgaaactaaagtacgcgcacccgaagcccctatcggatgtcctagtgcaatcgcaccaccattaacattgactttatcttgcggtaattgcaactcacggtttacagcaattgattgcgctgcaaaagcttcgtttaattcaaaaatatcaacatcatttatcactttattaga

SEQ ID NO: 3845 - DNA, 3450 bp, Artificial Sequence
  Description of Artificial Sequence: synthetic nucleic acid sequence
taagtattaaatctaaaatccatgcaactagaaacggcacaacaaaaaaggcgatgacaataagtaataaacttaaccatgcagaatcaacatgcataaatttaaaggcattaataggcccaaccattccgataaaaccaaatcctgctgattcttttgttcctgaaataccaataatccctgaagcaataccagatattgccgctgtcaagaaaatcggaatcataatgacagggtatttaaccatatttggcatcatcattttcaccccaccgaaaaatattgataaaggaatacctacatgattaactttgctggtaccaatcaataatacagcttctgtcgctgctatacctattgaagcagatcccgcagcaatacctgataatccaatagcaatagctatggctacagttgacaatggtgatatgattataaaactaaacaccatagagattaacatactcataaacactggttgtaattcagtaaagctattaaccatgtcaccaattcccgttgtaattaaccttacatatggtaaagtaaatacgccgattgtagctgctaaaccaccaacaactgtcggaaaaacaattaaagccatactaccaacacgttcttctattaataaaataagtaacacggcgatggatgcagttaacatcgtattaattaaatccccaattcccgcaattacccatgtaccttgtttaaattgagctgcaccactaccaacatatgaggcacttgctactacagctattgctaaaggtgtcatattgaacttcatagctatcaatgctccaataagcgctggcactgtaaattggatggcttgaacgacccctaataaagttttgaaaataggatgatattgcataaagtatttaaaaatttctcccaaaattgcatttggaacgagtccggctactattccaattgctacccctgataacactctaaaaacaaaatcctttggtccatcgatattttttatcgtcgacataagttaaacctcccaatgtgctaagtgaaattatgtataaaaagagtctcgaagcccatatatgattcaattaaatctttcttagatgctgtaacttagagggataattagtgaaatgcatatatgacattcaagactatgctcaatagtatatcatatttttctgaaaattaagataacttattcgacatttaattcaaaacattaatttttttaattaaaatacacttcataacctttagtttaaatactaacgttatgaagtgttagctaactcgtcctatttgaaataataagtgctttactcttcctcatttttaattttagctttgcgagattcttttttatatttttgatacatcaatagcatgataacaaaccatacgggtgcagaaagtacggcataacgcgttgcactattaatcaatagtataataaaaataaatgcaaagaaccctaaaatactgtaagccatgtattttccgccccacattttatagttactttctttatgctgtttcggttcatgtcttaaataacctagatacgcgatcataataattgtccaaatcataatatttaaaacagttgaaaatgttgtaatttgtacgaacactttagtcgcatctttaaaaattgcatttaacacgactgaaatacttaataagccacatgtcactaaaatagcataatgtggtacgccgtgcttattggttctatgtaagaatgctggaccttgctttcttccagctaatccaaacatcgtacggctattagcaaatataccactattacaagaagaggctgcagctgtaagtacaacaaagttaataatacctgctgcaaaagggattccaactaatccaaacattttaacgtatggactgtcagcaggattcaattgttgccatggtacaacagacatgataactgccaacgatcctatataaaataataatattctaaacggtacattattaattgcttgaggaattgttttgtgaggatctttagtctcccctgcagttattccaatcaactcaataccaataaatgagaaaattgccatttggaatgacatgaagaaaccttgtgcaccattagggaaaaagcctccgtctttccatatattcgttaccgttgcagggccatagcttgtcttcattccaaatacaatcataacaacaccaacggctatcaaagctaaaatagtcaaaactttaataatagatagccaaaattctaattctccaaataatttagcactgaatagatttaaagcaactaaaactaaaatagtcgctgcagctgttaaccagtttggaattgttggataccagaaggaaacatacttggcaacagcagtcacttctgccattcctgaaataatccatgttaaccaatatgtccaccccaccataaaacctgccatagaaccaatatgatgatgagcaatgtcaccaaacgatttaaatcctaaattggataacagtaattctcccatagctctcatgaacataaagagaacaaaacctactattatgtatgttagtaagatagatgggcctgctaaatgaatagattggccagcaccaagaaataaacctgttccaatagccccgccaatagcaattaattgtatatgtctattgcttaattctctttgcagtttatctgccataatcttttcttctccatttcatagagtaaatcactgactgaaaattatgtcgtacgtcatacccctttttttataataaatttcttttaatcacagaaaaatcgtattacaaatttaaatataccctatttttaaaattttcaatcaatcttatgtttaaaaacctcactaaagcccgttgatatctttagtgaggtcgatgttctttattctaaaatgattttcatagagcgttgtacactatcagcatacataccaccaaatttaagtaaatgtatcataagtaaatataatctataaaattctatacgcttttgtgatcccttggctagtggtaactgttgattatattcatcatagaactcttgtgtaaatccaccaaatactgtagtgattcctatgtcaaattctctatctccatatagtggtgcaggatcaaataaagcaggttggccatttgttaagaacatgtagttacctccccataaatcaccatgtaacagagagggcttactagtatgatttgaaagttcatcaacaataacttttcttacacgttcatacatttttttatcttcttgtttccacaatcctacacgtaataactcatcttgtaagtgatccattctacgatttataaaaatctctttccatgtctcagtccatgaattatcaaaggaaatatctgcaccttcatgtggtaaacggaatccaaatttattatcttgttggtattggctatgcattctagcaactaatc

SEQ ID NO: 3846 - DNA, 3007 bp, Artificial Sequence
  Description of Artificial Sequence: synthetic nucleic acid sequence
tacagcaggcattgcactcatatcaattgctaatcaattaggtgtgccagcaggtatggctgctggtgccattattgcaggggcggtttttggtgataaaatgtctccattatctgatactacaaatttggcagctcttgtaactaaagttaatatttttgctcacattaaatcgatgatgtggacaacaatccctgcttcaataataggattggctatatggtttattgttggattacaatataagggagacgcaaatacacaacaaattcaaaatctattaaaagaattaacaacaatttataacttgaatttttgggtatggatcccacttattatcatagttttatgtttaatatttagaatctctacagtaccgtcaatgcttatctctagtatcagtgctttagttattggaacattcgatcatcaatttaatatgaaagatggttttaaagcttcttttgatggatttaatcatacaatgctacaccagtctcatatttcagataatgctaagacgttgattgagcagggtggtatgatgagtatgactcaaatcattgtaactatattttgtggttatgcttttgctggtattgttgaaaaggcaggttgtttagacgtaattttagagacaatagctaaaggcgtaaagtcagttggaacactaatattaataactgtagtttgtagtattatgctagtatttgcagctggagttgcttcaatagttattattatggtaggcgtacttatgaaagatatgttcgaaaagatgaatgtctcaaagtcagtgttatctcgtacacttgaagattcaagtacaatggtattgccactcattccatggggcacatctggtatatattatgcacaccaacttaatgtttcagttgatcagttctttatatgggcaatcccatgttacttatgtgcattcattgcaataatttatggctttacaggtataggaattaaaaaaataagtagaaaataagtttaaatattattgtaagtggaatgtagataatagttgaaacattaacttacgatataaattgtagctatagtatcataaggcgtttcaagtttgttaatatcctttaagtacatatcatgtatttgttatgtagcgaaataaatgcatgacagtacacgacgaattcttttgacactatttttgagatgacataattattgagaaaactaccacaacaattgaatttgtttaaagttgtaattgaggttaaagcgttttattaatacgttttaatctcaattttttaatatctataatcatagagcgtcgatgtattgttttaatcttatataaagaaaaatggttctacactgtataagttgataaaatactgcttaaaaaatacctgagacattgattatcattgtctcaggtatttgactatgttatacaagttttatatgtgattagtgaatatagttatatgaagcagcttgactcgcagagattgtacgtgaagtgacaacacctgcaccgtgaccgtagttcatttctgaaactctgattgaaccattgctgtttacaccttcaacgtatgctacgtgtccgtatgcaccttgtgacgtttgtaagattgcacctttagcaggtgaattgtttactgtgtaaccagaacgtgctgcagcgtttgcccagttgtttgcgttaccccacgttgaaccgattttgccacctactctgtcaaatacataatatgtacattgacctgaagtgtataagttaccagatgctgagcgagcgtttgataaagatacaccgtttgatgatggcgcagaagttgttgtaacgtgaacattactacttgatgttgaatagcttgcgcctaaaccaccagtcggttgagttgttctttgtgattgcgtgttgtttgattgatagttgttgtaattgttgtaattactgtagttattgtagttgctatagttattgtaaccatagtagttgtagttattataattattatagttatatgaagtatttacacgatctggactccagttacctttccaagtgtagtggtagttaccttcagcatcgattgtgtaagtgtagctatatgaataagggtcgtttggattgtacccatcattattttgttctgctgcttgtgcgtcatggtgtgcaaatgcgaaagtagcgattcctgcagttgcaattgtagctgtagcgatttttttcattgttaaatatcctcctaaaaattaaactagttttttataattaataatcatgtgatcaatgagttacaaaataaatttttattcgttcttgtttaacgacaagccatactctaacagaaaaattgatgtttgtgtgcattgttattgatttgtaattttttgctaatattgttacacaatctcatttaacccaattaatttatgtaatatgaatagaaatgatacgctcagcttttttaaagtattttattttgagcaacacaaacactgttacatgaatgtaaaattactgaaaattctttttgataataattaacatagcaatgtgaataaacagtatttgaatttttgatattttacgttgatttgatgatatgattgagcaatattttgaaaaagctatataaatagaaaagaaaattgatataattaaaatctaatttgttactactaattttttgagagttgtataatagacactgaaaaatagatgttgtctagttatatttagtttagcaatcggggagaagtttaatttaaaatacacactaggacatcgtgaggaagacatatgagagaaaattattcgatacgtgtttttaataatttagccattaatacagaaaaggcactgagtgtaaaggtattttattgtttgaaaggaaaatgtgaagtcactatcaatgttcagaaacaatagtcatatttaaccgaacgaattaaaaaataaatatagtgttctattggtacaccttgttgatagtcgaatttttgcaaggcacgg

SEQ ID NO: 3847 - DNA, 2998 bp, Artificial Sequence
  Description of Artificial Sequence: synthetic nucleic acid sequence
aaatgtcttcaatttcctcttcatttactataaaacccatagtatttacactattatttaaaaatgatagaacatatctcatcaccaaatcgcgttcaggttcattatgtatttcatgatataatccatcccaaactttaaagtacatctctttcgactttaatttatctttcatttcattaatagattgagtttctaaaattttatcattggtaccatacattatcaatgctgaaataggtttaatatctctgatatgatccattgtttctttcatcttttcatttataaggttataccaactatatgttacctttttaagcattagtccatcatttgctgtttcttcaataatttcatcattacgtgttaaatcttgaggagttataccaactttaaatctagtatctttagaaattttaccaacattagaaatcaatttatttttgcgccctttatagtctctctttagttctaacataggtgaaaataacaagataccctcaataggtaattctgttttctcaagcagatttaaaatgatgagaccacctagtcccacacctaaaacaaatgttggaattttatattcattagctatttttatccactctaatatattttcatgatacgtattaaaatcatctatttgtcccttttgagctcgtgaagtttgcccttgtcccggtaaatcgcccatgataacgtgataaccatttcgtcttaacatcgtgataacatatgcatatctacctgtatgttctaaaatattatgagcaatgacaacaacgccttttgcgtcattttctgtttcccacttccacattttctaattgcccctttttatatgttctttattaatataattatagcaaaccaaacataatgaatgctattttaagtgaaatttgatagatatttaaatattttctttaactcttcaaatacatctaaaagtaaaaatacactttaagtgttcatgctctttatgtaaacgctttcttaaacttaattttcatgatacactatttaaaaaatatcatagtctagtataacggaggtattgcatatgtccttatttaaagattttttcattgcgttatctaatcatacatatcttaataaaatagctaaaaagatgggacctcaaatgggagcaaatcgtgtagtcgcaggaaatacgattcatcaattaattgagactatacaatatttaaatgattataatatttcagttactgtcgactcattgggtgaatttgttaatactagagaagaaagcattaaagctaaagaagagattttagaaattatcgatgcaatatatagcaataatgttaaggcacatatgtcagtcaagataagtcaacttggaagtgagtttgatttaaatcttgcttatgaaaacatgagagaaattttacttaaagctgataagaatgggaagatgcatattaatattgatacagagaagtacgatagtctttctaaaattcaacatataattgatagattgaaaggtgaatttaaaaatgtgggtacagtcgttcaagcttatctgtatgaagccgatgatataattgataaatatcctgaattacgtttgagacttgtgaaaggtgcttataaggaagatgcgtcaatcgcttttcaatcaaaagaagaaattgacgcaaattatattagaattattaaaaaacgactactaaattcaaagaactttacatcggtggctacacatgacaatgaaataatcaaccaagtcaaacaatttatgaaggaaaatcatgtcagcaaagataaaatggaatttcaaatgttgtacggtttccgcacggaattagcacaaaaaatagctaatgaaggttatttttttacagtttatgtaccatacggtaatgattggtttgcgtactttatgagaagactagcagaacggcctcaaaacttgtcattagctataaaagaatttactaaacccaaaatcttaaaaaaggtaaccttgggtataggtatatttgcaactttattgacgtctcttattcttggcattaaaagacataaaaaataaagaggctgggacataattccctagcataatagccagtaaatgagttttcacgacatgtaaatgatattgtagaaacaattcccgatactgaattcgatgaattcagacatcatcgtggcttaatataagaaaagtaacagctcaacgagctgaaaataatcaaaaaaattataaaaaagacaatttctatattatttcaatagaaattgtctttttttacttatcttgaacctttttgtcccagcttctttattttttaattgatttgcttaattagattagccatttcgattgcactaactgctgcttctgaacctttatttccagctttagtaccagctctttcaactgcttgttcaatactttcagttgttagaactccaaaaatcaccggagtatctgaaatgtcgtttgctttagaaacacctttagctacttcattacatacatagtcataatgtgaagttgcgcctctaatcacacatcctaatgtaatcacagcatcatattcacctttttgagctaatttttttgcaacgagtggaatttcgaatgcgccaggcacataagctacatcaatatttgtatcttctacttcatgacgaataagtgtatctttagccccttcaagtagacgtgtagtaataaaatcattaaatctactaacaacaatcgcaatttttaaatccttaccaactaatttaccttcaaaattcattttcgagccctcctatattaaatgtcccattttattttttttagtttccatataactatggttactctaaagcttctttaatcagttgatttaattcacggttaggtgttaaaaagttagctcttttaccattagttggtaaaataaaatctgcttcttctaaaccaatggcatgccatatcgtcaattgacctttattcatacatgta

SEQ ID NO: 3848 - DNA, 3007 bp, Artificial Sequence
  Description of Artificial Sequence: synthetic nucleic acid sequence
cctaaataaaaatggttttaacaatgaaagtgctactgttcatcaagtttcaaatagtcatggtggcaatcagttagatggtaaaagtaatcaatacaaatcagtacatgacatgattaaagacgtttctcccgcaattgtcggcgtgataaacatgcaaaaatctacaaaccttgatgatttattcaacggtaaggcatctaaatcaaaagaagcgggaattggttccggtgtgatttatcaaataagtgaaggttccgcatatatcgttacaaataatcacgttgttgatggtgcttcggaaattaaagttcaactacataattcaaaacaagtagatgccaaattaataggtaaagacgccctaacagatattgctgttctaaaaataaaagatacaaaaggaataaaagcaattcaatttgctaattcgtcaaaagttcaaacaggagatagtgtttttgcaatgggtaatcctctaggattagaatttgcaaattctgttacatcaggaattatttcagctagcgaacgtacaattgacgccaatacttctgctggtaatactaaagttaatgttttacagacagacgctgcaataaatcccggtaattcgggtggtgcattagtggatattaacggaaatctcgttggtatcaattccatgaaaattgcggcagcacaagtagaaggtataggttttgctatacctagtaatgaagttagagtgaccatcgaacaactcgttaaacatggtaaaatcgaacgcccttcaatcggtataggtcttataaatttaagtgatattcctgaaaactatcgtaaagaactacatactcataaagacaaaggcgtttatgtagctaaagtagacagtgaaaatgccattaaaaagggtgatattattactggaatagatggtaaacaaataaaagatgatacagatttaagaacttatttatacgagagcaaaaaaccaggtgaaacggttactctaaaagttatcagagatggtaagacacaagacattaatgtaaaattaaaaaaacaagcatctgcatctgaatcatctcaatcacaaagtcaatttgctcaataaaaaattttcatattacgtttattgattttaatatattatagttgatcgattttaagtaaaaactctgagtatacttcatagtaagagatactcagagttttacttttatagttattcctttttaaataaatcttttaatttttataatatatagaaaacattgtgaaatgattcaatcaaattttttcatttatgattggtaattaaccatgaaatattttttctttcctcgtcgaattattgtaatttcatcttcaataaggtctttactacttaactcataatcgactgattgttgacgttcaccattaatatatattgcaccgttgtttacatcttcacgtgcttggcgtttagatgaagcaatacctgtttcaataagtgcttcaactatatttgtcgtttttgtagatagcgttacttgaggtacgtctttaaacccttctttaagttctttagcagataatgattttaaatctccactaaacagtgcttttgaaatacgtatagcgtcttttaaagctgcttcaccatgaataaatttcgtaacattttccgctagtgctttctgtgcttcacgtaagtgaggcgcttcattttttgattgttctaatcgattaatttcttctttttctaaaaaagtaaaatattttaagaatttaattacatcttcgtcagattgattaatccaaaattgataaaattcatatggacttgtcttttcaggatctaaccacacagctccagactctgatttaccaaatttcttcccatctgatttagttactaatgggattgttaggccatatgcctcagtttgtccatacattcgtcgcattaattcaataccacttgtaatattaccccattgatcagatccgcctacttgaattttacaatttaactcacgatttaaatagccaaaatcaatagcttgtaaaatagtataagtaaattctgtataagagataccatgttctaaacgtgtttgaatagaatcttttcctagcatatagttaacgccaacatgtttaccataatctctaagaaaactaatcaacgaaatttgaccaagccaatctttattattaactaattttgcccctttatcactgccaaattcaaataatcgatgcatttgattagacaggcctttgacgttagcttcaacttgtgattctgtttgtaacacgcgctcttcagactttccagaaggatctcctatcataccagtacctccaccaattaagacgataggacgatgcccatgttcttggaagcgtcttaatgttaaaaaaggtaacaagtgaccaatatgtaaactatcagctgtaggatctgcgccgcaatataaagtgacctgttccttatttaataattcttcgataccctcttcatctgtttgttgataaattaaccctctccattttaaatcttctattaaagcattagccattgataaaatcctcctaaattattttataaatttaaaaaagttaaagatatttaataaatatagtgatataagtgatttattcaaacatattaaaaagcgcccctacaaaatgtaagggcgcttgtgcacggtaccaccatacttagatagagttcgttactcataaatatctctattaatgatacgctcattaataaaacgttgaataataaaaatagcaaggtgtattcaccaataagaaactactagttcacagccaccactagttctctttaagctttctcaaaagttacttgtcctttatattcaaaacatattgaattgaatattattatagttaacattattttaaaagtcaactttcaagatatggtatactatatctaactttaggaggtatctaatgcatttcaacaagtatcaaatactaactacagataaatatactaaat

SEQ ID NO: 3849 - DNA, 3170 bp, Artificial Sequence
  Description of Artificial Sequence: synthetic nucleic acid sequence
tggctactccagatgaaattgttaatcttgtagatgccaatccggggtctcttggtcctatttttgataaagatattaaaatttatgccgataattacttacaagatttaaataactttgttgtaggagctaatgaagatcattatcactatataaatgtcaatattggtagagactttgatgtaacagaatacggtgactttagattcattacacaaggtgagatgttaagtgatggctcgggagtagcacaatttgctgaaggcattgaagtaggacaagttttcaaattagggacaaaatattctgaatcaatgaatgcaacttttctagataatcagggaaaagctcaaccactcattatgggctgttatggtattggagtatcaagaacattaagtgcaattgttgaacaaaacaatgacgagaatggaattatttggccaaaatcagtaacgcctttcgatatccatctaattactatcaatcctaaaaaggatgatcaacgtactttaggtgatcaactttatcaaaaattaatggattcatacgatgttttatatgatgaccgaaaagaacgtgctggtgttaaatttaatgattcagacctaattgggttaccggtacgagttgttgttggtaaaagagctgaagaaggtattgttgaggtaaaacaacgcattaacggtttaagtgaagaagtgcaaattgatgaattagagtattacttacaagaattatttaagaatattaagtaagttgcaataaaatttttgatagtcaaattgatattaataaagagcaggaaagatgatgaaacataattttaaatctaacctgctcttctttattgtattatttactatttgtttttcatgaaaatacgtgcaatcagtagtataatatgaaacgaatttatttagtgactttatgagcagttgtaacatatccaatgatgtttaatagttttaaatttagtattaattaaggtggttattattttggcaatgacaaatcgagaaaagtttaaagtgcttgccgatcaaataaaaatatcaaatcaactagaacaagatattcttgaacaaggtgaactcactcgtatagatgtttcaaataaaaacagaacatggactttccaaatatcactcccacattttttatctcatgaagattatcttctttttacacatgcaattgaagaagaatttaaagaaatagctacagtagcaattgatttttcaattaaagataccaacaatcaagatgagtttgctttaaaatatttcggacattgtattgatcaaacacgattgtcgccaaaagtgaaaggtcaattgaaacaaaaaaaactcattatgagtggaaatgttttaaaagtcttagtttcaaatgacattgagagaaatcattttgataaggcatgtaatggtagtttggttaaagcatttagacagtgtggctttgaaattgataaagtcgtttttgaaacagattcaacaaatcacgatgatgaccttgcatcgttagaagcacatattcaacaagaagatgaacaaagtgcaagagaagcaactgaaaaattagaaaaaatgaaagcagaaaaagcgaaacaacaagataataatgaaagtacagtggaaaaatgtcagattggaaaaccaattcagattgaaaatataaaaccaattgaatcaattattgaagaagaattcaaagtagctattgaaggtgttatatttgatattaacctaaaagaacttaaaagtggacgtcatatagttgagcttaaagttactgattacacagattcacttgtattaaaaatgtttacaagaaaaaataaagatgacttggaccactttaaggcacttagtgttggtaaatgggttagagctcaaggtcgtattgaagaagatacttttgttagggatcttgtcatgatgatgtcagatattgaagaaattaaaaagacacctaaacaagataaagcagaagataagcgtgtagagtttcatttacatacgtctatgagtcaaatggatggtattcctaatattagtgcatatgttgaacaagctgctaaatgggggcaccaagctttagcagtaacagatcacaacgtagtacaagcttttcctgatgcacataatgctgccgaaaaacatggtattaagatgatttatggtatggaaggtatgctagtagacgatggtgttcctatagcttataaaccaacagaccgtaatttaaaagatgcaacatatgtggtgtttgacgtagagacaacaggtctttctaatcaatatgataaaattattgaattagctgcagtaaaagtgcataacggtgaaattatagataagtttgaacgttttagtaatccacacgaaagattatctgaaaccattatcaatcttacacatatcactgatgatatgttaactgatgctcccgaaattgaagaagtgttaactgaatttaaagagtgggttggagatgctatatttgtagctcataatgcttcatttgatatgggatttattgacacaggatatgaaaggttaggctttggaccttctacaaacggtgtaattgatacacttgagctttcacgtacaattaataccgaatatgggaaacatggtttgaatttccttgccaaaaaatatggtgtcgaattaacgcaacatcatagagcgatttatgatacagaagcaacagcttatatttttataaaaatggttcaacaaatgaaagaactaggtgtgaacaaccatctagaaattaataaaaaattaactaatgaagatgcatataaaagagctcgtccatctcacgttacactcattgttcaaaatcaagaaggtcttaaaaatttatttaaaatagttagtgcttcattagttaagtattattaccgtacgccaagaattccacgttctcttttaaatgaatatcgagaagggatcttgattggtacagcttgtgatgagggtgaattattcacagcagtaatgcagaaggatcagtcggaagtagaaaaaatagcaaagttctatgattttatagaagttcaaccgcctgcgctttatcaagatttaatggatagagaattaatacgagataatgaaacgttaacacaaatttacaagcgattaatagatgct

SEQ ID NO: 3850 - DNA, 3629 bp, Artificial Sequence
  Description of Artificial Sequence: synthetic nucleic acid sequence
ctcatctaaatatttgtctgacaaaatttgctcgagtaacgcttgtttatcagatggctcaattttaagtgatttaatatattgtctactttcatataaaaactgaatatacattgaatagtcttcattgtatgtatcttttaaatctttaataattcgttgacctaatttaggacttgcaccatcagttgatacacttattgttaatttatctctttttaagaaattagggaacgttacattacctaggtctgcttgtcctgcatgattaaataatacgttcttagacaaagctgcccccacatcgttgttaacatcagattgattagtagccgcgatgaccacatcagcattctcaacatcttgtggttcgaagtgtttcttttcataagtgatttgcttcgtttctagatatttttgtaatgtatcggtaattgttggacttacaacatgaatatgttttgtataagctaataaagttttagcacgacgtgttgccactttacctccacctacaatgacgactttcttgttacttaaatcaatcattaagggcatattcatgatgatttcctcctatacactttaattaatactcattataaacgtgatttttactgtttttttaaatgtatgcgctaagttgatgacatttccgttaacgtttcattttgaacagttgcctgttctacaaaccaattaattttttctctcatcttaaccacttcgcctacaataatcattgctggattctgaatatgatgtgctcgttcttgaattgtatcgagtgtcccagtcactgtcatttgctgttttgacgttcccatatgcacgagagctactggtgtttctgacgaacgaccatattgtattaacaactcacaaatttcactgagtctcttaacccccatataaatacataaagtttcaggaccattggccaaatgttgccagtatttgcctttatccataccaggtttattcactgcagttacaaatgctacagaagaactataatcacgatgtgttactggaattccaggtataatttcaaagtggatattatgacatgctaattcctctgcttcttctccgccacgtccaaaaacaaatggatcgccaccctttaaacgtgtaactatgtgcccttttttggctaaggttaccatcattttatttgtttcttcctgcggtaaggagtgcctgtgaggatccttaccgcaatagaagaacttagtagaaggagaagcataattaagtatttctttatttacaagtcggtcataaaggatgacatcggcttctttaatggcttttaaaccttttaacgttattaattctggatcaccaggtccagctccaactaaatatactttccccatatgaaccactccccctctcgtttaactatgaaaatcgcgaccatcatgaactttggctatcacaccgtcacgaattacaaagtccccaaagtgttctccgtcaagacgctctttactataacgcaacaacaatggacgtagactttctaatatctcattttcgtcgatattctctttatatattttatttagacgttcgcctttaaaactaccacctaagtacatattatatttaccaggtgctttaccgataaaggctatttctgctagcgctggtctcgcacatccattgggacaacctgtcatacgaatcgttatttcttcctcttttaaaccagactcatctaataaatcttcaatttttgtaattagtgaaggaagatatctttcagattctgccatagctaaaccacacgttgggaaagcaacacaagccatagaatttcttctaagtcctgtataatttttgccatctgttaatttatatttatcaataatagcttgtatttcttcctttttctcaggagaaacatttgcaataactaagttctgattaggtgataatctgaaatctccagtatggatttctgcgatttctcttaaggttgtttttaacaaatagtcttcagtatctttcacacgcccattttgtataaataaagtgaaattccaattattaataccttcaatccaacctaatcgatcaccattatgttcaaattcgaaatcacgtggcgctttaatttcccaacctaatcgtcggtttaattcttcagtcacccaagtttctcctagacggtccactgtatatttaaaacgtgcattttttcgattttcacgattaccataatcacgttgtattgtaagtattttctcacatacatctacaaccttttccttaggtataaaacctatgagacgtccaagttgaggatatgtttcagtattaccatgagtcatacccataccgccaccgatagtcacattaaatccaattaactcatcttgttcaacgatagcgattaaaccaatatcttgagaatagacgtcaatatcattagatggtggtactgcaatacctattttgaatttacgtggtaaatacgtattcccataaataggttccttttcctcactcgaatctaaaaccttttcaccatcaagccaaatttcatgatatgcatttgttcttggaagtaagtgattacttatacgcgttgcataatcattaatctccttatgtacttgagattgataaggattaggattgcacatcgtattacgattaacatctccacatgcagcaatagaatcaagtactgcatgattaatatttttcattgattagcatcccacaattaaacaataaatatacaaataaaaataatcagtcatttgaatatattagtaaacttatttcaaatcaattgaaataagtgcttcatcttattgatgattttcaaaataaaagtgagcaaagtcattatgcaatacagaaatgattttgctcgctttttattgttagcttagtatgactcattcttgttgaatttcactatacttacaattaaggttggaagttaggatctacaacagtaggttgaccttgtcgattaagcgttacaattgagtaagtattactttttgatggatctttaaagctaaacacatatctaaatccatcttctgtttgttctattgaataatcattatatgatttattttcgcttccatacatattagcttcgtttttagcaatggaaagtgcagtttcaaaatttggtaattgttgcaaagcttgactgcggtcgccctcaaatggagaaagacatcgagcaacacgtgtcgcattttcactttggtatggtgctacatatttattctggttatcttgtactgattgctgttgtttattttgattatccgatgaatttccgtttgaatttgttgttggtctttcgcttgttcgttgttctccatcatttggattttgattatttgtttgttctttattagtgttattttcctgattgtcttgcttattatttgtatcattacgtttcgaatctttttttgagtcatgttgagatgatgatttatccttttgttctgttttagaactatcatctttatgacttgattcatcatttccaccattggaacaacctactaacattaatgataaaatcgttgcacttgctaatacttttttcatttgaaaccgcctcctactttgtctctttatca

SEQ ID NO: 3851 - DNA, 3641 bp, Artificial Sequence
  Description of Artificial Sequence: synthetic nucleic acid sequence
tccggtgaaacacgagaagttcatcacgttgcatgtttacttggttatggtgcaaacgctgtagttccatatttagcgcaacgaacgattgaacaattaacgcgtcaaggtcaactttcaggaactgtcgctgaaaatgttgctacgtataccaatgtattgtcagaaggcgttattaaagtgatggctaaaatgggcatttctactgtacaaagttatcaaggagcacagatatttgaagcggtaggtttatcgaatagcgtcattgaaaaatattttacaggtacacagtcaaaattatctggtataagtattgaacaaatagacaaagagaataaagcgagacaaagtgatgattctgattatcttgaatccggaagtgtattccaatggagacagcaaggtcagcatcatgcatttaatcctcgtacgatttttttattgcagcatgcatgtagagaaaatgattacgagttatttaaaaaattctccaaaactgtaaatttaaaacgtacggatcatattagacatttattagaattcaagacacgccaatctattgatattagtcgtgttgaaccagcaagtgaaatcgtaaaacgttttaatacaggagcaatgagttacggctctatctcagcagaggcacatgagacgttggctcaagctatgaatcaaattggaggtaaaagtaatagtggagaaggtggagaagattcttcacgttacgaaattcaaaaggatggaagtaataagataagtgcgattaagcaagttgcatcaggtcgttttggggtgacgagtgattacttgcaacatgcaaaagaaattcaaattaaagtcgcacaaggcgctaaaccaggggaaggtggacaactaccaggttcaaaagtatatccatggattgctgagactagaggttcgacaccaggtataggattaatttcaccaccaccacaccatgatatttattcaattgaggacttagcacagctcattcatgatttaaaaaatgcaaatagaagagctgatattgcagttaagcttgtatcaaaaactggcgttggaactatagcttcaggggtagctaaagctttcgccgataaaattgttataagtggttatgatggaggtacaggtgcatcgcctaaaacaagtattcaacatgcaggtttgccatgggagataggccttgccgaaacacatcaaacacttaaattaaatgatttgcgtagtcgcgtaaaattagaaacggatggtaagttactgacgggtaaagatgtagcttatgcttgtgcgcttggtgcagaagaatttggtttcgcaacagcaccacttgttgttttggggtgtattatgatgagggtttgtcataacgatacgtgtccagtaggggttgcaacacaaaacaaagatttaagagctttgtttagaggtaaggcacagcatgtagttaactttatgtattttatagctgaagaattacgtgaaattttggcttcacttggtttagaaacagtagaagagttagtaggaagaacagatcttcttcaacgttcgacgcaattgaaaccaaatagtaaagcagcttcgcttcaaatagaacgtttaatagaacaatttgacggggttaatacgaaagagatatcacaaaaccatcatcttgatgaaggattcgatttgaattatctgtacccagacgcacgctatagtattgaaaacgggcactcttttaccggaaattatgttgttaataatgaacagcgagatgtaggtgtaattacaggtagtgcgatagctaaacaatatggagaagaaggattacctgaagatacgatacttgcttacactgaaggtcatgcaggtcaaagcttagctgcatatgcaccacgcggattaacaatccatcataccggtgatgctaatgactacgtaggtaaaggattgtccggtggaactgtcatcgtaaatgctccaaatagtcaacgtgaaaatgaaattatagcaggaaatataaacttttacggggcttctagaggtaaagcgtttatcaatggtaaagctggtgagcgtttctgtatcagaaatagtggtgcagatgttgtagtagaaggtattggtgatcatggacttgaatatatgacagggggacatgtcattatcttaggagatgttggaaagaactttggccaaggcatgagcgggggcgtaagttatattttctcttctgacgtggagaaatttaaaaaggttaatgcgcttgaaactttagaattcagtagcatacgttttgatgaggaaaaatctcttatcaaagacatgcttgaagcacattttaagcatacacgtagtaacaaagcacgccaattacttgaccaatttgacaatattgaaaagttagcaattaaagttattccgaaagattacaaattaatgatgcaaaaaattgatttgaaaaaacgtcaaatggaacgtgaagatgaagcaacactggcagcgttttatgatgacagagaaacaattgaacaagagctacagccagcagtcatttattaaagaagtgagggattatcatgggcgaatttaaaggatttatgaaatatgataaacagtcgctatcagaattgtctttggtagaccgtctttcgaatcatgaagcgtttcaacaacgcttcactaaagaagatgcttcgattcagggtgcgcgctgtatggattgtggaacacctttttgtcaaactgggcaatcttatggaagagaaacaataggatgccctattggtaattatatacctgagtggaacgacttagtctatcatcaagattttaaagctgcttacgaaagattgagagagacgaataattttcctgaatttacaggaagagtttgtcctgcaccatgtgagcaatcatgtgttatgaaaattaatagagaatccgtggcgattaaaggtattgaacgtacaattattgatgaagcatatgagaatgagtgggttcatcccgcatatcctgaagatcataaagaccaacgagttgctatcgtaggtagtggtccagcgggacttacagcagctgaagaattaaactttaaaggctataaagttactgtttatgaaaaggcgcatgaaccaggcggcttgctaatgtatggtataccaaatatgaaactagataaagacgtaatacgtcgacgtgtatcacttatgaaagatgctggggttttatttaaaacaggcgttgaaattggcgtcgatgtgagccgtgaaacacttgaagaaaattatgatgctattattttatgcacaggtgctcaaaatgcgagagatttaccattggaaggacgaatgggctctggtattcattttgcaatggactatcttactgaacaaacacagtatctaaatggtgagattgaaagtttgagcattactgctaaagataagaatgtaattattataggtgctggtgatactggtgcagactgtgtagcgacagcattacgtgaaaactgtaaatctattgttcaatttaataaatatacgaaacagcctgaagagattacttttgaaagtaatacttcctggccattagcaatgcctgttttcaaaatggattatgcgcataaggaatatgaagct

SEQ ID NO: 3852 - DNA, 3516 bp, Artificial Sequence
  Description of Artificial Sequence: synthetic nucleic acid sequence
gctaatggtttatggtcattttgtgtaacatggggctttttacaatctaaaaaatcacaacgtgtttttacttggatttcactcatagtatttttagtgatttcttatattggtgttgcagccgttattgcgtttatataagtatacgaattttcattttgaaacaagcgagtatagataaatttactacttagaaattatgaaacgttaaaaattaactgtttcgtatttagtttatatctgaaattaaaagtagggctttagatttaaatattcaggggagtgacatttctatggcagagaaaaaaattattgttgtcggtggaggactagctggtctgatgtcaacaattaaagcggcagaacaaggtgcacatgtagatttattttccattgtaccggtaaagcgttcgcactctgtttgtgcacaaggtggcataaatggtgctgttaatactaaaggtgagggagattcaccgtggattcactttgatgatactgtttatggtggagacttcctggctaatcaaccaccagtcaaagcaatggctgatgctgcacctaaaatcatccatctgttagatcgtatgggggttatgtttaacagaacgaaagaaggcttattagactttagacgttttggcggtacactacatcatagaacagcttttgctggcgcaacgacaggtcaacaattgctttatgcattagatgagcaagttcgttcatttgaggtagatggtttagtaactaaatacgaaggatgggaatttctaggtattgttaaagacgaagaagatgctgcaagaggtattgttgctcaaaatatgacaacatcagaaattcaatcattcggttcagatgctgtcatcatggcaacaggtggtcctggtattatctttggtaaaacgacgaattcaatgattaatacaggttcagcggcgtcaatcgtttatcagcaaggtgcgatttatgcaaatggtgaattcatccaaatacatccgactgcgattcctggagatgacaaattacgtcttatgagtgaatcagctcgtggtgaaggtggacgtatttggacgtataaagatggtaaaccttggtacttcttagaagaaaaatatccagactatggtaacttggttccacgtgatatagcgacacgtgaaattttcgatgtttgtattaaccaaaagttaggtatcaatggagaaaacatggtataccttgatttatctcataaagatccacacgaattggatgttaaattaggtggtattattgaaatttatgaaaaattcacaggtgatgatccacgtaaagttccaatgaaaatcttcccagcagtgcattattcaatgggtggtttatacgtagactatgatcaaatgactaatatcaaagggttatttgcagctggagaatgtgatttctcacaacatggtggtaaccgtttaggtgccaattctttactttcagctatttataacataagcaaatatggtagccatgagtggatctattttttctcggttcatcttcttttcaatcattaatgagtcattggtatcttttgccacagcatttttgactgcaatgtctagtaacggatttttatgatgcttgatgtccccattaatcactttcagtctaaaatccagtatcggattagatagtgtttgtggcccttgtctgatttctactaaatcataaggccaatctctacgctcaatttctgcaataacaccatgtattgagtaaggatcataacataacgcttgtacgtctaatttatattggtcgatataattctcaatgtaatttaaaacttggtcagtattgataattccactttgtaaatcggtaatcgtacaataaccactttctgcaagttgtctgtaatcaataaagtctctatcaatcttgccatctaatccacctttagtagccacaaacgaatgactagttacataatactcttgattatcttcatcaagatgaacaaacgatactgcggttaagtcgtcagcacgcgataagtctaaaccgatataagttttagagccatttatatcaaagtctatttcatttttcttccaatcattgaaatctaaataagattctgtgcttgctgcacgccacatattgaaattctttattaatatcccatttaatcctgaaccactatcaattgcagttttaacttctggttgaatattcttagttaacaattgtgccatttctggcaactccataagtggattggatttaatccaagttttaacgtcatatacttctttctcatcatcttgttcagcacagaaaacaaagtagttttcattttttgctatgccgtcaagtatcttatcaatatataaatattcttcatacatcggaccattcaaattagttccagctgttgagataataattaatatagggttgtgcagtagcacttgcccacgtcttaacgtttcataaatctttttatctttagcttcatgatattcatcgatgattgcgtagctaaactgatgaccttctaaatttgcagcttcatttgaaacggctttaactttacttcgatcattaatattcaatatttcttttgcacttggcgttatcttagtcatcgatttaaccttaggagaaacgcttctaatagctttcagttgtgccaatgtcatatcgtatgctataccagcttggtctcttgaattggcgctcaaaccaatcaaccgttcattcaacggatctttacccatcaataaatcgtacaatgccattccagagatcaataatgttttaccattttttctgctcattgatatataggcttttgtaaatcttttgtacccatgtctgtcgtaccaaccatttaagctaccagcaatgaatttttgaaaaccgcctaacgataattgtttaccagttttaggatctggcaacatttcaagaaacttaataatgtgattagctttctttacatcaaaatgataagggagttccgaatcgttcaagtcatctaaatggcgttgacaggctttcacgttttttttactagctataatatcgccattaactactttttttgcatattctgtaacataatccctaatctttgccattcattaagtcctcaaattcatctttcttttctttctttgtatctggcgacaatatttttaaacgtgactcaactgtcaatcctaatttaggacaaatggagttcatagcatttacgctatctctttgtactgtgtaataactagataatttcgttcctctttcggtttcgacgatcataccctctttttctaattggatcgtggcgttcttgtaattgctatatgtttgacaataggtggctaataaccccatatctaaagctgctattggtagttcttgaatcaaaggtaatatgcgatgccattcttttattgcatctttatcaagccattcaggaggtttttcatctatctcagtgagttgcgccatcgctttttctgcattttcttt

SEQ ID NO: 3853 - DNA, 3234 bp, Artificial Sequence
  Description of Artificial Sequence: synthetic nucleic acid sequence
aataccccgataagattgtgaattctacacaatcttatcggggtgttctgttacattattgaataggtttaatagcaatcgtaccacgcatgacactgattaattggtcatggtcatctttgatatcaatattccaaacttgtgttgtttttccttgatgtattaaagaagcaaatgctctcactagaggtctatcaactcgtattgaagtacgctcagttgaccctgcagctaacccgtacatggcattagcagcaatcttagaagcagggttagatggaattgagaataaacttgaggttccagaacctgtaaaccaaaatatctacgaaatgaatcgtgaagaacgagaagcggttggtatccaagacttaccttcaactttatacactgcgttaaaagcaatgcgtgaaaataaatcaattaaaaacgcattaggtaatcatatttacaatcaatttattaactcaaaatcgattgaaagtccatcacccaatcgtttaaggaggctatatcaatgattcctggtgaaattattgttaaaaatactgaaatagaagtcaataaacatcatcccgaaacggtgattgaagtaaaaaatacaggcgatagacctatacaagtaggttcacatttccactttttcgaagcaaataaagcattagaatttgatcgtgagaaagcatatggtaaacatttggatattcctgcaggagctgcagtgagatttgaacctggagatgaaaaaaaagtacaacttgtcgaatattctggacgacgtaaaatttatggattccgtggtttagtcgatggcgatattgacgaagaacgcgtattccgtccaaatgattcaaatcaaaacgccgccgttaaaaacgatgcaggcgaagacaatgcgaataaaaaaggtggtaaataagcatgagttttaaaatgacacaatctcaatacacaagtctttatggaccaactgtaggagactctgtgagattaggagatacgaacttgtttgcacaagttgaaaaagactatgcaaattatggagatgaagctactttcggtggcggaaaatcaattcgtgatggtatggctcaaaatcctaatgtgacaagagatgataaaaatgtagccgatttagttttaactaacgcattaattattgattatgacaagattgttaaagcagatatcggaattaaaaatggttatatttttaagatcggtaaagctggaaacccagatataatggataacgttgacatcatcattggtgcaacaactgatattattgctgctgaaggtaaaattgttactgccggcggtatcgatacacacgtgcacttcatcaatcctgaacaagctgaagttgcacttgagagtggtattacaacgcatatcggtggaggaactggtgcttctgaaggtgctaaagcgactactgtaacaccaggaccttggcatattcatcgcatgttagaagcagcagaagagatgcctattaatgtaggatttactggtaaaggtcaagctgtcaatcatactgcacttattgaacaaattcatgcaggcgctataggtcttaaagtacatgaagattggggagctacaccttcagcattaagtcatgcattagacgttgcagatgagtttgatgttcaagtcgctttacatgcagatacattaaatgaagctggatttatggaagatacaatggctgctgtgaaagatcgtgtattgcatatgtatcatactgaaggagctggtggtggtcatgcacctgacttaatcaaatcagctgcatattcaaacatcttaccttcttctacaaacccaacattaccttacactcacaacactgtagatgaacatttagacatggttatgattactcaccatcttaatgcttcaataccagaagacattgcatttgcagattctcgtatacgtaaggaaactatagcagcagaagacgtattacaagatatgggcgtatttagtatggtaagttcagattcacaagcaatgggacgtgtcggtgaagttgtaacacgtacttggcaagttgcacaccgtatgaaagaacaacgcggaccattagatggtgactttgaatatcacgataataatcgtattaaacgttacattgcaaaatatacaatcaatcctgccattacacatggtatttctgactatgttggatctgtagaagcgggtaaacttgccgatttagtaatgtgggaaccagaattcttcggtgccaaacccgatcttgttgttaaaggtggcatgattaactcagcagtaaatggtgatgctaatggctccataccaacatcagagcctttgaaatatcgcaaaatgtatggtcaatttggtggtaacattacacatactgctatgacttttgtttctaacactgcatatgaaaacggtatttatcgtcaactcaatctaaaacgaatggttcgaccagttagaaatattagaaatttaactaaggcagatatgaaaaataataatgctacacctaaaatagatgtagatccacaaacatatgaggtattcgttgatggtaataaaatcacaagtgaagcagcaacagaattaccattaacacaaagatacttcttattctaggaggacataagtcatgattatagaagaaattcaaggaaatattgctaatttatctcaagatgaaaagcaaaaacatgtcgaaaaagtttatcttgaaaactcagatttggttaaacgtatacaacgtgttaaaacagatcacggtaatgaaatagggatacgtcttaaacaacctattgacctacaatatggtgatattttatatcaagacgatacaaacatgattattgtcgatgttaatagcgaagacttattagttattaaacctagaaatttaaaggaaatgggagacattgctcatcaactaggtaatcgccatctgcctgcccaatttacagaaactgaaatgcttattcaatatgactatcttgttgaagatttattaaaagagttgggtatcccctactcacatgaagacagaaaggtcaatcaagcatttcgacatataggacattcacatgattgatcaccaacatttaagactttttcagttctgtgattctcagtttcctacaggtgcatttagtcattcttttggacttgaaacatatattcaacgagaaactgtacatgatactgagacatttattaaatggt

SEQ ID NO: 3854 - DNA, 3496 bp, Artificial Sequence
  Description of Artificial Sequence: synthetic nucleic acid sequence
aagactaatagataccgaagaggctgggacataattcctagcctcagattttttatatactctacttcataatcatttcaatgacagctctaatattttcacctatatatttatcaacatgttgagcaaggtaatagtgacgtttcacatttaaagttgttatcattaatttttcataatcttctggatgaagtgctgattttgaaataattgcaaacccatttccagcctctaccatttgtttaataatcttaatattgttaatttctatcaaatatggatttaatttcaactcagaaagacctacttcctgataaaaccttgttccagaccctttttctctaacgaaacatatatccattctaggttgaatcgattttttgtaaatatacaccatttcgtcttccattatttccttacattttattgcattgtcttgaatttccttttctacaatacctatatctactctgttgtgtttaatatcatttataacagaatctgaattattaacacgtaaatgaatatgtaacttagggtattgttgcataagactggtaagctgttctgataataaatattcaccatatgtataactgcttccaattgttaaggtgcctgagatgatttcagattccgatgttaagttttgccataattcttgttcaatactttcccgttgcaatgcgtattgtaatagcttttcgccatctctagttagttttaaatatggagatttaaattcaaatattttaacattatattttaattctaaacgtttaatatcacgactcacagaaggctgcgaagtatataaattttctgctgctctagtaaaactttctgttttcattacttcaattaataccttatacggatccatgcatcattctcctttaattctaatataacatttttgatatatatactatacttattatttatttaacgctataacaataacgtgctaagatttcatatcgaggtgaaagtacatatgaaatcaataacgcaggcttcatttatgaaaggtattatgtttacatttacgattgcaataatcagttatatattagctaaatttcctattttacatacgattggggcgttagctattgccatcatttttgcgatgatataccgccaagtcataggttatcctgagcatattcgcccaggtattacgtttgcatcgaaacgtttattaaaatttgcgattatcttatatgggttaaaattaaatatgggagatattctaggtaaaggttggaaattactacttattgatattatcgtaattatcttttcaataagtttaactttacttttgaatcaaattattaaaggaaataaagatatctctatactacttggtattggtacaggagtatgtggagctgcagctattgcagctacagcaccaatcttaaaatctaaagaaaaagacattgcaataagtgtaggtattattgcactagttggaactatatttgcacttatttatacagctatcgaggctatttttaacatacctactataacttatggtgcttggacaggtatcagtctacatgaaatcgctcaagtcgttttagcagcaggtattggcgggtcggaggcaatgacatttgctttacttggaaaattaggccgtgtgtttttacttattccattaagtattgtcttgattttgtatatgcgttataagtcacactcaagtcaagtacaacaaaaaatcgatattccttactttctaattggatttattataatggcttgtatcaatacatttgttcctattccttcattacttatgaatattataaatgttattacaacgttatgtatgttaatggcgatggttgctctaggattgaatatcgttttaaaagaagttatttcaaaagcacttaaaccattcattgtgatctgtataacttcaatttgtctgtctggtgtgactctcttagttacgtctataatgtttaaataaggtgacatgttatatgtttatatttaaaataaaaaagaggctagaaattatgtcctagcttttatgttgtatttgtaatttatatatatgaataaattttcaatgtaactcattgtgcagaaaatttaaatgcttttggaaataaagaattaatgaccgtaggagaaatgtcttcaacgacaattaatcattgaaaaggatttgaaattagatataagttattcaagtaagtctattacttttaaaacttttccatcttttaactacggaatttttggtgatcattttacaccttttacagctactgtcagaagtactgttttttaaaagttaccagatgttttcaatatactatttcaaaacatttagccacagaatttaagttcaaagaattttcaagacgacgataattacattttaatgaggttcaaaaaatcgtcgtgtttgtcttttaagtgaagaagattaaatttttacgcttgcaaagagaggcagaattatagtaatatagttcttaccgtgctaggtggggaggtagcggttccctgtactcgaaatccgctttatgcgagacttaattcctttgttgaggacgtatttttgtgaagtctgcccgaagcacgtagtgtttgaagatttcggtcctatgcaatatgaacccatgaaccatgtcaggtcctgacggaagcagcattaagtggatcctcatatgtgccgtagggtagccgagatttagctgtcgacttcggtaacgtttatgatatgcgttcgatacaaaggtgcatggttttttactttagatttaagcaaatttttatatagataataaagatctaggttatgaaacttagatgtatagtccgatgtgaagttatttaaatttcattcagggctatttttttatttacaattaaactaaatataatagctattgatttctatcttaagttggagtagttactacgaaacactataattatttatctaaatattcatttcaatgtttgatgttaagtgtgatgttttacttcaagtcatttttattaaatggattaataacgaataatttgttaaagttatatcgttgtaaaatgaaaacctagttaattaaaaaatttacgtcgaaatatagaatggcttattaaaatggaggatacatgcatatttatttaagtactttaacagaggtcgattatgaaacgtcactaaatagtatagaaaataattataatctaaatccagaatccagttggcaagatcgagcgcgcgttaaaaatctaagaaaacttgaaagctacaattatgaattagaagttatagctaagaatgaattgaatgaagttataggtcacgttgtgttagcagaggttaagttgtcgtctaaaaacaaaaaagcgatagcgttagccattggtgcactgtcagtagataaatctattcgaaaccaaggtttaggtcaagccctgttaaaagctgtagaagaacgtgctaaagaacaaggct

SEQ ID NO: 3855 - DNA, 3080 bp, Artificial Sequence
  Description of Artificial Sequence: synthetic nucleic acid sequence
gacacttaaagaaactcaagatgaagttcaaaaaatcttagacgatgctaagattcaagcacgtaagcaacatgaagaaattattcatgaagctaacgaaaaagctaatggtatgattgaaactgctcaaagtgaaattaatagtcaaaaagaacgtgcaatttctgatattaataatcaagtttctgaactatcagtacttattgcatctaaagttcttagaaaagaaatttcagagcaagatcaaaaagaattagttgaaaagtatttaaaagaggcaggggataaataatggcaaaggtagcaaaaaaatatgccaaagcattatttgatgtcgctctagatacaaatcaactagatgttgtctatgaagatttagaaacaattagccattcatcgtttgatttcatcaaacaacttaaagcaattgatagtaatccaagcttaactgcaaatcaacgtgaagaatttgtagaaagagtttacaacgaagcaaatccatatgtggtaaatactttaaaagtattagcagataaccgacatatttcaattgtagagaatgtttttaaatcattccaaaatttatataacaaatactacaaacaagattttgcaattattgaatcgacttacgagttaagcgaagatgaaatatcaagaattgtagaacttatcaaaaagcaaactgaattatcaaatgtaattgttaacactaaaatcaatcaagatttaattggtggatttagagttaaggttggaactacagttatggatggtagtgttagaaatgaccttgttcaattacaaagaaaatttgaaagagctaactaatatttaaagaggagtgacatagatggccataaaagctgaagaaatcagtgcattgcttcgctcacaaattgaaaattatgagtcagaaatgtccgttacagatgttggtacagtactccaaattggtgacggtatcgcattaattcacggacttaacgacgttatggctggtgagctagtagaattccataacggtgttcttggtttagcacaaaaccttgaagaatctaatgtgggtgtggttattttaggaccatatgaagaaattagtgaaggtgacgaagttaaacgtactggccgaattatggaagtaccagtcggagaggaaatgataggaagagttgttaatcctcttggacaacccattgacggacaaggtccaatcaatgcgactaaaactcgtcctgtagagaaaaaagcaactggcgtaatggatcgtaaatctgtagatgaaccattacaaacaggtatcaaagcaattgatgctttagtaccaattggccgtggtcaacgtgaattaatcattggtgaccgtcaaactggtaaaacaactgttgcaattgattcaatcttaaaccaaaaagatcaagatacaatttgtatttatgttgcaataggtcaaaaagattcaacagttcgtgcaaatgttgaaaaattaagacaagcaggtgctttagactacacaatcgttgtatctgcatccgcagctgatccagcaccattactttatattgcaccttattctggtgtaactatgggtgaagagttcatgtttaatggaaaacatgttcttatcgtttacgatgatttaactaaacaagcggcagcataccgtgagctatcattattattacgtagaccaccaggtcgtgaagcatatcctggggacgtgttctacttacacagtagattattagaaagagctgcaaaacttaacgatgatcttggaggcggttcaattactgctttaccaatcattgaaactcaagctggcgatatctcagcatacgttccaacaaatgttatctcaattactgacggacaaatattcttacaatctgatttattcttctcaggtgttagaccagcgattaatgctgggcaatcagtatctcgtgttggtggttcagctcaaattaaagcgatgaaaaaagttgcaggaacattacgtttagacttagcttcatatcgtgagttagaatcatttgcgcaatttggttctgatttagatgaatttacagctaaaaaattagcgcgtggtgaacgtactgttgaagtattaaaacaaggtcaaaataacccactgcctgtagaacatcaagtacttattatttttgctttaactaaaggttacttagatgatattcctgtccaagatatcaatcgttttgaagaggaatttaaccactgggctgagtcaaatgcaactgaattattaaatgaaattagagaaactggtgctttaccagatgctgataaatttgattctgctatcacagaatttaaaaaaggatttaataaatcagaagaataaaatctaatttaatcgtaatagagagtacattctaaatcttataaatcgttaaattaagattaatactccaaaggtggtgagataatggcctctcttaaagagatagatagtcgtattaaatcgacaagtaagatgaagcaaataacaaaggcgatgaacatggtttctagttcaaaattacgtagagctgagaaaaatactaaatcatttagaccttatatggaaaagatgcaagatgctattacagctgtagctggttcaaatagtacttctaatcatccaatgcttaaatctagagatattaaaagaagtggttacttagtaatcactagtgataaaggcttagccggtgcctatagtacaaatgttttaaaaagcttagtaaacgatatcaattctaaacccaacgacagtagtgaatatagtctaatcgttttaggtcagcaaggtgtagatttcttcaaacatagaggatatgaaattgaaagttctttagttgaagttccagatcaaccttcatttaaatctattcaatctatagctaaacatgctattgatttatttagcgaggaaaacatagatgaattgactatttattacagtcattatgttagtgtcttagaaaataaacctgcaactaaacaagttttaccattatctcaagaagattcaggtcaaggacatggtcaaatgtcttcatacgaatttgaaccag

SEQ ID NO: 3856 - DNA, 3985 bp, Artificial Sequence
  Description of Artificial Sequence: synthetic nucleic acid sequence
aaatctgcctaacgatgaaatgaaaggtcgtatcataggtagagaaggtagaaatatacgcacattagaaacacttactggcatagatttaattattgatgacacaccagaagcagttattttatcaggttttgacccaattagacgtgaaattgctagaactgcactagttaatttggtttctgatggacgtattcatcctggacgtattgaagatatggtcgaaaaagctagaaaggaagtagacgatatcattagagatgctggagaacaagctacctttgaaataaatgtacacaatatgcatcctgatttagtgaaaattttgggtcgattaaattatcgaactagttatggtcattcattgtttattattatatatttaagtgattatcttagtatagaaaatgcctgagacaatgattgtcccaggcattttatttattggcaattgacaaccgagttgaacttgggctaatctcaattttcaactctagtcctcattaccaagtgagacagcgaattacttacgctttctatctcactcttcttaatttaatatttaacgttataattgtagtaactcaatatgcgaaattaaagttataataatttaattatgattctgttgtttcttttttagctgtaatttcataaatatcatacttaaattctttaccatcatgatcaattgttacttctttaccttcaattttatttccatctaaaatcaattcgcttaaattatcttcaaccgttttttgaattgctctaatgagtggtctagcaccatattcaggatcatatccttcttctgcaattttttctttcgctttatcagtaacaacaatattaatattttgctctgaaagacggtgagtaagtttatttaccatcattgtaacaatttcttttaattcatcttttgtaagtttgtggaagacaataatgtcatcaacacggtttaagaattctggtcggaatgaattttttaattctttcatcattgtttttctgacagtttcgtagtcactaccttctgaagcacctccaaaaccagcaaagcgttggtcctgtaattcttgagctcccacattagaagtcataataatcacagtattacggaagtccacagtacgacctttagtatctgttaaatgaccatcatctaaaacttgtagaagaatattaaatacgtcaggatgtgctttctcaatttcatcaaataaaatcacagagtatggtttacgtctaactttttcagtcaattgaccgccgtcatcatgtcctacatatcctggaggtgcaccaactaatcgactgacagcatgtttctccataaattcactcatatctacgcgaatcattgcatcgtcttcaccaaacatagattcagctaaagcacgagccaattcagttttacccacacctgtaggtcctaagaaaataaaactaccgattggacgttttggatctttaagaccagcacgagctcttctaacagctttactaattgaattgacagcatcgttttgtccaatgacacgtttatgaagtgtatcttcaagattcaataaacgatctgattcagtttcattaattttagttaaaggaatacctgtccaaccagctattacttcagcgatattttcttcagataaggcagtatctaaaccaccttgtgcatttttccattcatttttagcatcttcatattgcttttcaagtttagattgcttatctcttaaattagcggcattttcaaattcttgagcatgaactgcagcatctttttcattttttactttatcaatttcttgttcaatctcttttaaattacttggcgttgtatgacttttaagtctaacttttgaacttgcctcatcaattaagtcaatggctttatctggcaagaaacgatctgaaacatagcgatcactcaatttagcagccgcttctaaagcttcatctgagatattaattctgtgatgagcctcataacggtcacgtaatccttttaagatttcaatcgtgtcttcaactgtaggttcatccacttgaattggttgaaaacgacgttctaatgcagcgtctttttctatatttttacgatattcatctaatgttgtggcacctatacattgcaattctccacgagctaaagcaggttttaaaatattagatgcatcaattgctccttctgcgccaccagcgccaactaaagtatgaagttcatcgataaatagaataacattaccagcttgatggatttcctccataacttttttcaatctttcttcaaattcaccacgatatttagtgccagctacgactgtacccatatctaatgacattacacgtttgtcttttaaagtttctggtacttcatttttaacaattgcttgcgcaagcccttcagcaattgctgttttaccaacaccgggttcaccaattagcacaggattatttttagtacgacgacttaaaacttcaattacacgagtaatttctttatctcgtcctacgactggatctaacgttccatctttagcaataacagttaaatctctagctaatccatctaaagtaggcgtgttattagacttattagcttgcgcatttttattactcatttctggacttcctaaagcttttacaacttgggcacgtgctttagtaatatttaaatctaggtttgcaaatacacgtgctgcaacaccttcattttctctaattaaacctaatagtatatgctctgttcctacaaagttatgatgtagctttcgagcttcatccatagacagttcaattactttttttgctctcggtgtataatgtagtgtgcccatttgctcttgaccgtgaccgataagtttttcaacttcttcgatgactttatcttcagtaatattaaaacttactaatacctttgctgctataccttctggctctttcattaaaccaagcaaaagatgttctgttccaatattagaatggttcaaacgaattgcttcctcttgtgcatgtgccaacacacgttgtgcacgctctgtcaatctaccaaataacatgtataaatacctcctattttatatgttctcttaataaatcagctcttttttcatttactgttctattatcatcgtcatctattaaaaatggtgactgtattgctaccattaattcattaaatttaaaattttcaagcaaaatataattcaaatcaatacctagtttcacttcgctcaaacgatatgaggcttcttccatagaaataattctactgttttgtagtacacctaatgatcgataaactctatccagtgtctctacagaattgtgtttatcaagtctttctcttatttgcttttcttcatttataatttgatttacaacttcagttaagttatcgataatgtcttcttctgttttccctagtgtaagttggtttgaaacctgataaatgtgaccatatacttgtgacccttctccgtatatacctcgaattgtaaatccaaaacgattaattgtttgtgcaattctgttcattcttttcataatggagagtccaggtaaatgtaacatcacacttgcacgcattcctgtaccaatattagtaggacaggtagttaaatatcctaaatgctcatcataactaatgtctaacgctttatctaattcatcatcaattttagaagcgcgttgatataaatcctttagcgataaatcagttcctagagcctgtattcgtatatgatcttcttcgtttatcataacacttaccgattcatcatcatttaacattactgctgaagcaggttgtttcactagttcaggactcacaagatgtttcgcaaccaatttcattttactttgttgatccatcgtatctaatcgatttaaagttaagttggaaagcgcatcttgaacttcatttatcactcgatatccttcttgctctgaagggaacataagtgggtggaca

SEQ ID NO: 3857 - DNA, 2929 bp, Artificial Sequence
  Description of Artificial Sequence: synthetic nucleic acid sequence
atacattgtcaatgtatttatttttaaaataaacagatagttctttagcgctttttatacccctttccgtcaaagggacgtctaactgtccacaaaaatatagatacccgtgtttattatcataattggactgtgactcaccatgcctcactaaataaatttccattctgtctcctcatttctgacttagctacttttacttaataataaattaatagataagccaattaaaacaaaccctacaatataatcaaatatagccttgaatctcggtctgctgaataataatttaatatattgaaagatgaatacacaaaataaaaaccataagcatataactacaacaactgaaaaagcaaataacgcaacttcagatttcatatgtatattaccgttagaaaggaactgcgggaatatactaacataaaataataaagccttagggttaagacttgtacttaaaaaaccttgtctaaaagaagtgatataactcacatttctgacatcagctaaagcttgtttactaaaatcaacagaactgtgcgcactcaaaatacttttgattccgagataaataagataacaagcacccaatatttttattgttaaaaaaacaaagtgtaaactcgtaagtatgtatataattccaaaaatagctaatgaagagtataaaatatgccccgtagtaataccaaatgcagccataaaaccattcattttacttgaattaatagtgtttttcattacaataatgaaatctggcccaggtactataataatcaataatgtgataatgataaatgtaattaaaccgtccataagaaacctcctcgatgtcgttttacaattcattattacatatcaccaatggcgaatgaaaccgaacagatgcctttaaatcaaagtaataattttctcaattttgttggaaattttaaaaatcaaaacctttaatgttgtcagataaatagcaatctgataatattaaattgtagttatttagtaactacaaagtcttttatattcatgaacataatactcctggatggcgtaacccagcgccatccttttttatgttttataacatgaaaaaagcacccacaccatttttattggtttggatgctttgataactataattaatgtaactcaaacgattagacatcatcaacatctatcattgagttacgtgcgtatagataaacacacatgctttaattgtgttaattgattactttcaaataatcaagcaacacattttctacctaaattaaacttaatctatacttattatttttttcttagtgcttttaaaattaatgaaataataaagattaaaataattgaacctaataatgctggaaagatgtgaattttacctaattgtggtccccattcacctaaaatcatagtaccaacccatgatcctacaataccagcaataatatttcctagaatacctcctggtacgtctttacctaaaattaaacctgcgatccatccaatgataccgccgacaataatcatacctattaatccaaacataattgattgtctcctttacttatatattttattcactagtatgagataccccatgtcaaaaatgattaaacgttttgtaggaatttttattttactgatacaagctattttgtttttattttttcaatatttattattatcaacctcaatcctattatgttaagctattaaagatgactaaaatgaactatttataaaaatatttaaagtaggtattttacatgcaacataaaaataaatttcaacgtattaaccaaattatacaagttataggtttcctttcatttttagcaattctcactatcattacacttaacttttttataaaaggacacttacaaggtcattttgaaataggttttaatattcaaagtaatcaagtctatgtagtaacgacactaatcatagttacaatcatctgtactatattatcagctattctaaacatgctttctaataaaaaacaaaattacaaacattaaatgttaatgatggtgctacaacttcaaagtataaccccataggtatactaattgataaaatgacatcttgatgtcaacgtagatactttcatcatgaatagaagatgtggcacataaatttacatattttatataacttaagaactaaaagacatatagagattgaagaattaactactcaacttaacaagaaaaatggcacgcataacaaacctcttcaaatttgggaatggtaaactattatcatcaatcaatatttaaagatgttatgcacctaaccatttttcaacgcataatcttaactcattttgggattcaatctcataacattactgaaatatcgtcgaaggatatgtatctaaaaatctagctttcaaattcactgctttttctgccctttttaaatattccaaaacacaaaaacaaccccgtaagcctatacttacggggttttacaataaataatatattattgttcttctttaacatatggtaataaagccatatgacgagcacgtttgatagctgtagtcaacatacgttgatatttcgctgaagtgcctgttacacgacgtggtaaaattttaccacgttctgagataaaacgttttaataattcagtgtctttatagtcgatgtgtgtaataccatttgctgtgaaatagcatacttttttacgacgacgtccgcctcttcttggtccacctgccatggttaactgcctcctttgactcattttattttattcgttcattattagaatggtaaatcatcatcactgatatcaatcggtccattagcatttgcaaacggattatccgactgatttgagtttgatgaattattgttgttgtaagatgtattttgtcctgattgctgaccaccaaatccttgaccgtagt

SEQ ID NO: 3858 - DNA, 3474 bp, Artificial Sequence
  Description of Artificial Sequence: synthetic nucleic acid sequence
tattttttaaatcaacttgatgatcagttaagccaaaatttttaagcgcaccagcagcatgccatgtttgaataacagtttgcccttttttcttctgatagccacccatcattaaataatacgtatctaaaataataacctttgctttacttaatactttcatatgtctcataatatatttatttccggcaggtataaaatatgcatgattaatgttattaatatctttctgatatatttttttacctataaccgtcacatggtatccttcactacataaggcctctataataggcagtatatcttgcttaaaggtcatcattatcacaatgtgcttcgaatttatattaaacggtttaaaaaccatatttaaaagcacaatagctatgatataaatctttttaattatcaatctcattttttcaccatctttaaatttccaatcattatatcaaattataaacgatacttactttcaaagaaaataaaagcaaataatttttaattcactcaaaaattctactaggagtctcgatattataaaaaaagtaggactacgaattcatcttgaatccattgtcctacctcataacgtcaatatagcgtatattaaatttgaaatatttctaacaaacaattattataatttcttttaataaataaactaaatctttgataataagttaaatattaattcgttttatggtaaatcgttaatagaaccctcttgattgacacttttacaagaagtccgcaaagtgatctctatagcgtctatgtaaaatagaacctactataaagaataagagaatgataataacgttatatagcattaacttccaatgatctatgaaataccattgatggaacaatatcgctgctcggtatgattctgcgataaaatatactggattaaataacataatttgatgaatcaaaccacttacgccgtgattttttggcacccataaaattggagacatataaaacaatattctcattaatgcttgcataatcatctgcgtatctctaattaaaatccccaaagtggatgttaaaagtgccaccgacgatgttagcaaatatgcaaaaggtacatatataagtaattgtacaatgtgaattgaagggataattccattgaacatacaagctattataataattgctaataatcctaaatgaccatagaacctacttgttacaatataagtaggaatgattgagagtgggaaattcatctttgccacttgattgaatttctgtgagattgatttagttccttctaggacaccttgattaataaagaaccacatacttataccaactaacaaccaaaatacaaacggaatgccgtgtataggtgcattgcttctaattcctaaaccaaaaacaagccaatacaccatgatttgtaaagcaggattcaacacttcccatgcaatacctagatagttattatgattggtaattttaatttggaattgtgctagtctttgaattaaatagaagtttttaatatgttcttttaaaaccgttccaactgcgaacattaaacttaaccacgctttctcctataatagattatctatctattgtaaatcattaatagtttctctttaatttgattcattgagtccattcttaaataataacatttaactgtttatcataagctcattatattatacaatcaattcagttaaaaattgttagaaatttcgtgtaagatttaattttagaaaatgaatcactttcttaactcactgtgttatatttattttcaacaaaatcttctattcactttacactaggttaataaatttaacaactgatgtgttgtatattataatctatataaatgtttataaggaaggtacaaaaatgagcgtttcggtaaatattgaaaatttaacaaaagaataccgtatctatagaaataataaagatagaattaaagatgcattaatacctaaaaacaaaaataaaacattttacgctctggataacgtaagtttaacagcgcatgagggagatgtgataggtttagtcggcatcaacggttcaggtaagtctactttaagtaatatgattggtggctctatttcaccaagttccggtgaaataacgagacatggtgatgtgagtgtcatcgctattaatgcaggactaaatggacaattgacaggtgtagaaaatattgaatttaaaatgctctgcatgggctttaaaaggaaagaaattaaaaaattaatgccggaaattatagaatttagtgaactcggcgaatttatttatcaacctgttaaaaaatattcaagtggtatgcgtgcaaaacttggattttcaattaatattactgttaatcctgacatattagttattgacgaagcattatcagtaggcgatcaaacatttactcaaaaatgtttagataaaatttatgaatttaaagcggctaaaaaaacaatattttttgttagtcataatattagacaagtgcgtgaattttgtacaaaaatcgcttggattgagggcggtaaactaaaagaattcggcgaacttgaagaagtattacctgattatgaggcgtttcttaaaacttttaagaaaaaatctaaagcagaacaaaaggaatttagaaataaattagatgagtcacgttttgtcgtaaaataaatttgaagaaagtaaaacttaaacattaagggagtgcaataaaattcatccgaattgattgcctcccttttttactcttattttgatttcattttatatttttgtattgctacctttaacataaatttaggaatacttatcattctcccaatgcgtttccaatcaataagcacacgatatacccactcaatatttaactttctaaatatttgaggtgctcttttctttgagccactgaatacttcaaacgacccacctacgcccatcatcacagtgtgcttaaacttgtccttatgcttttgaatccattgttcttgctttggaaatcccattcctacaaaaatgtaatcgggattaaaacttgttatacgttttatgactgtttcatcttctagatgaatatagccatgatgatgtgcaaagtggatattagggtattgagattgaagttttttctctgctgactcaacaatttcatttttagatccaagcagatatacgcgctgatggctgacatgtgctattttcagacattcttcaagaagttctattcctggcacacgccgttttaagggctgttttaatcgctttgaagcttttactattcctgtaccatctggaactacataatcagcttgattaattaaatttctatatagctcatgttcagttgcataatccacgatttcaggattagcagtcactataaataaattatcatctgtattgctagatatgaattgtttaatattttctaccatttccagcattgtagtattatcaaaacttacacct

SEQ ID NO: 3859 - DNA, 3504 bp, Artificial Sequence
  Description of Artificial Sequence: synthetic nucleic acid sequence
agtaaaatcttcagcttcttctggtgcctcactcattgcgggactagcacctaaacttagtaaaccattcgcagtaaagtttttcacaacatcattggtatagcaaattacgagtggattttctgaacgtaatcgttctaaattattcatcatctaaacctactttcttcatataagcaaaatgatttacaggtcctctccccttgccaatttctggggtatgttcaatacttaatgaaataaactcttttgcttttttaactgcatcttttatggaacgacctttagctaattctgctgtaataactgctgaaaaagtacaaccagttccatgagtatgtttagtatcaaagcgtttgttctcaaaggtatacgtttcattcttagtaaaaagaaaatctttagcattatttaaatcggctgaatgccctcccttaattacaacacccttactaccaatttcattaataaagatttgacctgctttacgtatgctttcttcatcattaattttaataccagtaatttcctcagcttcaggtatattcggagtgacaacatcagccaaaggtaataatgttgattgcaaatgatttttagtattttcatccatcaatgaatcaccacttttggcaagcataactggatcaatcacataaggaatattggaatgttcctttaagtaactttgaatcaactccatcgttttttttgttgcaatcatacccgttttgatagcttgtggtaattcatcatcaaacacactatcaagttgttcctttacccatgaagattctaaattatggatatgttgaactcctagggtattttgagcaacgatacttgttatagtggccataccataaacgccacacgcgtgaaatgattttaaatccgccataacacctgccccaccggtgggatctgtgcctgctattgttagtgcaattttaggtttattcattgttatttcccccatattcccatttttcattaatatatgccatattgaagaaatgtctctcatgaatagtactttgcaagaaattttctttaatctcttttttttctgtctcactacaatgtttagttaaacggtccatcaattgatcgaacacatcaacaagttcgtccatttcagtactataaaattgaaaccatttagaagtcactgattctttatttaatttgggatcttccatcgcacgtttaccaatgacagcgtagacgtatggacagggtgccatcgctgcaatcgtgaaggctgcattttcacgtgcaaatgcattgaagtacatatgtttaatataatgatcaccacttggtggccatactttttcttttactatttcttcatatggttcattaatgaaatcagctagaacctcatgcgcttcaacttctccttctaacataaactcaatttgttctactagaaatttaacatcttccatagaactcattttgggtatgagcattgcataaatatttgtaaactcttttaaataagaagcgtctgctcttaagtattgtcttacagcttgattagataacttacctgctagtaaatcttgaataaaaccatcattgtaaatgtcatcaataataggtcttgatgcttccctcaactcttttgaaaatgtcataattagcctcctcaaaaaataaaactacttcccagcgaagaaagtagttagaccaagacatctcaatgacgaatagttaataactactttcctacgttggtattaaccaaatcaggttataagggtctgaatacattcatctcagccttttggctcccctagtagcaaataatatatgattcattatcaaccatagcaaacgattacatgtaaatcaaataagtcgtacaataaaaaaaccatcttctcaaattcgagaagatggtagatacttcatattttaattatgcagttacccaatgacctgggccaccagtattatataattttactgctgctcggtcttgtacgctttctggagcttttgcaggtgaaacacctttatattgacttggagcaacagaatcccaagttgattgtaagaattgatatttacctgctgcacctgaagatgggtttattgcatgaatatcgccacctgattcacgttgagcaatttgttgtaaatgtgaatttacatttactgatgaaccacttgaagctttacttgaagaagtttgacttgtagatgttgattttgtttgtggttgtgctgtttgctcattttgtggtgctgatacttgtacaggttgttgttgtgtagctacttgagattggcttggttgaacaggttgcgtagcattgtttgttgattcataactccaactccaagtagaaccatcagattcaaaatgatatgaattaccattgtaatcaaaattaatattataagcaccttcttgaacagggctttcatttagtgattgatcattagttaacgctttttgagctaactctgctttatcaacatttgtagtctcacttgcatgtgcgtcatgacctgcgttacctgctacaacgcctagtcctatagctaatgatgatgcaactaatgtttttttcattattaaaaatcctcctaaaagtgatttgttttcttaatttgtttacgtaacccactgtaacatctataaaaatcgtgcaggttacactgaaataaaaataaacgcctattttttacactacaattacatgaaataggatgctaatttttatgaataaccgtaatgattcctatcatgatagttttttcgagtcatattactacaatatcgttgtaatacaaatgaaatttatcagataattattgaaattataggcctttgctatgtatttaaagcgaccttttattaatattttatgattaacaaaggccgctcgagtataattgaaagaaaggataaattaatttattaaatataggatggagttttaaaggaaaagttagttgtttaaatatgaattatttctaaatcatcaggttgataagtgttgttttcaaattgattatcagagggagtttcattgtttttattttttggggacatgaattttattgtttcaacgtataattctgtaacaaaatgtgtttggccttctttttcatattttcttgaacgcatttgtccagttatacctactaaagtaccttgactagtgtacttttcaatattagtggcagttttaccgaaagctttacaaagtaaataatctgtagaaatttcattaatatcatctttgtagtttctttctgtagcaacgcaaaatgttgctattttgttatcctccttttcatagatttgagcatctttcgtcattctaccaacaatgactattttatttaacatgtgtcacctccttcttatgttctaatcataactgagcttagttcactggtcaaaaccacaattttattgaaattgttagtaaatgacgatgagattttgatatatttaaagaaaatattgaagtattatat

SEQ ID NO: 3860 - DNA, 3028 bp, Artificial Sequence
  Description of Artificial Sequence: synthetic nucleic acid sequence
atcaattgtatttttacgatgctgccgcaccaataatagaaaaagattcaattaatatggataaagtatatttgaaatcacgttatgataaaggtgaagcagcgtatcttaattgtcctatgactgaagaagagtttaaccggttttatgatgcagtattagaagctgaagttgcaccagtcaatgagtttgaaaaagaaaaatattttgaagggtgtatgccttttgaagtcatggctgaaagagggcgaaaaactttgttatttggtccgatgaaacctgttggacttgaagatcctaagactgggaaacgcccttatgcagttgttcaattaagacaagatgatgcagctggaacattatataatattgttggctttcaaacacatttaaaatggggtgcgcaaaaagaagtcattcgtttaattccaggattagaaaatgttgatattgtaagatatggtgtgatgcaccgaaatacctttattaattcacctgatgttttaaacgaaaaatatgaattaaaaggacatgataatttatattttgctggacaaatgactggcgttgaaggttatgttgaaagtgctgccagtggattagttgcaggtattaatcttgcgcataaaattttagacaaaggggaagttattttccctagagagacaatgataggtagtatggcttactacatatcacatgccaaaaatgagaagaattttcaacctatgaatgccaattttggtcttttaccatctctcgaaaaacgtattaaagataaaaaagaaagatatgaaacacaagccaaaagagcgttagagtatttagataattacaaacaaacgctgtaatttacaaataggttaactaggtagtgggtaactacctggtttttttgtgatgaatattatttaaaactaacttaaattaagtaagacaagtgagttagagaaaattatgactaattttggataaagtttgaaattaattctctaaagattttgaattgattatcaaattattgtatgcgtttttacacatatgctacaatgcaatatgatggaggggattgattttggataaaatccaagaaacatttttatatatgttaaaggttgaaagaaacttttcagagtatacgttaaaatcttatcatgatgatttagttcaatttaacaactttttagaaagagaacatttacaacttgagacttttgaatataaagatgctagaaactatttggcttttttatattctaatcaattaaaaagaactacggtgtcaagaaagatatcaactttacgtaccttctatgaattttggatgactcaagataattcaattattaatccctttgttcaactagtgcatcctaaaaaagagaagtatttacctcaattcttttatgaagaagaaatggaagcactttttcaaactgtagagcatgataataaaaaaggcatacgagacaaagttattattgaattgttatatgcaacaggaatacgtgtgtctgaattaataaatattaaactaaaagatatagatatgaacttaccaggtgtaaaagttttaggtaaaggaaataaggaaaggtttatcccttttggagagttctgtagacagagtatagaaagatacttagaagaattccaacctaaacaattagccaatcatgattatttaattgtaaatatgaaaggtgatcctatcaccgaaagaggagtaagatatgtacttaatgatgtcgttaaaagaaccgctggcgtcaatgacatacatcctctatttatgattatagcgacgataggtgaaatggtatattctccaattcttgaagaaaatcgttttaaaatggttccttctcataaaagagggacatattcagcagtgcatgctttaggatttaacctagctgaattacttgcaagatttggaattatattaggagtgtttttaacttcaatggagatggggatctatatgtttgttttattattactaggtggcatgtcactttacattgcagtgagtcgttttaataatacaaattcacaataattttttaaattagaaatgtataattcataccaaattgctcgtaattttaataaaactatatttattaagattttgttaatttttattttcctaattgttttctatagtgagaatatactaatataaatcatggctagaaaatatgatgtaagttgtttatgagttattatgggaatgaatatgaaagaaggactctaatgaatattgaagcactatattttcaaaaatatttttattttaaacatttaaatcaatcaagttcagaacacagggtgacatactgggtaaagttaagtcgcgacattgagttacgtagattaatgtatgcattattagatgtcgttcaaagtcaacctgtgttgcgtacacagtttgtgacagatgattttaatcaactcaagataaatttaagagatttttttccatttattgaaattaaagaagttaatgaaatgtcgcaaagcatagatttagaagcattctttacacgtaatttaaattcctaccatttcaatcaattacctctgtttaattttaagatatatcaatttctagatggcgcctacctacttttagatttccacgctactatttttaatgaaagtcaattaactccatttttacaacaattaaatattgcttatacccactctttaaaaagtgaatatagtatctcggatttttataattggattaaagaaatgaatcaaaagatggatcaaaatcaagttgtgtgtccatcaaagcacttcaacgtattgaatgcagacggtgataattacgcttacatacctgtaaagaatacatctgaaaagaaaaaaatgtgttctttgcatgcagaactaccatctttagacattgatgcgtggattgtaagtatttacttagcgcatcattttataagtcagtcttctgatgtgacgttaggcatccatttttcgatagataataaaaatactgagaata

SEQ ID NO: 3861 - DNA, 3015 bp, Artificial Sequence
  Description of Artificial Sequence: synthetic nucleic acid sequence
gtgctctaaagtatacaattaaattatctatcattttcacacctacaattcaatataaatccatttttcttctttcatatcagcgataaaataaccgcttccactttttgtaatccatacatctttcgtgatattaaatgtttttttcaattccgttttatttgtcattggaataacaaatccagacagtttatcattatcaccaaatatcatttttataggttgttgcgtgatcggtacaacatactttttatctttatcaggtctaagcgtttctgttactttatcatgtttttgatgtaagtgactgttaaagtactctacgtaagtactataatttgattttatataaggtgacaatttcttaaaagtatgagattcgtataacccagctggattgaaataaaacacttgatttttactaacactatatctcctttgattcatttcgacccgatatcttttgttattttctccagtaattgtaattaaactatacttaggtacttttaaatctttagacccgtttaaagtaactgatccatctaatgctaatccatatgcaagtttttcttcgtaagtatctttattctgattctgtatggatgcttgggtattaatgttccctagtttgaccatacctaagttgttaaagaaaagtacgctcattaaaacaagcccaatcaaaaagctgacaaataaggtccaaaatctcactagaaatcttggtggcttagcatgattataacgttctattcttttaaaattataagtcatttcaggaatacgagagcgattctgcttccaatcataatcaaagttctcaatttccatttctgattttaaactagtacgatctttttcatgttctctaaaagttggtaatacctgatttagagaaccttccttgcgtatctggccgtgtgatacccatgttatgtagttacttgttttgcttatcttttctacatcattatcaattaagactagtgttttattagcttcaatataatcttttgataaaactgtagctctttctataaatgtttcatctaaatgtgataaaacatgatttaaaatgataatatcgttttttgaagaacgtgcaatactaagtaaaagttgtgcgtatgatttttcgcttaaattagaaaccttttcttctatgtaatcacctaaatgtgcccattgaataatttgttcaactttatgctcagttacttcataaggaaaaagttgtacgagttcgctcacatattggctcacagttaaattattaatctttcgatcatcaatatcaccgaaatataagtttttagttcggacgaccttacctttatcaggtttcactgaaccacttaaaattctaccaatcaaagttttagaagatccaggttctccgattatacctaatgcttcaccttgatatatatgcaaagaaatattatttaggttgatgtcctcagcatcataacctaatggtcgataccatttttttgaattatgatttctatagtaatgtgttaccttgagtaattttaaaactattgagcttcccatcaattatacatccttctaaaattttaataatgctaatggtagaccttcctcaggttcactactgtttattctaaatccccatgcaaatacacccttgagtcgttctactttaaagtactgtttactaccatcattgagtttatagatttttccaggttcaattttattgcgatccacaagatagctttctgctataatcactttgctttgataaacatcatattcattcataatgccattcatctctgctttacgcattttttctttaaataattgtatttcatgtcttagttcttgctcggacatttcactcattttctttttattcattagatataccgctttcttctaatttagatttaattttatcataattatagccttttctcatgagtgcctctatggttttaataacacttttatcactgtcatattttctacaatttttattatagactttctctaaatcacgttgcaataaatggtctaatgtttcttcgtcttgagaaaaatctatttcattcataactagttgaattgtttcaaacttatatcctttttggagaagtgactgtgttactttttgctttacctttgcttcaggaccctttttagacttcatcactttttcagcaactttgatgacgtcatctaatggttgttgttgttcatatgcttcgacatatttttcaataatcgtaacttcaatacctaattgatagagtttttgtctatatatttctggtcctttatctgtagtgtgtatcatggtgttttttaaactttctgcgtagtcttcatgatcaataaatttttccttatagcaatagtcaatgacatcttgaatagcattactttgaatatcgtttttttctaaatactgtataacttctctttcagtacgtttcttataagacaagtattgaattgcaagattaacacctcgacggtagtgatcatattcttgaatattctgcatatctgacggttcaagtatttgatctttttttaagttaaatttaactaatgtatcaatatctatccccatttcaaattctccatctaaaaagagattaaagcgttctttattctttttttgtacttctattttagttacctttggcattttactatccctacttctatattcaaacgtttttcttacatatattatgacacatcattagatgtttcataaaagactttgaattttatatccctactttatgcactaaaaaaggagtaaaacagatttcatcctgtcctactcctttaaatttatttagctatcgactcaatatgttttaaaagattgatataatatcatacataaatggttaataaaatattgcttctataaactaatcccattatattcattccatttttatttgtttagtcgtttaatttccaagttgagacatagcttcttgatattgtgattcactaataaaa

SEQ ID NO: 3862 - DNA, 3045 bp, Artificial Sequence
  Description of Artificial Sequence: synthetic nucleic acid sequence
tctcatcatttgttcggtaatataagacgatttataacgtccacctaaaatagattgtgctctttgaattgctctacgtgcgtttacagaaccactaccaccaacttttccaccaccgtgacctttgagccatttagcagggtttactgtccctctgtttgtgatgtcatcatggcgacctctttcaacttggaagtgtacgtgtggaccagtagtccattgacctgaattacctgttttagccattggttctccagctttgattttaccttgttttaatattttagataagtgcataaagaacaatgtgaactgacctgttaaaagtcgtgcaacaagtcctccacctaagttgtggatagcttttacatttccatcattggtagcattgatagttgtaccatatggagcgccatagtcaataccaaagtgagcaccaccattaaaactataaccaggagcaccaccattaggataataccccgtagtaattgggaatttagtgaacgaagaaccatctccaccgcctgcagagtctaaaccttcattaaagaagtctttaataccaaaagtcatttaaataacgacctattccgtcttcattattactatacgtagtctcatttgctatttcctttaaatctttcaagccattggccattgcaatgccatgggtcgcaaactttatcatttctatatcattgtcctcatcaccaaacgcaatgatatgatcgtcggcgatgtttaaatagttttgaacatgcttgattccacgtgctttgttaatcccacgcttcacaatttctattactggaaacggtgcgccccaacgacgatgttcaatattttctgcataaaaatgtgttaacatatctttaatttcaggaatattttcttcttctgcttcaacaagtaatgacgtaggtgcttcattaagattttcaagtaaattacctgtttgaattttaggatttcccattgaaaaaccttcgtaaagtcttgaatcataactatttataaagacatagtcttttacttcagcaatgatatttgtaatatgagattgttgaagtgctgtaataatatttttagaaatttccacatcaagtacttcatgtatcactttaaaatcgtttgcttttggatgatgtacaaatgctccattaaagttaacaacaggtgtgctcatatttagttcatgataatacatctggcttgcgcgatagggtcttccagtagcaatcataacgtagtgtccacattgttgtaattcggttaatacttgtttagtgtaaggtgagatttctttattgtcatttaataatgtaccatctagatctagacaaattaaataaggttgcatatattactccttgtgttgttaattattatgtaacagtatcatagcattttattggcgttttgtcggatatttgatatattggtgtaaagaaaattttaaagaggtgatactgatggaagaagcactaaaagatagtatcttaggcgctcttgaaatggtaatagatcctgagttagggatagatatcgttaatttaggtttagtatatataaagttgatgttgatgatgaaggtttatgtacagttgaaatgacattgacttcgatgggatgtccattaggaccacaaattattgaacaagttaagagtgttttggctgagattcctgaaatttctgatacagaagtgatgattgtatggagtccaccttggaataaagatatgatgtcacgatatgccaaaatagctttaggcatcggataatataaaggatagctactcattgtttggaataatgatgtagctatcctttttaattattaaagaaaattcaataagaattatcgtatgttcatttaatatttttataaattaggcctataataaaattgaattaatattacaaatgtattacaatacttaagacttataaccttttaatgaggtatatcttacgaagtatgataattaactcaatggaaacgtgcgctatatgatagggatagctatatcacaacaatgcgtttagaggatcaagcacatgaatatacgtatattaaagtgcataatccacttcatagaaagaatgatttataaaatcaaaaagcacttgagcgtcatgctcaagtgcttttttgatatacatcaagagattgattattttaaaccttctctttcattgttttctttgttatctttttcatttttttgttgccattctttttttgtcattacgtcgtcaacttgcatgttaacttcaacaacttctaaaccagtaatatattttacttgttctttaactaagtctgtcactttacggaaaattttaggtgcagattcaccatattctaaaataacttttaaatctacagcagcttgtttttctccaacttctacagatacgcctgtagttacattgttaccgtttgagaaagcgttagtaaagctatctgtgaagccacctttcatgtctaaaattcctttaacttcacgtgctgcaatacctgcaattttttcaactacttcatctgagaaagttaatttgttttcaaattgaggttgattattttgagcttgttgttgctcttttctttcttgttcattaacacctgtttgattatcatatgcttgtttagctttattgttatctactgccataatacattctcctttatttttaaattagttttattcataaattaattgattagaaacttcttaatatctgagtctaactccatctatttaggaagtttaagaaatcttgtgtacggtctttaatatacccgataccgattcctattaaacataacactataattaaaattgtcttccaaaatccgagagttaggaataatatagctataattaaaaatgctaaaaatccaataatacgccatttaaacgattttaaaatatttataaattgttgagtagcgtcttgtccgttttgattgttattatcagccatggtatccctcccttacaatacacgtggaccagatgttttctgatcacgtacg

SEQ ID NO: 3863 - DNA, 3719 bp, Artificial Sequence
  Description of Artificial Sequence: synthetic nucleic acid sequence
ttttacacaacaacgattttgaacaccctaagttctttcatcaattatttaaacttttagaggacgtacgtatatttgaacatattagacaacaaagacctagtactacaaaaatgattgatttacgcatagaaacacgattatcttttacagaatctcaaattaatttctacaaaactaaaactgtatatactgatttactttttctttatttagaacatgcatttttaagtcaaaacttttttaatattccatccatacatccagcatttgatgatattttagttcatatgtatcagtacttaccaaatatttttcagaatcaaacatcagaagatagttcattatttcaattaggagaacttcttaaacgcatggacgaactcgacggaacacacgagtttcaaaatttattaagtgatttggagcgtggtagtgatgtggaagattaaagaatttgaacgttcatcaacaaaaatacatgaggtggtaaacgaatttgtaagaataaatgaaattaaagaatatgaagtagttggttatcaagttaattgggcggaagtttatgacgatcattactcacatattttaatcaaatactgggagtaataaataaatgactataaaaaatattggagtgtaatgttttgaaattaaatttaaagatagagataaacgacgaagatttgttagaagatgttgggtttcatagagaagtgaataaagacgcgaaggcagcaagtaaaatagatagtttaaacgaaatgtttggtatggttttagtgagattggtaaatttgcgacacgaaactatgaaagatcctaacaattgcagtggtaaagatataagaaaaagtatagacgatttcatagataatataaaagaaacaatagaagattttaaggaggaacaataaatgacaaatacattagaaattaaattattatcagaaaacgcgactatgccgaagagagcaaattctacagatagtggattggacttatacgtatcagaaacgattaacattcctgcacacgcaactaaagtagttaaaacagatatagcgattaatctgccttatgggtatgaggcgcaagtaagacctagatctggtaaatcacttaaaactaaattgcgtgtagcactaggaacaatagaccaaacataccacaaagaaataggtatcatcacagataacataggtaatgaagatatcacagtagaaaaaggagaaagattagcgcaattagttgtagcgccagttgtatatcctacacccaaacaggttgattggtttgaaaatgaaagcgacagaggtgcatatggaagcacaggagaataaagatatagtagcagagattaaaagagtactaggtaaggagtgagtgggaatgagcgttaaaaaagctagaaagaaacctgtagaaattgagtttatacaatttacagacaaagatagtgtattagaaatattgttatgggcgaggtctaaggttaagtacaaaaatactaaaggttatttacttataaatactttagaaggggaaatgatagccgatgttggcgattatatcgttaagggtgtaaacggagaattttatccagttaaaccagaaatttttgaaaagacatatgaggtgctagggaagtgacactagattcaattaactttgtttggatagccatgatgtgtttgattgttgtagcacttgttaatgtagttgctcatgtttgcatgataattttatttactaaagataagaaaagactgaaagaattcagagaaatacgaaatagagaatggatagagaaagaaaaagaatttgaaaatagaatgaaagaacaacgtgaagaattctataaaagaaatagacatattactaaagacttagataaacactttaaggagtgaacggaatgattaaacgcatattaaagatatggtttactatcgctatgtatgagttaggtaaatggattggcagagaagtttattacaagttaactgcaaacgatgaggtggaagtacctaaggacttcgacgagaaggatcacgttcatttaaatgaattatggaaagaggtatttaaatgacttggtggatagtgattattccagttatgtatctagtatgtatatgtataaagagtaagggggaacataagtgatgtggatagcattaaccattatactcggcatacttctactcatagcaataggtaacaatacagtgttacgtcaggagttagacgcacagagatatacgaatgtgtatctgtttactaagtacgtgagagattgcgatatagaagatgtggagtttgaaatacaaagagcaaagaaacagtttaagtaatggaggtaatgtaatggataatatatttaatcttgacggtagtaaaaaagaaggtattaatattcaaaaccaaatgtatgaattgaaatcaatgttacctttaatacttgaagttgctaagatgaaatctgaatatcagcacgagagattaacaagtttaagacaacaaggttttacagaagaacaagccatagaaattatcaaagtggaacgcacaccttttgatcaataataagtaatggaggtaaaaacaatgacattcggcgagaacttaaaagctattagaagaagaatgaaactcactcaacaagagatggcagataagatggatataagtcaatcatatttgtcagatatggagaatagtagaaaatgtctgaatgtgaatactgcattactaactgctaagagactagaaatatctgtgaatgaattagttaatgatgatatagacgtaactgaatataataactaacggaggtaatcacttgtatacacgagaagaagtgaaagaaatgatatataactataagtggatgaccaatattataacatcacaaatttacgatgcagacagtacatctattgcacaatatggtatagaatctgttatgcctaaggctaaaggacaagcaggcgataaagtgtttttgaaggttatgaatagaaataaagcgtggagacgtaatttaaaactcatagagaagattgagtttattgacaagtatgaggagtacataactaacgagatgaactttcatatattgcagatgattaagttaggtacgaaacttaaaactgttatggacttaatggaaataaaaagtaaatcaacattctatggttgtttaaatgaaatagtaaacgtatatatggatgcacagaaaggatattacgattaggatacacatcgaactaatcgaaccaatcgaacgtatcgaactatattatgagtttaacgctaatacattatataatatacgcataggaaaactgtataacatctttaagagtggagttgttattcagtaggtatgtgatccaacactatattcttgaggcacgttacttttgtagcgtgtctttttgtatgcacctatcttaactacccacagaataaggacgcacatattaaaggacactacttatttaaggtggggtttgaaggtgttactatttaaggtcacatacttttaggtcatcactttagtgtgtgaaatacataacaataaacattcatttatatatcaaaaggtttcattagtttaagagattaatagaaacattaaataataaataaaaattaaagtttgtttgttgttaatattatttgttgtttaacaatttctaaagttaaagaca

SEQ ID NO: 3864 - DNA, 3094 bp, Artificial Sequence
  Description of Artificial Sequence: synthetic nucleic acid sequence
tatatcttcgcgaacagtaatcgtctcagttatcatgttgatttgtctttttaattcttcagatagagcttgctttatgacgatttcattgggattaattgttgtaatctcattaagcaaggttgctgtatctttgaaatgagttactttgagttcgcctgtagaaacatcacaatagcataatccaaattcttcattttcgataaaacttaaaatataattatttttcttttcatccataccattttgatccataacagttcctggtgtgatgattcttacaacttctcttctaaccattccttttgtttgctttggatcttccatttgttcacatatagcgaccttatacccattattaatcaatgtttcaatgtaattatcagcagaatgatatggtacgccacacatcggaataggattttcttttttagcatctcttttcgtcaatgttatttcaagtactcttgatgcttctttagcatcatcaaagaacatttcatagaaatctccgagtctaaaaaatagcaaacaatcatcatattcagattttatctttaaatattgttgcatcattggtgtaatgttagccatttctattttcacaacccttattcttatatctttatttatattatatgtataaatttatggtttttaactcattcattttaacatatatgtttttgaaacgcttttgtgtaatagatacaaaaagtacgctttcatatgaacagatatcaacatttcacttataatcccctattcatcaagcgtacttcaaataaatattaatttttgttaaatctatctagtaaacctcttcttttcaaaataataagcaatatataactaattaaagccccaataaaacttgatactatgaacataagcattaatggtttaataaagaaatcttgaagtcctaaaaaccatgctaaaggtatacacattaaactaccaataacaccagtccctaatacttcaccaactgaagccataaaaatatgcttcctatacatataaaacagactggaaagtaagacacctatcatacttcctggaaaagcaaatgcgcttccagttccaaatgaaattcgtagtacagaagaaataaaagcttgcgctaaaccataccatggtccaacaaatacagcacataatacatttacaaaatgttgaacgggtgcggctttaattggacctaaaggaatgacaattaaactacttaacacgacattaatagctattaagaatgctgtgatggtcaactttctaatattcattgtacttaactcctctaaaataattattcattgtgttcttttttattatattcattgagtctatcttccattgttttgaccatcatttgtagtaaatcattcgcttcatattgtgctgaacgaaattcttcaacaataggtaattcattaatttcatcttttagattctgaattttaacttcagattgctcgagtgcattttgttttccataattttgaaaattaaccgattgtttttgttgcgctttcaaacgattcatcttttgttttattgcttgattattatgaatttgtttttctacattatgataatcttgaacaacttctagttttccaattttctctgctaaactttcgacttttcgtatgatttctttttcactatacatattattgtgtcaccattgaacgttgatgttcttgtataaatgttccatttaaagaatattgttttgcctcgtcaattttgacatcaacgagtttatattgatatagaagctataccttatgatgataaaaaagtttttgatttattatcaaacggtgacactacaggtatatttcaattggaatcagacggtgttagaagcgtattaaaaagattgcaacccgaacattttgaagatatcgtagctgtcacatcattatatagaccaggaccaatggaagaaataccaacttatataacccgtagacataatcctaaccaatttgcttatttacatccagatttagaaccaatcttaaaaaacacatatggtgttatcatttatcaagaacaaataatgctaatagcaagtcaagttgctggttttagttatggtgaagcagatattttaagaagggcaatgagtaaaaagaatcgtgcaatcttagaaagtgagcgtcaacatttcattgatggtgcaaaaaataacggttacgatgaacagataagtaagcaaatttttgatttaatacttaagtttgcagattatgggttcccacgtgcccatgctgttagttactcaaaaattgcatacattatgagctatttaaaagtgcactatcctcattatttttatgcaaatatcttgagtaatgtaataggaagtgaaaaaaagactgcagctatgattgacgaagctaagcaccaaagaattagcatcttgcctcccaatattaatcaaagtcattggtattataaggcaagtaataaaggaatatatctgtctttaggtacaattaaaggaattggatatcaaagcgttaaattaattattgatgaacgtcagcagaatggaccttatagagatttctttgatttttcaagacgtataccaaaaagggtgaaaaatagaaaattacttgagtctcttatcttagtaggcgcattcgacacttttggcaaaactagagcgacattattacaagcaattgatcaagtattagatttgaattctgatgttgagcaagatgaaatgcttttcgatcttttaactcctaaacaatcgtatgaagaaaaagaggaactacctgatcaattattaagtgattatgaaaaagaatacctaggattctatattagtaaacatccagttgaaaagaaatttgaaaagaaacaatatttaggcatatttcaattgtctaatggaagtcactaccaacctatacttgttcaatttgaccatatcaaacaaataagaacgaagaatggtcaaaatatggcatttgtaacgatgaatgatggaagaacgatgatggatggagtgattttcccagataagtttaaaaaatacgaaacttctatttcaaaggaacagatgtat

SEQ ID NO: 3865 - DNA, 3169 bp, Artificial Sequence
  Description of Artificial Sequence: synthetic nucleic acid sequence
gataagtactttatcgtctgcacctaaaaattcttcagatacaatgactgtactcgttttattttttgtaaatgaatgaatatccgtgctataaaagccatctttcaaagtactaggtttagcttttttagcaaatagacaaggaacatcaaaatgaaaagaagccataatagcaggcgcaataccagaagcttcaatagttaaaattttagtaataccagcgtctttgaaagactcataaaatgttttacctacatcattcatcaactttgcatcaatttgatgatttaaaaatccatctaccttcaaaattttctcatcgatgacaacgccatcttctttgacttttcgtcctaacgactccactcaaaaaacctcctcaagtaaattcaaattcgattcctagatacaaaaaaacctcaaactaccattaatagtttcaggatctatgagtgaacgtgcaatactttgccttaaagcaaattaagaagaagatacgcatacgtaatcctaaaaacgcttattaaatttgataaaacttaaacaattgcactcaatttatacaggcttatgtgtatcctcatttgttaccagttataccaaatgcgtttcacttttatgttgctttagcgatttaaactgctcttaatgtattggattgttactcatagtcgtgtcgtttatggcgacacggtagaaacttctaaagccatattctctagattatatgagtcatataaattattttatgataatagcaaatttttgttgtattttcaatataattaaagagatgttcacgattcaaaaagcatcaaaattcagtgtaagcgttatattaaaggatgaattatcattgaaatgttttaatacaaaattatataattatctgtgtaatagttttattaaattagactagggtataaccatgtaagacaacatttttaaaaggggcgataatcatggcaaaaattactgtagtgaataaccaagatgaattatataaagtcatcaatcaaaaaaaatctgaaggttatttagagacagaattagctgttatcagtaaaagtttcatttcaatgtttgatgttaagtgtgatgttttacttcaagtcatttttattaaatggattaataacgaataatttgttaaagttatatcgttgtaaaatgaaaacctagttaattaaaaaatttacgtcgaaatatagaatggcttattaaaatggaggatacatgcatatttatttaagtactttaacagaggtcgattatgaaacgtcactaaatagtactttactattatataacacacgatgatcgatgtctgtttccccttcttcattacgagtgatgatttgggtgtgatgaagttcttttttataattcaagtttatatccccttcttcatttttaatacgtaaaggaatatcagggtctaattgtttcatttgaatatccccatcctcattatgaagtgtcacctttttatatcgtcctttttgaactttaatgtctccagattcagcatcaaatcttcctgtgccactatttactccaacaatatttaaatccccggcattagttttaatatctatgtttttaatatatttaggtactgtaatcgtaatgtgattactaactttaccttgtattctaaaattaatatgtggacttgtttgacgctctgtaattacccaacgttgattgttcaccttgctagttacgtttaaatttttgtcattcccttttataggctgaagctgtctcataagaaagcaagccaacaatacaaagtattgtaaataaagaagccagtaaatgaatttacaaaaactcatttactggctattttctaggaattatgtcccggcctcttattttatgaaattataaaaaatattgtattcacaagaatttttacaattcatgtaaagttagtttttcttattaaaagcgccgataattttaacttgaaaatccaaagtctctaaaattgaaataattttattcacatcattatttatagcagtatcggcttgaacataaaaatgatacatacctaattgagttttaagtggtctagattcaatccacgataaatttatgttgaataaagtaaaagtatttaaaacactagctaaaagtcctggcttatcatacttaggcgtgataaggaagatagttgtgtttggatgttcaataaaatgagtatgatttttcactactaaaaatctagttacattatgagggtaatcttgtatatgttgatctaaagtatggtagccataagtttccccactcccaagaggagctattgctccaataccatcttttatcatgttaaggctttgaatagtgctatctacataatcatagtcaaactgttgacgatgaatgtagtttatgtttgactgattgctggagcaattgaatatactttatgaatatcatcaagtgaatttgaatgatgaccgtaaagtgaaaaatctatatctagttgaatttcaccatgtgcgtatacatcatgatgtgctaatgaatcagcgacaatgttaatagtaccttcaatagagttttcaatagggacaattccgacagcctgtttatctttagatacggattgaatgacttcatgcaagttagataatggaatgaagtcatactgttcatgtgattcaaattgcttagcggctagatatgaaaaagttcctttaggtcctagataatataaatgcattatgccacctcgtttaaattaatggaaagggcacttcataggttcttcttttttatagaagaaattcgtatgatgcattgtattatcatatccatgatgatagttagaagttaaagttggtgaaagtggaggtgccagccaagaccacttaccagtaacatttctgttttgttgatgttcatttcgttcaaacatttcaaattgcttcgctgcagttaagtggtcaacaatagaaacaccatcagctttaaatgaatgatacacagcatgatttaactctacgagtgctcgatctttattaaatgaattatttttaagtgtatcaaattcaaaagcttctgcaactttttctaaaagattataacgataggtgtctgtgaaattacgtacagcaatttcggttaccatataccatccattaaaaggtgc

SEQ ID NO: 3866 - DNA, 3181 bp, Artificial Sequence
  Description of Artificial Sequence: synthetic nucleic acid sequence
tgacagtatgtactttgtctatcagtagactagcaagtccataatcttgtgtgatgacgatatcattattgctagcaagttcgactattttatagtctaccgcatcgggaccgtcatcaacgtatacaatttttacatgttcgggttgtatttgttgtgaaaaatggctaaaacttcttaaaattgtaacaaaaatgcctgtccctttcgtcaattcaatgacagaattaacaacaggacaagcatctccatctataattacgttagtcttcatggttaagaatgatttgattccttatgttgttttacgacactgtcagccacgtaattttcatattttttaaattctttttttctagctttctctgcttcttcacgctgtttttgttcttctttatgacgtttttcaatattcttttgaagctttttatctaattttttaatatctttacgattatctttttctagtttttcgccttttttctcaatttcgtgatctattttaccaggagttaagccaacttgctcttcgtatttttgagtttttttcatgtctttaatacgttgtttctgattagcttcacgttgtttttgttcttctttatgacgtttctcaatattcttttgaagctttttgtccattttgtctgcttctttacgattttgtttagctaatttttcgccttttttctcaatgtaggctggatcattttccttcgcaattttcttcaattcacgcttattatcaaattcttgctttttatctcctacgtactctttgacatctgaagctttatttgaaattgcagaagttgtttttgaagtagctttagatgtagcattagttactttctgtacatctggatgttctttaatacgcttacgttcagttactaatggtacgataacgattggtaatacattgataagtgttttaatgagtttctttttgtccatacacgttgcctccataacttttactattctttttcataccctatgatacatgaaaataaacgattgatactagttgaatggttgaaaataaaattttcatattaacatcataaagcgctttattgtataacaaaattttaaaatttatgttgaaaaaaattttaactcgggttactttctcagtggaggcgataatatgaaatataagattgaaaaattggatgacagtagcgtcgtttatatgagaatgataggtacttatcaaagtgataaaaactttgaaatgatgaagacttttaagcattggattcagactaatcattattggaaatatgttgagaaatacggtgtgttaggtatagcattagataatcctctccacgttcaaagtaatcaatgtagatatgacgttgttttgagaatagatgaaacagtaaatgatcagacaatatctaaaagagattttacaggtggcatatatgctgtgtttaaagttagtcatacaaaaataaatatagagaagttctttagcaatttagaaaatattttaaatgaaagtcatttgcgtatgagaaatgaaccaattatagagagatacattgaagaagagggaacagataaagtgtgtgaaatgttagtgcctatctatgaagtaaattaaaaaacatagacaatttcgataattttagtattcatactaaaaacctttatagcaacaaaacacattttatttataataaagaaaatataagtttaataaaaaaactcccacctgtctggcgagagtttaatgattggtaactttcattacctagtaaaatctggaacatcttacaatatttcaattttatacgtaatgatgataaacaaactgaagataagttgatatacaatcatttctataatattgaaatagactaacgtatttcatacgtgcgttttattaaattcctttgccaataccgaatccgaagtataggattgctataaaaataactaagacaattctataaatagcaaaaggtactaacttaactttattaattaagtgtaagaatgttttaattgcaattaatccaacaataaatgccgctaaaaatcctaaaatgtagaatggtatgtgtgctaaatgaatatactcataatgttttagtaaagataatccacttgcagctaacataattggtaccgacataataaaagtgaaatcagatgcagctttatgattcaatttcataagaacacctgttgaaatcgttgaaccggatctactaaatccaggccacatagctattgcttgagagataccaatgacaaatgcttggaaataattaatttgatctactgtttgaggatgctgaacagttttagaatacttatcagctataatcatataaatggcacctataaataaaccaattaagactgttggtacactaaataagtatttttcaattaaatcatcaaataaaaatcctaaaatccctgctgggaccatacctactaatacatgtattaaattcagacgtcgtggttttgaacgtctgtctcccgaagtggaaggttcaggtttatgttggccaatatgtaaaatttctaagaagcgttctctaaatacccaggcggccgcaaatactgaacctaactgtataacaactttaaatgtgaatgctgattgagaaccgagaaaattagttgactttaaccacatatcatcgacaagtatcatgtgcccagtagatgaaacaggggcgaattcggtaagtccttctacgatacctaagatgatgccttttattaattcaagtaaaaacatactttacccactttcttatctctattaatttattactagtactcaaaataccatattatcatagcatagaaaatcatattgatggtgtttacaatctaaatactagaccaaagtcttataaatgtattaagttgtgactagaattattctgtgagcgaattgattttaattttttgtaaacactctataatatatgtaggtgatattattgtgaaaaaactaacaaaaatggttttaagttataaattataccccacactcatgttaatcatgagcgtttttttatcttttacggtcgttgcgcaaaacatttcaatttcacactttttaaatcacttactgtattatcaacaacaatctttattattattgttatcagttatttttatctctcttattttaagagcc

SEQ ID NO: 3867 - DNA, 3229 bp, Artificial Sequence
  Description of Artificial Sequence: synthetic nucleic acid sequence
gaaataaacttaatatcttcttttgcgatgccagattctcttacaatatatttaaccgtcataagcacagcatcaaatatttcatcaggattttcttcagacacatctacatttggtgtatgtaagtcatagccaatattatgtttcattataaacttgccattttcatcatatagcacagccttcgtactcgttgtccccatatctacaccaatcatatatttcatatttcatccctcttttctataaattaacgtaaccagaatgcttcaatattttctcctacatcatcaaaatttaaatggaatgcttttctcaatatggaggcatcatcgttctcaacagcatctataaaaacttgatgatttttatgaattctctcgaaatctttggggtcatttgccattctttgtctcattgaaatgagtatgagtgattccataacaggtttaaggtgattccaaaacactttaagatactgatggtttgttgcttgaatcatcacctcatgaaactcaaaatcatgttgtgtaaatgcttcagcatcctcaaattggactgcaaccttcatcatttctaattgctttttcatttccttaataatatgttgtgtatctgttccacttaattttgaaaaggcgaatgattcgagcatcaaacgcaaatcatacatttcctttttctcttgatcaccaaaaggaagtacctgagcgcccatacgttctaattgaatcagttgatctgtttgaagtaacttaaatgcatctctgactggtgaacgactaacattaaattgttgtgcaacttgattttcacttagttgtatatgggattcaatctcaccactcactattcctaaacgtaactcagcagctattacttgtcctgaagtcatgttttccttccactttttcggataaccatacgtcacgttctatccacctcaattcaatgcacttctacttgtatacaagtatgttaatatacaaaaattcgttttgcaagcgctttcttttaggtgttttgacattttaaaacacaatttaacaaactatttcttagaatcatttacatccatcttttattcgttcactttccatcctatcaatagagtttataaaataatgtaaaatacacttaaatcatacttacttattgtttgtttcttattattcaattatatattttgtatttcataaaaaaatataattatattgacaacgcttacttggatacttaaaatttactcgtaattatttttcagttttatacatcatcatacgattaggaggttataacatgtttaatttcttaaaaccagctagacatatcaaatcattgccatcagaaaaagtagatgatacgtataaaagactacgctttcaagtctttttaggaatatttatcggttatgctggttactatttattaagaaagaacttctctttagcaatgccttcattaattgagcaaggctttagtaaaggggaattaggtattgcattatctgcagtatctatcgcatatggctttagtaaatttgtaatgggcactgtcagcgatcgaagtaatgctcggatgttcttaactttaggtttagtattgacagcaattattaacttattattaggatttattccattctttacttcaagcataactattatgtttatcatgctgtttttagttggatggttccaaggaatgggctggccaccatctggacgtgtgttagttcattggtttagtgtcagcgaacgtggaagcaaaacgtcaatatggaatgtagcacataatgtaggcggaggtttaatggcacctattgctacgtagggtatttccatgactgcattatacaacttcggttatttaaaagggtttgaaggtgtctttatataccctgcactattggttatcattattgccatcttgtcttacatactaattagagatacaccacaatctcagggtttaccaccaattgagcagtataaaaatgattatgccacttcaactaaacaaacaattgaaacagaactaactacgaaagaaatattatttaaatatgtacttaataacaaatgggtatgggcgattgcttttacaaacattttcgtttattttgtgcgttatggtgttttggactgggctccgacatacttaagtgaggaaaagcattttgatttaagtgcttcaggttgggcttacttcttatacgaatgggcaggaattccgggcacgctactctgtggttatctatctgacaaactatttaaaggtcgccgtggtccagcaggcttcttctttatgttaggcgtaacaatctttatccttatatattggttaaatccaccaggtcacgcatggttagataatctttcattaattggtattggtttcttaatttatggtccagtcatgttaattggtttacaagcgttagattatgttcctaaaaaagcagctggcactgcggctggtctaactggtctatttggatacttattcggtgcagttatggctaatattgtattagggtttgtagttcaacattttggatggcatattggctttgtgttattaacagtcatcagcatactcgctatgttatgtttcattttaacttggaataaacgtggtcaagaacaaatcgactagtatcctgagtacgcttaatcattgattacgatgcgcatatgtcctattcagccatgtactatatattaaaatagcctaagactattcgtctcaggctatttttgtgctttgcgtcatgttgcatatatgaattcttattaatatatccaaattacattcatagcttagcaatttctacacagtaatgcatttcgtgacaatcaggacattgaagctttcttgttttaggtgtatgtgatgctgttacaaaatgaatgacactaggattaaacacatggtggcaattaggacagacatatgaaacattctttttatactttttcgttaaccaaagtgaatacatagctaccacaggcatcatcgacaagaaaggctttttcctttgagttacaattgaggtgatcaaaccaccatattgtaatgaaccaatcagagctatacttaaccataatttctttctgacacctttgagtctatgagattcttccatataaatagctatatcttgtaaataatgaattggagaaattgaattttgatgaacatagcgttgaatttgctctattttaca

SEQ ID NO: 3868 - DNA, 3229 bp, Artificial Sequence
  Description of Artificial Sequence: synthetic nucleic acid sequence
acatgttagacgaatcatctggaaagatgaatcaaagaaggtaataatcctgtagtcgaaaacatattctctcttgagtggatcctgagtacgacggagcacgtgaaattccgtcggaatctgggaggaccatctcctaaggctaaatactctctagtgaccgatagtgaaccagtaccgtgagggaaaggtgaaaagtaccccggaaggggagtgaaagagaacttgaaaccgtgtgcttacaagtagtcagagcccgttaatgggtgatggcgtgccttttgtagaatgaaccggcgagttacgatctgatgcaaggttaagcagcaaatgtggagccgcagcgaaagcgagtctgaatagggcgttgagtatttggtcgtagacccgaaaccaggtgatctacccttggtcaggttgaagttcaggtaacactgaatggaggaccgaaccgacttacgttgaaaagtgagcggatgaactgagggtagcggagaaattccaatcgaacttggagatagctggttctctccgaaatagctttagggctagcctcaagtgatgattattggaggtagagcactgtttggacgaggggcccctctcgggttaccgaattcagacaaactccgaatgccaattaatttaacttgggagtcagaacatgggtgataaggtccgtgttcgaaagggaaacagcccagaccaccagctaaggtcccaaaatatatgttaagtggaaaaggatgtggcgttgcccagacaactaggatgttggcttagaagcagccatcatttaaagagtgcgtaatagctcactagtcgagtgacactgcgccgaaaatgtaccggggctaaacatattaccgaagctgtggattgtcctttggacaatggtaggagagcgttctaagggcgtcgaagcatgatcgcaaggacatgtggagcgcttagaagtgagaatgccggtgtgagtagcgaaagacgggtgagaatcccgtccaccgattgactaaggtttccagaggaaggctcgtccgctctgggttagtcgggtcctaagctgaggccgacaggcgtaggcgatggataacaggttgatattcctgtaccacctagtatcgttttaatcgatggggggacgcagtaggataggcgaagcgtgctgttggagtgcacgtccaagcagtaaggctgagtgttaggcaaatccggcactcataaggctgagctgtgatggggagaggaaattgtttcctcgagtcgctgatttcacactgccgagaaaagcctctagatagataacaggtgcccgtaccgcaaaccgacacaggtagtcaagatgagaattctaaggtgagcgagcgaactctcgttaaggaactcggcaaaatgaccccgtaacttcgggagaaggggtgctctttagggttcacgcccagaagagccgcagtgaataggcccaagcgactgtttatcaaaaacacaggtctctgctaaaccgtaaggtgatgtataggggctgacgcctgcccggtgctggaaggttaagaggagtggttagcttctgcgaagctacgaatcgaagccccagtaaacggcggccgtaactataacggtcctaaggtagcgaaattccttgtcgggtaagttccgacccgcacgaaaggcgtaacgatttgggcactgtctcaacgagagactcggtgaaatcatagtacctgtgaagatgcaggttacccgcgacaggacggaaagaccccgtggagctttactgtagcctgatattgaaattcggcacagcttgtacaggataggtaggagcctttgaaacgtgagcgctagcttacgtggaggcgttggtgggatactaccctagctgtgttggctttctaacccgcaccacttatcgtggtgggagacagtgtcaggcgggcagtttgactggggcggtcgcctcctaaaaggtaacggaggcgctcaaaggttccctcagaatggttggaaatcattcatagagtgtaaaggcataagggagcttgactgcgagacctacaagtcgagcagggtcgaaagacggacttagtgatccggtggttccgcatggaagggccatcgctcaacggataaaagctaccccggggataacaggcttatctcccccaagagttcacatcgacggggaggtttggcacctcgatgtcggctcatcgcatcctggggctgtagtcggtcccaagggttgggctgttcgcccattaaagcggtacgcgagctgggttcagaacgtcgtgagacagttcattagtgaaattaatctagtgtatcttgaatatctttctttgtttgttcgatatcatctgttttttcttcgttttgttctttaagtttttcttctacttctttggctttttctgctgattttttttcgaattctttatttgtcataaaaattcacctctttaataggatttctgtttacacaaatgttttaccccgttattctattaataaacgtttgtaggactatagatgtatttcatgatattttaaagacaattaaacgatcttcatatataataattttgaggtgaacagtatgtcttttcttaggaaacacaccgaaattatatttagttatatcatcggtatcgtttcactttttacaggtctcattatttttattaacttacctttaatcaaacaatttaaaggtgacaaaaaggttgatacgcatgtgcataacgtatgggaattcctaaatgccttttttgccgagattataaaagtgatgagtaaatttattggtggctttccaattacaagtgccatagtaatcatcgtatttggtattctagtgatgctgttaggtcacactttatttagaactattaaatacgattatgacatttcaattttctttttagttattggcattatgtactttatcattacattattgctaatgacacaagtgtatggcttttttgctatcgtctttattattccttttacagttcatattggttacatagtttataaagatgagttgaaccaagacaatcgaaagaaccattatatgtggattattgtaacttatggaatgagttatcttattacccaaatttcgctatatggacgtattgacgcaaatgaaattgaatcaattgatattttaagtgtaaatacattcttcattattatgtggttattaggtcagatggctata

SEQ ID NO: 3869 - DNA, 3318 bp, Artificial Sequence
  Description of Artificial Sequence: synthetic nucleic acid sequence
atgttttctgtttttgtgttggaaagattgtatactatcatatgtttggccagtgattaataaactttctggaaatgagcatggatcactaattaatgaatgataacgcataactttgaaacttgacttaattcctttgtatagtggtgactgattaacaatagttaaagtatctacttttccatgtttgacacaactaccttgtataacatcgccaccgtaataacaagtgagcgcttgtgcacctaagcaaacacctaaaataggtaaattttcgaaattttcaattaatttaattaataattgattgtctaatggatgtccaggtcctggtgaaataataactgctgtaatacctttcagattacatatatctgtatcatcgggatatttaacaatcgtttcacattgtttttctacaatatctacaagattgtaggtaaaagaatcatagttatctattattaatatcatggagttacctccaataaacttttagctttaagttttgtttcttcaagttctttctctggaatagaatcatatactactccacatcctgcctcgacactgactttttcctcatcgataatcatggtacgtatagccaatgcaaaatctaaatgatgattacagttgatatacccaacaccaccgctatagatacctcttttataaggataagattcgtatattctctgtatagctctaagtttaggtgcacctgagacagtacccgttggtagcaaacttgcgatgacgctcataggagatagatggggttttaattctccaataacttcactaacgatatgcatgacatgttcataacgttctattgtcattagtttggtaatttgtgaagtgcctgttttacttattcgatgaatatcatttcttcctaaatctacgagcatacgatgttcactcaattccttttcatctttcattaatgtcttttcattattttcatcttcttttttattttgacctcttttaattgttccagctataggattcgtataaacttttccatcttttacctttacaaaactttcaggagaacttcctattacaatcggtacatctttattaatataatacatatatggactaggattttgtcgctttaaattttgatataactgaaaagttaattgatgtaaattgtgttgaaaatggtgtttataactataaattcttgaaggaactacttgaaacatatctccttcagtaattttcttttttaaaattctaatagtttgaacaaattgttgctctgatatattggtggttatatgtcgagggatggatttataatttatatcctcaaccgaaaaatgtatgttttttaaatcttcaattttacgttcaatagattcctttaatctctcttttgttctataagaaaataagttacttgcgataatatataattcatctttataatgatcaaaaacaaatacatcttccactagataaaattggacatcatgagtttgatgatcttctaatttaatatcttgtaattttttaaattcatgtcgtactaaatcaaagctacatgtccctataaagcccgaaataaaaggtaaatcttttaaatatttatctttgatttcaaaataatatttatctacaaattccttaagtcgttgatacggttgattcttaactatttcacaatgattgtctaacttaattaaaagttgagaattatctaatgtaattttgccataatgatcgaatactactatcgagtacctacctttaagtttctgttgatttgtactttcaaaaatgatctttttttgttttaattttgctaaagcttctggcgtaatttgagcattcacctttttgtatacaatatccattgatttcctccttttccgaaaaaaatcagcctccttcgttataaggacgctgacgcgcggtaccacctttattagcagaatataatatattcatagctcacttgttcaatttatgttaagttgttccacaaaacccaatttcactaaagacggtgttagttctcatctaccactaactttctggtgctacctcaactttagttacttcactttgcttcaaaaaaaccacaataacgctatcattctataaggacgcgttaccgtggtgccaccttagttaacatatatgttcactttaatgattaagttaaaatttgaaagcccatttcatctattatcatgtgctaatttacatctaccattagctttctgcttgctacaaaatataatgattactctatcaatcaaattatctgatttttctaattatttagtataatacctatcctcctccagtttgtcaactagcttaaaatgaaaatgaaaaatttgttgtgtttatctttatttcctatacaaaatgtactgaaatcaaactataaatctttctttatttaatatcttaaaatcatacataagttatatttgttattgaatacttgaaatgactcatatacaatattgttattctgaaaattctgaaacaaggaggcgctctatgcgaaatattttatttgtagggttaggccttattggcggtagcttggcgagtaatttaaaatatcattacagtaatttcaatattcttgcatacgattcggactacacacaacttgatgaagccctttctataggtattattgatcaaaaagttaatgattatgctactgctgttgagatagcggatataatcatctttgcaactcctgttgagcaaacaattaaatatctatctgaacttacaaattacaatacaaaaactcatttgattgtaacagacacaggtagtaccaaacttactatacaatcattcgaaaaagaattattaaaacatgatattcatttaattagtggtcatcctatggcaggaagtcataaatctggtgttttaaacgcgaaaaaacatttatttgaaaatgcttattacattcttgtatttaatgaaatcgaaaataatgaagccgcgacatatttaaagaaattacttaaacctacgttagcaaaatttatcgttactcatgcaaatgaacatgatttcgtaaccggtatagtgagtcatgttccacatatcatcgcttcaattttagttcatctaagtgctaatcatgtcaaagaccattctttaatcgaaaaattagcagccggtggctttagagatataactcgtatagcaagtagtaatgctcagatgtggaaggatatcactttaaataatcaaaatcatattttatctttacttaacgagattaaagaacaaattactggtattgaaaatttgata

SEQ ID NO: 3870 - DNA, 3906 bp, Artificial Sequence
  Description of Artificial Sequence: synthetic nucleic acid sequence
gattatagaagattttacctaaagcaatttttgaccatctgttaccagattttaattcaagctttccttttttatttagcacccaaccacctttatattgtccttggtcttcccatctttttggatatcctacacccggttttgtttctacgttattaaaccacatatattctgcaccaggtcgatttgtccatgtgtttttacatgtcacactgcaagtatgacaaccaatacatttgtctagattcaataccattgcaacttgcgctttaatcttcaagccaattgacctccttcatttttctaacagctacatactcatctctttgatttccaattggtccataatagttaaagtgataactaatttgtgcatatcctcctactaattgagtaggtttcaagtgaatacgagtaggtgcattatgagaacctccacgagtatcagtaatttcagaaccaggtgtctctatatgtttatcttgtgcatgatacataaacattgtgcctctaggcatacgatgagatgttacagctctggcagtaacaactccgtttctgttgtatacttctaaccagtcgttatcattaataccatggtcagctgcgtcttcatttgaaatccatacaactggtccacctctaaacaacgtcaacatgcgttcattatcttgataagttgaatgaatattccattttccatgaggtgtaaggtatcgaagcactaatgtatcttgtccacctttaacttttttatcacgagcaccaaataccattggaggtaaagtaggtttatataccggtaaactttcgccaaactgttggaatacctcatgatctatataataactttgacgtccagttagtgttctaaatggcactaaacgttcaacattagttgtaaacggtgagtagcgtcttccatctttattagagccagggaatactgcagttggaatcacttctcttggttgagaagtaatgtttaagaatgatatcttttcagaagcacgttctttagaaatatctttaagttccatacctgtttgattttctaaatcttcatatgacttttgtgataatttgccgtttgtagcagaggatatattcaaaatgacatctgctacttttctcgctgtatctattctcggtctatcatttttaactgaaatagtattatcatcattccaagttccaactatacttttaagttcttcgtactcttcactaacgctataactcacaccatgagcacctattttccctttttctagttttggaccaacagtaacgaatttatcgtaaatttgtgtatagtctcgctctacgatagaaaaattaggcattgttttacctggcacaccttcaatttctcctttagaccaatcttttacaataccgtattcagttgaaatttcttgttttgaatcatgtcctaatggtgtagttacgacatctttaaatttacctggaagataatctttcgccatttctgaaacagctttacttagagttttataaatatcccagtccgaacgcgattcccataatgggtcaatcgctgggttaaatggatgaataaatggatgcatgtctgtagaagataaatcatgtttttcataccaagttgcagcaggtaaaacgatatctgaatataatggcgtcgcagtcattctgaaatcaagtgatactaataaatcaagtttcccttctgtatcctcgcgccatttaatttcctctggtttatcatcttcatttggctctgccattaaaccagagcgcgcacctaacaagtgcttcataaagtattcttgtcctttagctgaactagaaattaaattagatctccatacaaataatgttttaggatggttttttcttaaatctggatcttctatcgcaaattgtgtatctttatttttaactgattcaatcgctttttgtaagatggcttcatttgaatcatcaccttcatctttagcctcttcaccaaataatagactgtttttattaaactgtggatatgaaggcaaccagcccatacgagcagctgttacattgtaatcagctggatgttgatgcttaatattttcagctaatggtgattttaatttatctacatttgattcttcatacttccattgatctgtagcgaaatagaaccaacttgtaccattttgtaaacgtggaggaccttgccaatctttagcgaatgcaatagtattccatccttcaattggtcgacatttttcttgtcctacatagtgtgcccaaccaccaccgttaacgccttgacaaccacacaatagtactaagttaagaattgaacgataaatagtatcggagttaaaccaatggttgataccagcccccataataatcattgagcgtccaccagtatcaatagcattttgtgcaaattcttttgccactttcgtcactaattcttttttgatacctgtaatttgttcttgccaagcgggagtatatttagaagatgcgtcatcataagatgtagcttctagttcgtgttcaaaacgttgaacaccatattgactcgtcattaaatcataaaccgtagcaattttaacttcttctccgttagctaactgaatagttctcgttgcaataggtctctcaaagataccatcaccactgctatcaaaatatggaaattgaatcgtttcaacatgatagtcactttcaaccattgataacattggatcaattggtgtaccatcctctgtttcaagtttcaaattccattttttcccttcttcccagcgttgccccattgtgccattaggaacaagtaattgttggctcaatttgtcttgaataactggcttccattcattattttcacctgacatccctaaatcagaagcacgcaagaatctacctgctttatagccattctcatcttcatctaacataatgacaaacggcatatcagaatattgcttagcatagttaataaacatatcattcggttgattttcataatattcctgtaaaataacatgtgtcattgcttgtgcaaccgctgcatctgtccccggatgtggtgcaagccaatgatcggcgaacttaacattctcagcataatcaggtgctactgaaataactttcgcccctttatatctaacttcagtcataaaatgtgcgtcaggtgtacgtgttaatggaacgtttgatccccacatcattatgtatgaggcgttgtaccaatcactggattctggcacgtctgtttgctcaccccaaatttgtggagatgcaggtggtaaatcagcataccaatcgtaaaaacttaacatttctccacctaacaaattaataaatcttgctcctgaagcataactaatcatcgacatagcaggaataggagtaaatccagcaatacgatccggtccatctttttttatggtgtataaaatttgagctgcaatgatatctgtggcatctttccaatttgctctgacgtgtccacctttacctcttgcttctttatattgtttggctttttcttcattttctacgatggatgcccatgccgcaattcggtttcctttttgttcttcaagcgcttcggtccataaatctaataatttacctctaatataaggatatttaactcttaacggactatactcataccaagaaaatgatgcacctctcggacaacctcttggctcaaattctggcatatcaggtccacaacttggataatcaatttgttgattttcccatgtaattacgccatttttgacaaatactttccatgaacatgatccagtacagttaacaccatgcgtcgttctcacaactttgtcgtggctccatctttctctatacatcttttcccattctcgacttttatgctctaataccgaccaatttcca

SEQ ID NO: 3871 - DNA, 2943 bp, Artificial Sequence
  Description of Artificial Sequence: synthetic nucleic acid sequence
aattatcttttcaataagtttaactttacttttgaatcaaattattaaaggaaataaagatatctctatactacttggtattggtacaggagtatgtggagctgcagctattgcagctacagcaccaatcttaaaatctaaagaaaaagacattgcaataagtgtaggtattattgcactagttggaactatatttgcacttatttatacagctatcgaggctatttttaacatacctactataacttatggtgcttggacaggtatcagtctacatgaaatcgctcaagtcgttttagcagcaggtattggcgggtcggaggcaatgacatttgctttacttggaaaattaggccgtgtgtttttacttattccattaagtattgtcttgattttgtatatgcgttataagtcacactcaagtcaagtacaacaaaaaatcgatattccttactttctaattggatttattataatggcttgtatcaatacatttgttcctattccttcattacttatgaatattataaatgttattacaacgttatgtatgttaatggcgatggttgctctaggattgaatatcgttttaaaagaagttatttcaaaagcacttaaaccattcattgtgatctgtataacttcaatttgtctgtctggtgtgactctcttagttacgtctataatgtttaaataaggtgacatgttatatgtttatatttaaaataaaaaagaggctagaaattatgtcctagcttttatgttgtatttgtaatttatatatatgaataaattttcaatgtaactcattgtgcagaaaatttaaatgcttttggaaataaagaattaatgaccgtaggagaaatgtcttcaacgacaattaatcattgaaaaggatttgaaattagatataagttattcaagtaagtctattacttttaaaacttttccatcttttaactacggaatttttggtgatcattttacaccttttacagctactgtcagaagtactgttttttaaaagttaccagatgttttcaatatactatttcaaaacatttagccacagaatttaagttcaaagaattttcaagacgacgataattacattttaatgaggttcaaaaaatcgtcgtgtttgtcttttaagtgaagaagattaaatttttacgcttgcaaagagaggcagaattatagtaatatagttcttaccgtgctaggtggggaggtagcggttccctgtactcgaaatccgctttatgcgagacttaattcctttgttgaggacgtatttttgtgaagtctgcccgaagcacgtagtgtttgaagatttcggtcctatgcaatatgaacccatgaaccatgtcaggtcctgacggaagcagcattaagtggatcctcatatgtgccgtagggtagccgagatttagctgtcgacttcggtaacgtttatgatatgcgttcgatacaaaggtgcatggttttttactttagatttaagcaaatttttatatagataataaagatctaggttatgaaacttagatgtatagtccgatgtgaagttatttaaatttcattcagggctatttttttatttacaattaaactaaatataatagctattgatttctatcttaagttggagtagttactacgaaacactataattatttatctaaatattcatttcaatgtttgatgttaagtgtgatgttttacttcaagtcatttttattaaatggattaataacgaataatttgttaaagttatatcgttgtaaaatgaaaacctagttaattaaaaaatttacgtcgaaatatagaatggcttattaaaatggaggatacatgcatatttatttaagtactttaacagaggtcgattatgaaacgtcactaaatagtatagaaaataattataatctaaatccagaatccagttggcaagatcgagcgcgcgttaaaaatctaagaaaacttgaaagctacaattatgaattagaagttatagctaagaatgaattgaatgaagttataggtcacgttgtgttagcagaggttaagttgtcgtctaaaaacaaaaaagcgatagcgttagccattggtgcactgtcagtagataaatctattcgaaaccaaggtttaggtcaagccctgttaaaagctgtagaagaacgtgctaaagaacaaggctattgtgctatttttgtaaataatcatcctcagtactttgagaaatctgattatgaagcagcccatttatataatatacatatagaagaaaaacgaaatcatcaatcattattagtaaaatttctaaaaccagttcaaaatgaatggtctggaatgacggtgtattatccggaagtactggattgattttaattgataagaaaatataagagcgtgatataataatgagtaattgttaatggaggtgctacggtggattaccaagctttgtatcgtatgtatagaccgcaaagttttgatgatgtggttggacaaacgcatgtaactaaaacgctgcgtaatgcaatttcaaaaggtaaacaatcccatgcatatatttttagtggtccgagaggtacgggtaaaactagtattgcaaaggtttttgccaaagctattaattgtcttaatagtgacgatggtgaaccttgtaatgaatgtgcgatttgtaaaggaatcacacaaggtacgaataacgatgtaattgaaattgatgctgcaagtaataacggtgtagatgaaataaggaatattagagataaagttaagtacgcacctagtgaatctaagtataaagtatatattattgatgaggttcatatgttaactactggtgctttcaatgctttgcttaaaacattagaagaaccaccagcgcatgctatatttatcttggcaacaacagaaccacataaaattccaccc

SEQ ID NO: 3872 - DNA, 3051 bp, Artificial Sequence
  Description of Artificial Sequence: synthetic nucleic acid sequence
ggtaattgtggattcttgtcggcattatcactttgagatgttttagtgtgacttgtattcttgctcttattgtaatctttttctgttttcttagcgtcctgactatattcatctaatatagagtctaatgctgaatctgtaatactagaatatttcttgttacgttctgagctatcatcattcgcttgagtttgttgttgctcagaagaagattgatttttgtttgtatctacgttttcgccttcttgatcttctttatccatttctccaagtaaatcactgacgtcagaatcggcttgatggttagttgtcttttctttttcatcgtttgatgattcttgatcttgtttagcagacgactgtgattgttcttgatgttgtgatggttgttttgcctgatctgcttggtctacttgatctttttcgtcattagaagaatggcttgtcttttgtggctgttcgtaatctgttatatcagaatcaaaatcaaataaattttgtatgagtgacgttaaactaaaactgtcttcgtatttattcggttcccagtatttagaaaaatctactgactgagacttaaaattatcataaagttgatcaactaaattatcatctttcattttatagttacgatgtgttgagtcagctgataatggtttattagagtctttgtccttgctgtcagaagtgctttttttatcatcagaatcgtgtttagaatcatcgttgttaaattcatctttttcagattgttttgatgtttctttttgtgattgatgttgttccattttatctgaatttgtatttttattagatgaatcttcagcaaaagctgtttgtgtagcgaaggttggcgtgataagcgccgtcgatagtaaatatactaaaaatttatttttcttcatcttatgtgtgctcccttaaaaattatttttagttattgtcataacaaatgagaatttgatataatttatcttatggtttataaagttgacaagcatcaacaaaaatgaattacgccttaatacaaatattatactaatcaacattagaaaaataaatccatttaatcaaattttaatataatatgtgtatcatctttacgtaagcaaaaaaatatgcacatttaagtaatcatctgtacggaaatgtattacaataaaaaagaataatgataattaggagtgtgaaaatgaaaaacgcactaaaactttttatcacggatttaaaaagagttgctaaaacaccaggtgtatgggtcatcttagctggtttagcaattcttccttcattctatgcatggtttaacctctgggctatgtgggatccgtatggtcatacaggacatatcaaagttgccgtagtgaatgaagaccaaggtgaaaaagttcgtggtaagaatattaatgtaggaaataaaatggtcaaaactttaaaaaagaatgatagttttgactggcaatttgtgagtagagaaaaagccgaccatgaaattaagatgggaaaatattatgcaggtatttatataccgaagaaattcacacatgaaatcactggtactttaagaaaacatcctcaaaaggcggatatagattttaaagtaaatcagaagattaatgctgtagcagctaagttaaccgatacgggatcgtcgtttgtgattgataaagcaaataaacaatttaacaaaaccgtagcaaccgctttactttctgaagctaataaagtcggactatcaattgaagataatgtacctacaatcaataaaattaagagtgctgtatatcaagctaataattcattgcctaaaattaatcaatttgcagacaagattattgaactaaataaacatcaagacgatttggatgcttatgctaatcaatttagaagtttaggaaagtataaagggaatgtattagacgctcaagaaaaacttaatgctgttaattcgtctattccggcgcttaatgaaagggctaaattgatacttgcacttgatagctacatgcctaatattgaaagaattttaaatgttgctgctaatgatgttccagcacaatttcctagaattaataggggtgtcgatattgcaagtgaaggtattgatgcagcgagtggtcagttaaatgatgcaaaaggttatttgactcaagctaaagcgagagtgggagactatcaagaagcagctggccgcgctcaagatgtgaacaaccaagcaaatcaaaatctaagaaatcaaacatcaactacaccccaaagcgctataaaatcatcgcattcggaagggaagagtcattcaagcattaaaacagtacctgtgagtcaatcaggtgagaatcaacccgtttatggtgataacattttatctaacagtgatgtaaaatcaatgaatacagctttaacagaagctttattatcattatctaatcaaacagatcaacaagcacaagctacccaacaagacattaagtcattaaaaaatatagcatatggtgttatcgcttcagataaaccatcagagtttaaagaaccattaaaaaatataaaatcacgcttagaaaacgcatctaagtataatcaacaatttatagatatcttgtcagagttggaaaaaagtgaacatgttgatctatctaatgaaattaagcaagtgaaagaagcaaacaatagcattaatgataatttaaaaagtactaatcaattaatagatgcattgtcaaatggtagctccggacaattagaagcagtcaatgtattacgtgacttacctaacttaaataaaaggttagatacattacgaaattacattaaaaaagaacttaatcgtaatttactagctgtttctaatgagattactgatcaacttaataaaggtcaaaatacattatcgacaatccaatctaaattaaatactattaaccgagtgattaacgctggtcaagatattttaaatagcggtaaaaagagaattgatacgattcaaactgcattgccagcaatcgaaaacgcatatataaatgcaatgcgaactgcacctttagagcacagtgg

SEQ ID NO: 3873 - DNA, 3119 bp, Artificial Sequence
  Description of Artificial Sequence: synthetic nucleic acid sequence
aaagcaatctttaataacattagtatatgattacaatttaaatgatattgaaatcctattatcattacatcatttgcttaaacaaaatgggcttacaacagccaatcatttaatcattaatgaaataagtattcgcgaagcaaatgaaaaattacctatccattgcagaaaagaattggcaataaatggtaaagatatactcaatcatacgaataaaaattcaggaccatggctaaaagatacacttagagaaatagaaatcgcagtcatatcaaatcaaatagtcaacactaaagaagaaatattagaatgggtggatgcacatgtcaaaatatagtcaagacgtcattagaatgttgtatgaacatcaatcaaattacatatcagggcaatatattgccgatcaactcaatatttctagagcaggtgtcaaaaaagttattgacctattaaaagaagatggttgtgatatcaagtcaataaaccacaaaggccatcaactgaattcattacctgatcagtggtatagcggtattgtaaaacctattctcgatgaacttggcctttttaatcatctagaagtttatcacactgtagattcaacacaattaaaagcaaagagagcactcgttggaaataaagatacttttttaattttgagcgatgaacaaaccgaaggtagaggtagattcaatcgtaattgggaatcatctaaaggaaaaggcttatggatgtcactagtgctaagacctgacgtacctttttctatgatacctaaatttaatttatttattgctttaggtattagagatgctattcaacaattttcgaacgaacgtgtaacaattaaatggccaaatgatatatatattggtaataaaaaaatttgcggatttttaactgaaatggttgcaaattatgatgaaatagaagcaataatttgtggtataggtataaatatgaatcatgttgaaagtgattttgacgaggatattaaagataaagcaacaagtatacgcatgcattccgatagtataattaatagatatacttttttaactgcattattaactcaaattatacatcgctttgatcaatttttacatcaaacttttgagtcaattcgagaagaatatattcacgctacaaatatatggcatcgtcaacttaaattcactgaaaataatcatcaatttttgggggaagccatagatattgattcagatggattccttattgttaaagatgaaaaaggtcaattacatcgacttatgagtgcagatatagatttataaacacaaaaatgaggagcggacattatgggaatagcaacatttgcagttgttgatttagaaacaactggaaatcaactggattatgatgaaatcattcaaattggtattacgtttgtgcgtcagaatcaagtaattgatacataccattcaatgatacgtaccgatttagaaattccaccgtttatccaagccttaacttctatagaagaagaaatgttagtacaggcaccttattttaatgaggtcgcagatgacatttatcaacttatcaaagactgtgtttttgttgcacataatatctcatttgatcttaattttataaaaaaagcttttgaaaaatgtaatattcaatttaaacctaaaagagtaatggatactttagaattgtttaaaatcgcattccctacagacaaaagctaccagttaagtgcattggctgaatctcatcatataccattaaataatgcacatagagcagatgaagatgcaacaacaactgctaaattgatgattaaagcttttgagaagttcgagcaattgcatttagatacacaaaaacaactgtactatttaagtaaaaatctcaagtatgatctttatcatattttgtttgaaatggttagaaattatcaaactaaaccgcctaacaaccaatttgaacaatttgaacaaattatttaccgtaaacaaattgatttaaaaaaaccggctgtcaattttgatggtaccttaaaagatttatataaaaatgtcactcaatcattaaatcttacatatcggccacaacagttatacctagccgaaattatacttgatcagttgatgcatagtgataaggcaatgattgaagctcctttgggtagtggaaagtctcttgcttacctgcttgcagcaacaatgtataatattgagaccggtcgtcatgtaatgatttcaacaaatacaaaattattacaaagtcagctattagagaaagacataccattactcaatgatgttttagattttaaaattaacgcgtcattaatcaaaagtaaaaatgattatatatctcttggtcttatcagccaaattcttaaagacgatacaaataattatgaagtaagtattcttaaaatgcagttacttatttggataactgaaacaaatactggggacatacaggaattaaatcttaaaggtggacaaaaaatgtatgttgaccaaaaaattgaaacatacgttccagttcgtcatgatatccattattataattatataaaaagaaatgctcaaaacatacaaattggtatcactaatcatgcgcacttaattcattcagacagtgaaaacactatatatcaactatttgatgattgcatcatcgatgaagcacatagattgcctgactatgcgctaaatcaagttactaatgatttaaattattcagatgttaaatatcaattaggacttattggcaaaaatgaaaatgaaaaactacttaaagcagtagacaaacttgagcaacaacgtattttagagaaactagatattgcacctatagacgtttttggactgaaaataaatatcaatgagttacatgatttaaatgagcaactattcactacaatttataatattattcaaacatcagacgtttatgatgatgacattcataagtatcattacgtttatgactttgaaacgggtgagattttaaaagatttacgtgcaatcatagataaattaaataaaacgatagaaatttttaacggaatgaatcacaaaacaatcaagtctgtacggaaacaattattatacttacatgacaaatttaaacttata

SEQ ID NO: 3874 - DNA, 3227 bp, Artificial Sequence
  Description of Artificial Sequence: synthetic nucleic acid sequence
atagtgacgtaatgctgaatccaactttggtatcatcttttgctgagcgcctttttgtggaccataaactattgttgctccattgtctcctaataatggattagttacatcacaggctactttaatattcacatctttcaatcgtgggtttatacgagtaatatcaatgtattctatttgagatagggctaaacctccatcgcgaatctcttgattgtttttatctttaaaagagacacctaaagcctttaacattcctacaccaccatcattcgtggcacttccacctattcctaaaataattttattaacatcgtgattaagtgcatcattaatgagttggccggtaccgtacgaagttgtaatagatggatctctttcatctttactcaataatgctagtcctgaagcagctgccatttcaatgatagctgtttggtgttcgtcgcttctcgcataactagccatgatatttctattaagtggatcttttacttctacacaataagaggtagcatttaaggcttctttcaatacttcggttgttccctcgccaccatcagccataggaataatgtcatatattgtactggaatcgaacacctcttggaatccatctttaatagctaaagcagcttccttcgccgacatactttctttaaaagaatcaggtgcaatgataactttatatggtgacatttatatcacttcctaaacaattggtttatatttattctatccaaaaatgaaattaaactaaagaaatcttgataattaaaatggaaatcatacgtgaattgtataataataagaatataaaattgacgatgagcaatatgtatatattaatatgattaaagcttcaataaatgtctatatattttcagtagataattgaataaatcacataaaaaagagaataaacatgataatcgtttaaatgttagttttgaattacatcatgaagaacagagaggtcaacaatgaataacttaaaacaatatgaatcatttttttggttaataggaatttttatcttttatcttataatggcaattctaacaccattatcaactacggattggcatgcatataaagttaatctaagtcaatatttgactcaagaaaatggtcgttatttaggacatttatttgaatgggttgccgtacataataacataataagagctttaatatatgcgataacttcgtttttagttatctatttagttgcttatatggttcaattacatacgaatcgtatttattttattttgagttttgtgttaatggttactgtacctaatacaatttatagcgaaacttacgggtggtttactggattttttagttatatacctgctacagtcctatcactttttattctttttacggtagttaaaaagattgagtcgcacgatacagtttctgaaatgcaattatgggtatttttattagtaagtttgtttggacaattcttcttggagaatctttccatcgctaatagcttaattattttaataggaatggtagtctatttctttgttaaaaaaagactcagttatttcttaattgtaggatttatgcttagttgtataggtaacattataatgtttttaaacttcaattattttttaattaaggatggattaaatacgcattattcaatttccgatagtcatggaatgatacataaagcaggtgtgacgttatttaagcttgtaccagaatatatgtttattaatcaaatgattattcttaccgtgatatcaatagtaagtatagttttacttaagcaaaataaaagcctgaagcatatgagagtttatattaaaataccactactcttaggtttaattactttacctatttataagatcttcgtttacaatcaatttcattttgaattatataaagcttcattttctatagccgttttgaatacaacgatttgcttcatttacatgataagtgtgatatacgttgtgtttaaaatgatacagcaaagatacataagaatgattgtgatggggagttttatagctatggcttcatctgttttgccacttttatttgtgacgcctataagttatagaaatttttattttatttatactttatggatcgtgatattactttgtttaattcagcaatgtgatgtgctatttaaacaacttgaacatataattaaaatatttgcgattatcatcagcatcattatgatgattggatttacttttatacatattagtagtgtgcacagaatagacttcattaaagaacaaataacacaacatcatcgctatcagaaaataacattggaaagattaccatttgagcgatatactcatatgactacaccaaagtcgaaggaacaacttcaagatttcaaacactattatgatttgcccaaagacatcacatttaaagtagtcccatatggtacaaaacaataactgttcaaaggggaaatattatgaagttaacccgaatacattatgagattataaagtttatcatagttggtggaattaatacctttaactactatataacatacttatttttgttaaaggtgttacatgtgaattatatggttagtcacattgttggatttattgtaagttttattatttcatattatttaaattgttattttgtatataaagtaaaacctacaatagaaaagtttttaagatttcctatcactcagatagttaatatggtaatgcaaacgttattattatatatattcgtaaagtggttgaatatcgcttcagaaattgcaccttttgcgggtctaatcattacaatcccagtgacattcatactttctaagtggttacttagagataaagtttaacgtaatcataagcactattttttcctttaagatgaattgaatttctttttcaaatatttaccaattcgtatttagaaaaatttaatgtatataagtctttacatattcatatatgtacaaggcttatttttaaataaataaataatgaagtgaaggaaagtatttttttaggcatatctaatgaaataattagatgaggaatataaaaaatgtagaaataaaaaaacgttgtcattgtggaactgataattcatactaatattagcaaaaaataaaggtggtaagtgaaggtgactcaaaatgaaaatttgaagttagcgcaacgaggtgcatttcttagtttagtcatctatattatactttc

SEQ ID NO: 3875 - DNA, 3117 bp, Artificial Sequence
  Description of Artificial Sequence: synthetic nucleic acid sequence
attattttcaattttaacccactcatgctctttagaatatttaaattcgctcggtactgccacgagaatcccctcctgattaatttaattacaatttaataatgccacacacatattgttcattcaactattattacaaagaataaatgaattaaaattcgtttttaaatatacaaaacaccattttaatttatatttttttattaatgttcactttctctaaattaatatcacacctataaccattggtgttgatactcattttctttaaatcctaaagtcaaatggttaccagaaatagctaatggacgtttaaccaacattccatctgaagcaagtagttctagtttttcatcatcagacatatttttaagtttctcttttaaatttaattcgcgatatttgataccatgtgtattaaacaacttattaatattcacacccgttttatctacgatatttttgaattcttttttagtcggtgtatgttgaacaatatcaatggattcataattcacatcgtgctcatctaaaaactttgcagcctttttgcacgttgtgcatttcggatactgataaaatttaatcaattaccttttacctccttctctctattaacttaaatatatcatgatatttaattgaacgctttaattttcaagctaatatttttgttaatgtgcagtcattcgttataataagtttaccaaattacaaaaggagtagatagtgatgaaaaatattcatcaaaccgaagaatttaattctactattggtagtactgatccagtaattatcaagtttgaagccgactggtgtccagattgtaaagcgatggatatgtggatagatccaattgttgaaaaatataataattatcaatggtatgcctaatccttgtattttcaaaagtggcactaacccttcaggtacttcatcttgaagtgcttgaagggtcgatgattgaccttgtgttttaaattcattaataacttctcctacgccttttccaatgcctttaagttctgttacatcatcaatctcttctaatgtacgctcatcaacctctagactttgtgcggcttttctatacgctgaaactttaaatgtattttctccttttagctccatatatatagctattttttctaataattgaattacatctttttttgtcatcaatatcactccataaaaagaagaccaggacataacattaacgttcgaatttgtcctgacctcatgtcattactttataaatttaaaataaattgtgataaataaggaatttgttcaatcacaactcgacttaatagcgattgagataattggtactgtataaatgaatgcggatatagcgataataaataaagtccaatttgtaaatatataaaaaccgctatgatactcaaaacgacactcgatatccgacttactaaatgtatctttttatacgttattatattatcaaatgtaacaacaactagatacaaaataagcttacacataccaaatattataataaatgctatcactttttcaaatctgtattgcaaatgatcataaggaatagtatagaccatgtcaaacgccaccgttttcggaaatggcacaaagacaactaaacgttgcgcaatagattgataatgttgtgacgcaatatataaagatacaattgaagaagcaaagtgcaatatcgataaccaaatacctctacgaaaccctatcactataaagtaacaaataataagaagaacaactatatcaatgagcatttattcatctctttgttttaattgatttatttcttgctgtaatcgtctgttctcttcttctaatataactttctcatgcataatattcacagatgttaaaatcgcttttcgagttgtatctaaacctgctgatttttgacctaattcttgcattttttcatcaacaagatgtgctacataacgaatatgttcagggctatcttcgccaatgattgtgaaatgttgatcattaatcgtaacatttattctatttttaaattcacccatactaatttctcctgaccttggattaaaatgattttaacttaaacaattttttcaaactccaatttattaaattgtaaattgtagtattttacatatttttacttatcatcaaatattatacatgagtgtaaataccgatgtaaacgtctgttattaaaagataatacagatgacatattcaacaatatcatttaagactatcttcaatattaaaatttgataaaatataaaagagtacaaaaaagagaggattcaattaatgggaaatgtcgtatacaaactcacgtcaaaagaaattcaatcattgatggctcaaactacttttgagacgacgaagttacctcaaggtatgaaagctcgtacgagatatcaaaatactgttatcaatatctatagttctggcaaagtaatgtttcaaggtaagaatgctgaacaacttgcgagtcaattgctaccaaataaacaatcaacaactggcaaacatacatcatcaaatacaactagtattcaatataatcgttttcattgtattggaagcgatgaagcaggcagtggcgactattttggtccattgactgtatgtgcagcttatgtgagccaatcacatatcaaaatcttaaaagaacttggtgtagatgattcaaaaaaactaagcgatactaaaatcgtcgatcttgcagaacagctcattacctttatcccgcattctttattaacattagataatgttaagtataacgaacgacaaagtctaggatggtctcaagttaaaatgaaagctgtcttacataatgaagctatcaaaaatgtgcttcaaaaaattgagcaagatcaactggattatattgttattgatcaatttgcaaagcgagaagtttatcaacattatgcattatcagcattaccttttcctgacaaaacaaaatttgaaacaaaaggtgaatctaaatcactagcaatcgcggcagcaagcattatttctcgttatgcatttgttaaacacatggaccacatctctaaaaaactccatatggaaataccaaaaggagcaagtaacaaagtagatttaattgcc

SEQ ID NO: 3876 - DNA, 3172 bp, Artificial Sequence
  Description of Artificial Sequence: synthetic nucleic acid sequence
gtcatttcagtttgaccaattccaattaaaaatttattaggatcgacttggcgcgcttctgcaagtttagccatgtctacataatatttgggtacatagaaacttattttatctatacctatattcataaggtgtgacatcctttcattttttgaagtagcactagtatcataccaaagaaaattcgttttatacaatgaaatataacagacatgaccaggaatatataataaatatgtaagcgctttacaaaaattgtgaaaagttttgaattatttgagtgcaagacaatgttagcagttgatatttaaagcgaaagttaaaaggttacattactacagtaatataaagatattttaaaggagtacataaatgaaaagtttagataaaggatttagacatttaacacgaaaagataaattaaaaaaacttgttgaatacggttggctagatgatgaaaactatgaaatattacttaatcatccgttaattaatgaggaagtcgcaaacagtttaattgaaaatgtcattggtcaaggtgcactaccagtagggttattacctcgaattatagttgatgataaagaatatgtagtacctatgatggtagaggaaccttctgtcgtagcagcagcaagttatggcgcaaaactcgttaatcaaagtggtggatttaagacaatttcaagtgaacgtctaatgattggacaaattgtctttgatgatgttgaagacacaggcacattagctaactcaatatatcaaatagaatcacaaattcatcaaatcgctgatgaagcttacccttctattaaagcaagaggtggaggatatcaacgtattgaaatagatacattccctaatcatcgattattatctttgaaggtttttgttgatactaaagatgctatgggtgctaatatgttaaatacaatattagaagcaatcactgcacatctaaaagttaaattttcaaatcaaaatgttttaatgagtattttatctaatcatgcgacagcatcagtagtaaaagtacaaggggaaatagatattgaagatttacatagaggagagagaagtggcgaagaggtagcacaacgtatggaacgagcgtcagttcttgcacaagtagatatacatcgtgctgcaacacataacaaaggtgtgatgaatggtatacacgctgtagtattggctacaggcaatgatacaagaggagttgaagcaagtgctcatgcatatgcaagcaaagatggtcattatagagggatagctacttgggaatatgatcgctcacgtaataaattggttggaactattgaagttcctatgactttagcgacagtaggtggaggtacgaaagttttacctattgctaaagcctcattaaatttgcttaatgttgaaaatgcacaggaactagggcaagttgttgctgctgttggattagcacaaaatttctctgcatgtagagcgctagtgtctgaggggatacaacaaggacatatgagtttacaatataaatcattagcgattgttgtaggtgcaaaaggcgaagaaattgcgcaagtagctgaagcgctcaaatatgaatcacaagctaatactgccaaagctcaagaaatcttgatgaatataagaaagtcataattaaaaagccgtcaaacgggtatatcttgatatatagcttcaaggatatacttatttgacggtttgtttgatttgattaataaatataattatagtttcgtgcagacgatttactaataatgcgtgtgccgtagcctaatggcacattataattatattcagaaattttgatttttccattcttatatactttttcaaccactgctacgtgcccataatagcctctcgttgattgcataacagcgtattttcgaggcttatgtccagttgcataaccagatcgacgtgcattgctataccaattcttagcattaccccatcgatttgatacaggtttacctaattgagcacgacgtttaaatgcccaccaagtgcattgttttttaccataataattatgtgcagcatgggaaatatgcgtttgttcaatagcttgatatgagagtgttccagtaaatgtaatcattgtagcgataataatacgagataataattttttgaatttcatttctttctcccaaaaaatgtatttatttaatgacagtaataataatagtatttaaaaatgcgctatacaatataagaaatgaattatcaaagtaaatgtaacattaatgaaatatacatatttttatcgtaataatcgtttgagtaaaaaaagagtgagactacattcaaataaaatgtaatctcactcaggtacgagatgattaactccatgtatataagtatgcgtaaatgttaaagtcatgtcataacatcaatttatactttagtgaattggttgaaaacagctagtgcccgtttgatactcgtcactggtatgttttccggacatggatgatttcgaaaatatgtcaagatttctttttggctcgtcacgtctttagggaaattgatatcttgattaatccaatcaaccaattcacctaatggcgtgtcatcacctaggaaattttgcataaattcgtaaaagctcaatatctcacctcataatatattttatgagccgacttttattttaacatattttcgttttttaaaatacttgaaaaactaaataaaatgttttgaattatagtttttaaatatattaatcgctagaaaggtcaattttgttgtataattaaacttactattgaattatatcaaaactagggggatatgcatggatataaaacacatgaaatactttgttgaagttgtcaaacaaggtggtatgacaaacgcttcaaaatccttgtatattgcgcaaccaactatcagtaaagcaattaaggatattgaagcagagatggctgtccctttatttgaccggagtaaaagaagtttagtacttactgatgcaggtaaaatttttttcaagaaatgtcaagaaatcatcgcactatatgataatttgcccactgaaattaatagtttgtatggtttagaaacaggtcatatcactattagtatgtctgcagtgatgagcatgcgtaaatttattggcgtattaggagactttcatcaactttatccg

SEQ ID NO: 3877 - DNA, 3099 bp, Artificial Sequence
  Description of Artificial Sequence: synthetic nucleic acid sequence
gggagaagcaattcttacgtgaatgcggttagctcctgaatccttaagcattttaactatgcgtttaatcgttgtacctcgaacaatcgaatcatctacaagtacgatatctttaccatcaacaatatccttaacagccgacagtttcacacgtacaccttgctctcttaattcctgagtaggttgtataaaagttcgagcaacatattgatttttaactagtcccatttcatatggtaggcctatttcttcagcataaccacttgctgcagataatgatgaattaggtacgcctattaccatatctgcttttgctgggttttcctgtgctaaccgtttacctgatgcctttcgtaccgcatgaacattttttcctgcaatcgttgaatcaggtctcgcaaaataaatatattccatagctgaaattgcagttgttgtttgtcgtgtgtaagtcttaacttctataccttcatccgtaataacaacatactcacctgcatgaatatcttgtataaattcagcacctaaaacatcaatcgcacatgtttcacttgctaaaatataagcaccgttctccatttttccaactactaatggtcgaatagcattaggatctactgcaccatacaacgcatcttttgttaggatggcaaaagtaaatccacccttaatgagtcgtaaactctctttcaatgcctcttcaaatgtcggcgccttactacgacgaattaagtgcataatgacttcagtatccgaagaagaatggaaaatcgcaccttgttcttctaaattttgacgtaatgatttagcgttaattaaattaccgttatgacatatacctacgctcatatcataaaagtgatataaaaatggttgaatattttcaatgcctttattaccagaggttgcgtaacgaacatgtccagctccacgtgtcaccacgcttccacctcgaacctattaacctcgtcatcttcgagggatcttataaccgaagttgggaaatctcatcttgaggggggcttcatgcttagatgctttcagcacttatcccgtccatacatagctacccagctatgccgttggcacgacaactggtacaccagaggtatgtccatcccggtcctctcgtactaaggacagctcctctcaaatttcctacgcccacgacggatagggaccgaactgtctcacgacgttctgaacccagctcgcgtaccgctttaatgggcgaacagcccaacccttgggaccgactacagccccaggatgcgatgagccgacatcgaggtgccaaacctccccgtcgatgtgaactcttgggggagataagcctgttatccccggggtagcttttatccgttgagcgatggcccttccatgcggaaccaccggatcactaagtccgtctttcgaccctgctcgacttgtaggtctcgcagtcaagctcccttatgcctttacactctatgaatgatttccaaccattctgagggaacctttgagcgcctccgttaccttttaggaggcgaccgccccagtcaaactgcccgcctgacactgtctcccaccacgataagtggtgcgggttagaaagccaacacagctagggtagtatcccaccaacgcctccacgtaagctagcgctcacgtttcaaaggctcctacctatcctgtacaagctgtgccgaatttcaatatcaggctacagtaaagctccacggggtctttccgtcctgtcgcgggtaacctgcatcttcacaggtactatgatttcaccgagtctctcgttgagacagtgcccaaatcgttacgcctttcgtgcgggtcggaacttacccgacaaggaatttcgctaccttaggaccgttatagttacggccgccgtttactggggcttcgattcgtagcttcgcagaagctaaccactcctcttaaccttccagcaccgggcaggcgtcagcccctatacatcaccttacggtttagcagagacctgtgtttttgataaacagtcgcttgggcctattcactgcggctcttctgggcgtgaaccctaaagagcaccccttctcccgaagttacggggtcattttgccgagttccttaacgagagttcgctcgctcaccttagaattctcatcttgactacctgtgtcggtttgcggtacgggcacctgttatctatctagaggcttttctcggcagtgtgaaatcaacgactcgaggaaacaatttcctctccccatcacagctcagccttatgagtgccggatttgcctaacactcagccttactgcttggacgtgcactccaacagcacgcttcgcctatcctactgcgtccccccatcgattaaaacgatactaggtggtacaggaatatcaacctgttatccatcgcctacgcctgtcggcctcagcttaggacccgactaacccagagcggacgagccttcctctggaaaccttagtcaatcggtggacgggattctcacccgtctttcgctactcacaccggcattctcacttctaagcgctccacatgtccttgcgatcatgcttcgacgcccttagaacgctctcctaccattgtccaaaggacaatccacagcttcggtaatatgtttagccccggtacattttcggcgcagtgtcactcgactagtgagctattacgcactctttaaatgatggctgcttctaagccaacatcctagttgtctgggcaacgccacatccttttccacttaacatatattttgggaccttagctggtggtctgggctgtttccctttcgaacacggaccttatcacccatgttctgactcccaagttaaattaattggcattcggagtttgtctgaattcggtaacccgagaggggcccctcgtccaaacagtgctctacctccaataatcatcacttgaggctagccctaaagctatttcggagagaaccagctatctccaagttcgattggaatttctccgctaccctcagttcatccgctcacttttcaacgtaagtcggttcggtcctccattcagtgttacctgaacttcaacctgaccaagggtagatcacctggtttcggg

SEQ ID NO: 3878 - DNA, 3373 bp, Artificial Sequence
  Description of Artificial Sequence: synthetic nucleic acid sequence
acagcgtcttcagtgccttcaaatctaggtgcgaaaccaccttcatcacctactgcagtttctaaaccgcgttcacttaagattgatttaaggttatggaagatttctgcaccccaacgtaatgattctttgaatgactcagcacctacaggtaaaatcatgaactcttggaaagcaattggtgcatctgagtgagaaccaccattaacaatattcatcataggtactggcaattgtttaccattaaatccacctaaatatttatataatggttgacctaataagtcagcagctgcacgagctacggcaatagaaacacctaaaatggcatttgcacctaatttacctttgttgtgtgtaccgtctaattgaatcatcattttatcaatagatacttgatctaaaactgaaaattcaccttcaacgatttctggtgcgatcatttcgttaacattttctaccgctttagtcacacctttacctaaataacgtgatttatctccatcacgtaattcaactgcttcatgttcaccagtagaagcaccagaaggtactaatgcacgtccgaaagcaccactttcagttaatacttcaacttcaactgttgggttaccacgtgagtctaagacttcgcgagcgtaaacatctgtaataattggcatgtttaatatctcctttaattatattatatgactattatagcctttttctaaacttttataaaatgataatacatataaaaccaagaaaatttgaacatctatacgttgctgtaaattcttaatcttaatgcatctaatctaatgtttaatcagtgattcacctgtcatttcagatggttgtttaacatttaataaatctaataatgtcggcgctaaatcgcctaaacgtccagtttctcttaatgtaacaccttctttagttacaataactggaacaggattagttgtgtgtgtcgtcataggttggtcgtcatcagttaatacttgatctgagttaccgtggtctgcagtgatgatggcatgaccacccatatcaataattttgtcaacgacttcaccaagacactcatctactgcttcgattgctttaattgttggttcaagcataccactatgtccaaccatatctgggttagcaaagttcagtagaattaaatctaagtcacctttgtctaactcttctaataatgcatctttaacttcatatgcactcatctcaggttttaaatcataagtcgctacttttggagaatcgatgagtctacgacgttctccttcaaactcttcatttcgtccaccactcataaagtatgttacatgtggatacttttcagtttcagcgatacgtaattgtttcaagccattatcttgagcaacttcaccgattgtattatttaagtcaactttttcaaatacaatttcagcatctacattgtcattatatttcgtgaatgtagcgtagaataagttgtccacttgttcaactttaaatccatcaaacgctttattagtaaagatttctgaaagttgagctgctctatctggacggaaattataaaagattactgcgtctccatcgttcacaccatcgttttggccttcaactataaacggttcgacgaattcatcagtcacatcatttttataattagcttcaacgcctgctttagctgaagtaaatgtaggaccttcaaagttacgaatagcattataggcacgttcctcacgatcccaacgcttgtcacggtccatagcataataacgtcctgaaacagaagcgaattggcctacacctaattctttaaatttatcttcagtttcctctatatatttcaaagcagatttttgatcaacatcacgaccatctaaaaatgcgtggacatatactttatctattccttgctttttagctaattctaaaatagcaaatagatgcttataatgactgtgtacaccaccatcagaaagcaatccgaatacatgaagcgcagagccattgtctttaacatgtttaacagcgttatttaatacagtgttatcaaagaattctccgtcttcaatcgatttattaatacgagttaaactttgatatacgatgcgtcctgcaccaatattcatatgtcctacttcagagttacccatttgaccttcaggaagacctacatctaagccactagcttctatttgtgttgtaggatatttttcataatatcgatcaaaattaggtttatgtgcttgcttaactgcattgccatgttcactttcacgatttgcgaaaccatctaagatgattaaggcagttggttgttttgccataattattttgcaccttctaacaattgtacgaaatcttcaacttttaatgatgcgccacctacaagagcgccatcgatatctgattgagccatatattctttaatgttattaggtttaacactaccaccatattgaatacgtgtagcgtcagcaacctcttgactagataagtcagctaatgtttgacgtacgtgagcacacatttcatttgcatcttcagatgtagatgacttaccagtaccgatagcccaaattggttcatatgcaataacaacttctttaagttgatcatctgataaaccttcgacagcttttttcacttgattacctacgattttatttgctttaccagcttcacgttcttcatcagattcacctacacaaataataggtgtcataccgtgattgaagatagcatgcgcttttttgtttacttcttcgtcagtttcgtggaaatagtcacgacgctctgagtgaccaatcactacatatttaacacctaattcagataatgctactggtgaagtttctccagtataagcaccgctttcttcaaagtaagcgttttgtgctccaatttttaacccttttgctttaccatctttaacagctgttactaaagcgtctaattggattgttggtgcacaaataactgattctacttctttaggatcaggtaatgttggtaattcgtttacaaagtctttagcttcttgaactgttttattcattttccagtttccggctataattggtgttctcattcattacactccttaatttttagtgttaaatttgtaagcttttatccaaatacttgcttatttcgaaataaacgttgaaagcaaaaatgactttctattgttttattcccacatcaaagtatttaaaaacttatttatcattaatagcttttataccaggtaattctttaccttctaagtattctaatgatgctcctccaccagtagagatgtgtgtaaagtcatcttcgaaacctaatgaaattgctgctgcggcagagtcaccaccaccaataatagtagtagcgtctt

SEQ ID NO: 3879 - DNA, 4158 bp, Artificial Sequence
  Description of Artificial Sequence: synthetic nucleic acid sequence
ttgataaagattgagcaaatcttgttgatatctttcaaagaatccgtaacctataaattttgagttatacaaatttgaaatggtgtccatatctaggaatgacttatcttttgtggtttttaaatagatttcgttatgatctaccttaccgacttcgaatacatattccataaatgacttcataccatcatgtgagaacatttccggtctcacacgtaacttctcaattatgtccggtttttgaagtaaactagcaacgattgtactttcgatttcatgacgttcattcatcgtcactcactccaaactcacttaacttctttctgaagtcgtctaatatctttttacgttgtgctacgtattctggatcatttttcattctccaacgatgtctagcagttttttcgtcgacaggctcttcttttacgactttgacttcttttctcattatgtttggaatactaggtggataaggattagcatcattgatatattgcattactgtttttttagtcggttcataatccccattttggctcaaaatgttaacccatgtttctaatttaggtctgtcaaagtcaatgttgtatacatgtctaattgtcttaattacttctagggcttgttgtttagtcataggcattaactttcatctcctagctctttctccatttgagcaattacatcatctgttacagtttttttatttttaggtttaattttattttcagcctcttttttattcttaacgttctctttagcccagttgtttaacactttgattaggtaacctgcatgacaacctttgtcttttgtataatcagtagctacttcaacaacttcatctgcatgttgtccaatatcatcaatggcatatcctatctgttccatttggttaggagttaaattatgagtaaggttactcatgatgtaattaattgagtttttgaagatatctttatctacttctttttctctttcttcttctacttctttatcttcttctatatctgttgcgtgactgtcacgtgacttcacgtgactatctaaaagtttttgtttttttctttgcttttgtttacgcaaacggttttgttctcttatcttttctaaaccttcgatgttctgatgtttttcccaattagatactttaaagacaccattcacttcttcaatcatgcttagcttttcgaatgtttgtaacgctaatcttattgaattgataggtctattaaattcgttagctaacatttcttcgttatagggtagactttcggataacataatgtatccttgttcgttatactttccagctaatgtcagcaacttaacccataaagtgatgattgtatctcgttctggcagtgcttctatatacttgattttgctatcatcgaacattccaacttttaatttaatccacgatacttcagccatttacttctcctttcaacattcggttgagtcgttcatctacggacacccaactttcatgtaatttgtatttctcattaaaactatctatacctatttggtgctgctctttatgatgtcttgaacatagcgctaatactttgttgtctgtgtgatctatctttcgtctgttacgtcctcgacctactgtgtgataatgcgcaagttctgctcgtggcgttccgcatattacacagttacgattgactgttgaccagtaaaggaacgctttatcatttttgagtaagtcacttgtcttataattaagtggtatattgttgtgaaacacccagtcaagaataacttctataacttgtttagcttgttctcttgtgcaatcactcaatgagagacgtttttcatagccatagagaacttctacgtaatccatgaacaaatacctcatatagtcgcgtggttgtcctgtgtaagcttctatgtcgttacagagagcaaatacttttctacgctgcttatctgtaatcttgaatggatctacaactcttacatctgcttctacttcgtaaccgttgtctaaaagtaaagatgttttgttatctagttctactcctttgatgactacagttgttgtaccgtcatcttctgtaatgtagttttttattactaccatctaatcagtccaatcagaacgggagatcttcatcagttatatcgatagggctcgttgcatttgcgaatggatttttactttttgtctgtgtagtatgttcttgttgtttttgaggttggttgttttgttggttattacctttggtatctaagaactgaacgctatcggctacaacttctgtaacaaatactcgacgaccttcgttattttcgtaattacgtgattgaacacgtccatctacacctgctagtgaaccttttgaaagataatcgtttacattcttcgcttgttttctgaacacaactacattgatgaaatctgcttctcgttcaccttgtgcgttagtaaatgttctgtttactgctaatgtgaatgtcgctacttcaactccactcggcgtagttctaaactctggatctttcgttaatcttcctactaatacaactctatttaacatttgaattctccttatctaattgttttagtcctgcatctagtttttgatgtgcatttgctatatcttttttagtaactttgttaatgttttgaatacctaaccaacgcattgttttgtctagcgttgcgtctctacctttttcttgagatgaagttacaaactggttgatacgctcttctaattctgtaatgtcattgtcgttagcgcttggaacttcttccccgttgtatatataaagacctaggccatgtaatgctgcagctttaacgaaacaacgtttttgagctttattaatatcaaatgttgtcgcgctaccctttgctaaagatttgtttctaaaatccaatactggaagccattctgtttcagtttgtccttttacagttactgacacttgtacgaagtaaccctctggagtagctaaataaggtacaaaatagttatctagtggcacatcagggtgtacaaattcatgtgttttaatactgtagttgctgtctatcttctttaattcttgatgagcgtatgaccatgctaggtaggttaatccatttttcttttctacatgatcgttaacatctttttgatttaactgattaaatagtgtttcttcagtcatactcaacctcctcatattcagttgtttctgttactttctttttaattgctctgtgcttagtcatgtcgatactcacatcttctagtcctgcaaattctcttgctctccgtctatctcttgaataagaagtatcttcttcgttgttaggtttattagtgatatacaggtcgaaaggagcgtctttcagtttaattagatatgtcactgtttctttcatcaatcaaacactcccctgcaatgacttcttttgctagttcaaatttttgttgtaattcttcatctgtgaaaaattcgtagaaattcagatgattacaattactttcatatttttgagaatagtgccaaaaggtaataccaacttctccattatcaaaagtatgaaattctgctttcactttttcatcactatgcaaaatcaatttatttaaatcattggccgtttttaataatttgtgtctcaacttgactacctccgtatattttgattaaattaagttgtatattttgattagattctgactgttacttgttggcgcaagtttcagtcttttttgttatctcaagccacttttcccagaagaatgtgctaaagataagtgttaacattgaaaatgctattaccgtaaagaaaccacctcctaaaagtaatgtgatgatcattgcgataaacatcgtcatgtaacttaatagatatttcatttatcattctctcctttcatttctaaaagtttttcgatatatcctctttcttcagtaaaactcctctaaagtgacgtttctgacaccattaaattttgttctataaagtcaattgccggtctaatcttgatgtagcgtttatgattcttgccaaatctgtacatacatttctcttggaactctttattgctataaacgtgcttttctaaatcgtttttagaaattccacttattttcacaaactcgatagcgtccgcaaatccaatgtattccattgct

SEQ ID NO: 3880 - DNA, 2700 bp, Artificial Sequence
  Description of Artificial Sequence: synthetic nucleic acid sequence
tctttccgtcctgtcgcgggtaacctgcatcttcacaggtactatgattttaccgagtctctcgttgagacagtgcccaaatcgttacgcctttcgtgcgggtcggaacttacccgacaaggaatttcgctaccttaggaccgttatagttacggccgccgtttactggggcttcgattcgtagcttcgcagaagctaaccactcctcttaaccttccagcaccgggcaggcgtcagcccctatacatcaccttacggtttagcagagacctgtgtttttgataaacagtcgcttgggcctattcactgcggctcttctgggcgtgaaccctaaagagcaccccttctcccgaagttacggggtcattttgccgagttccttaacgagagttcgctcgctcaccttagaattctcatcttgactacctgtgtcggtttgcggtacgggcacctgttatctatctagaggcttttctcggcagtgtgaaatcaacgactcgaggaaacaatttcctctccccatcacagctcagccttatgagtgccggatttgcctaacactcagccttactgcttggacgtgcactccaacagcacgcttcgcctatcctactgcgtccccccatcgattaaaacgatactaggtggtacaggaatatcaacctgttatccatcgcctacgcctgtcggcctcagcttaggacccgactaacccagagcggacgagccttcctctggaaaccttagtcaatcggtggacgggattctcacccgtctttcgctactcacaccggcattctcacttctaagcgctccacatgtccttgcgatcatgcttcgacgcccttagaacgctctcctaccattgtccaaaggacaatccacagcttcggtaatatgtttagccccggtacattttcggcgcagtgtcactcgactagtgagctattacgcactctttaaatgatggctgcttctaagccaacatcctagttgtctgggcaacgccacatccttttccacttaacatatattttgggaccttagctggtggtctgggctgtttccctttcgaacacggaccttatcacccatgttctgactcccaagttaaattaattggcattcggagtttgtctgaattcggtaacccgagaggggcccctcgtccaaacagtgctctacctccaataatcatcacttgaggctagccctaaagctatttcggagagaaccagctatctccaagttcgattggaatttctccgctaccctcagttcatccgctcacttttcaacgtaagtcggttcggtcctccattcagtgttacctgaacttcaacctgaccaagggtagatcacctggtttcgggtctacgaccaaatactcaacgccctattcagactcgctttcgctgcggctccacatttgctgcttaaccttgcatcagatcgtaactcgccggttcattctacaaaaggcacgccatcacccattaacgggctctgactacttgtaagcacacggtttcaagttctctttcactccccttccggggtacttttcacctttccctcacggtactggttcactatcggtcactagagagtatttagccttaggagatggtcctcccagattccgacggaatttcacgtgctccgtcgtactcaggatccactcaagagagaatatgttttcgactacaggattattaccttctttgattcatctttccagatgattcgtctaacatgttcttttgtaactccgtatagagtgtcctacaaccccaacaagcaagcttgttggtttgggctattcccgtttcgctcgccgctactcagggaatcgatttttctttctcttcctccgggtactaagatgtttcagttctccgggtctgccttctgacatgctatgaattcacatgtcgataacatgacataactcatgctgggttcccccattcggaaatctctggatcaacgcttacttacagctacccaaagcatatcgtcgttagtaacgtccttcatcggcttctagtgccaaggcatccaccgtgcgcccttaataacttaatctatgtttccaccatattttgaattgttattcaaaataaatagctaaaactagttattaatcttgtgagtgttctttcgaacactagcgattatttatgaattcaagcttatttaaaactctattcactcggttttgcttggtaaaatcttacttacttatctagttttcaatgtacaaagaatgttaataaacattcaaaactgaatacaatatgtcacgttatccctcatcttcgtagaagatgttccgaatatatccttagaaaggaggtgatccagccgcaccttccgatacggctaccttgttacgacttcaccccaatcatttgtcccaccttcgacggctagctccaaatggttactccaccggcttcgggtgttacaaactctcgtggtgtgacgggcggtgtgtacaagacccgggaacgtattcaccgtagcatgctgatctacgattactagcgattccagcttcatatagtcgagttgcagactacaatccgaactgagaacaactttatgggatttgcttgacctcgcggtttcgctgccctttgtattgtccattgtagcacgtgtgtagcccaaatcataaggggcatgatgatttga

SEQ ID NO: 3881 - DNA, 3155 bp, Artificial Sequence
  Description of Artificial Sequence: synthetic nucleic acid sequence
aatttcttccgttgacgtaatcggatctccatcaactggaccatattttgtcacatcatccactggtggtgtgactacttcgcctgtatcaggatttttaactcctggtttacctggaacgtcctcttggctacctttcggtgcatttggatcaaattcatccttatggcctggcttgatttcttcgccaccataatgaacgatttcatctactggttgttttgttactttttctgttggttcaccttcgccaactttttcccctgttaatgggttcttagttgttggtgttgtaattgtttttgttcctggttcacctttttgaacgactttctctgtacctggcgctaagtttggatcaaattcgcgttttttatcaaacggaatttcttccgttgacgtgatcggatctccatcaactggaccatattttgtcacatcatccactggtggtgtgactacttcgcctgtatcagggtttttaactcctggtttacctggaacgtcctcttggctacctttcggtgcatttggatcaaattcatccttatggcctggcttgatttcttcgccaccataatgaacgatttcatccactggttgttttgttactttttctgttggttcaccttcgccaactttttcccctgttaatgggttcttagttgttggtgttgtaattgtttttgttcctggttcacctttttgaacgactttctctgtacctggcgctaagtttggatcaaattcgcgttttttatcaaacggaatttcttccgttgacgtaatcggatctccatcaactggaccatattttgtcacatcatccactggtggagtaactacttcgcctgtatcaggatttttaactcctggtttacctggaacgtcctcttggctacctttcggtgcatttggatcaaattcatccttatggcctggcttgatttcttcgccaccatattctgtgatttcatctactggttgttttgttactttttctgttggttcaccttcgccaactttttcccctgttaatgggttcttagttgttggtgttgtaattgtttttgttcctggttcacctttctgtttaacgcgctctttacctggttttaaatcaggattgaattcacgtttcttgtcgaatggaatttcttccgttgacgtgatcggatctccatcaactggaccatattttgtcacatcatccactggtggtgtgactacttcgcctgtatcagggtttttaactcctggtttacctggaacgtcctcttggctacctttcggtgcatttggatcaaattcatccttatggcctggcttgatttcttcgccaccatattctgtgatttcatctactggttgttttgttattttttctgttggttcaccttcgccaactttttcccctgttaatgggttcttagttgttggtgttgtaattgtttttgttcctggttcacctttttgtttaacacgctcttcacctggttttaaatcaggattgaattcacgtttcttgtcgaatggaatttcttccgttgacgtgatcggatctccatcaactggaccatattttgtcacatcatccacaggtggagtaactacttcgcctgtatcaggatttttaacccccggcttacctggttgcgttgtttgactacctttcggtgcatttggatcaaattcatccttatggcctggcttgatttcttcgccaccataatgaacgatttcatccactggttgttttgttactttttctgttggttcaccttcgccaactttttcccctgttaatgggttcttagttgttggtgttgtaattgtttttgttcctggttcacctttttgaacgactttctctgtacctggcgctaagtttggatcaaattcgcgttaaagtaaatgagtaattcactttcatctgggtatttatgatacaacgttctaaaaacttctaacccttgaggtgtaagaccgaaattatataaagtttcaccaagtataaataatgcatcatcattgtttgaactcaatgcctcatttactcgagaatctaagttttctattttttgtagattgatatcgtctataagtttgtagatatcttccattgtttattttccctcattttctaaaagctttagtttaggtaaaaaacctgggaaggaaacattaacagcgtcaaattgctctattttgagtggttctgaactaagtagtgaagctacagctaacatcattcctatacgatgatctgtttgactatctacagttgcatttgatctaaactctgatggatgtataataagtccatcatgtgtgggttgtaaattaaaaccaagtaaatttagcatgtctgcagtagtatctatacgatttgtttccttcacttttaattcttccgcgtttttgataatacaagaatttgaagcttgtgtgcaaagtagtgcaataactggtaattcatcgatagcccttggaactaagtcgcctttaattgtaacagcattcaagttcggtgtatattttacatgtattgatgcagttggttctgcacccttgcttacattacttaattcaatgtttcctcccatttgtttaacgatatctatgatacctgaacgagtgggattaatgccaacattatgaattgtaatgtcactaccgggcgtaattagggctgcgactatgaaaaatgcagcagatgagatatctcctggaacatgaaaatctctaggctgtatatgttcaattgcataaggtatggtttggattgttttaccttgaattgatataggaatgttaaagtgtgcaaacaatgtttctgtatgatttctacttacatcaaattctgtaagtgtcgtggcttcttttgaaaataggctagcaagtaaaatagcacttttaacttgtgcacttgcaacttccatttgataatttatacctttaatagttgaaggcttaattataagtggtgtgtaattattatcaattccagatatattagcattcatttttaacagaggtttcatcactctatccatgggtcttttgcctatagatacatcaccagataacacactttcaatgcctaatccgcttaaaagacctgcaagtaaccgtgtagtagtaccagaattacc

SEQ ID NO: 3882 - DNA, 3500 bp, Artificial Sequence
  Description of Artificial Sequence: synthetic nucleic acid sequence
tccccttcgggggacagagtgacaggtggtgcatggttgtcgtcagctcgtgtcgtgagatgttgggttaagtcccgcaacgagcgcaacccttaagcttagttgccatcattaagttgggcactctaagttgactgccggtgacaaaccggaggaaggtggggatgacgtcaaatcatcatgccccttatgatttgggctacacacgtgctacaatggacaatacaaagggcagcgaaactgcgaggtcaagcaaatcccataaagttgttctcagttcggattgtagtctgcaactcgactatatgaagctggaatcgctagtaatcgtagatcagcatgctacggtgaatacgttcccgggtcttgtacacaccgcccgtcacaccacgagagtttgtaacacccgaagccggtggagtaaccatttggagctagccgtcgaaggtgggacaaatgattggggtgaagtcgtaacaaggtagccgtatcggaaggtgcggctggatcacctcctttctaaggatatattcggaacatcttctacgaagatgagggaataacgtgacatattgtattcagttttgaatgtttattaacattcatttgtacattgaaaactagataagcaagtaagattttaccaagcaaaaccgagtgaatagagttttaaataagcttgaattcataaataatcgctagtgttcgaaagaacactcacaagattaataactagttttagctatttattttgaataacaattcaaaatatggtggaaacatagattaagttattaagggcgcacggtggatgccttggcactagaagccgatgaaggacgttactaacgacgatatgctttgggtagctgtaagtaagcgttgatccagagatttccgaatgggggaacccagcatgagttatgtcatgttatcgacatgtgaatttatagcatgtcagaaggcagacccggagaactgaaacatcttagtacccggaggaagagaaagaaaaatcgattccctgagtagcggcgagcgaaacgggaagagcccaaaccaacaagcttgcttgttggggttgtaggacactctatacggagttacaaaagaacatgttagacgaatcatctggaaagatgaatcaaagaaggtaataatcctgtagtcgaaaacatattctctcttgagtggatcctgagtacgacggagcacgtgaaattccgtcggaatctgggaggaccatctcctaaggctaaatactctctagtgaccgatagtgaaccagtaccgtgagggaaaggtgaaaagtaccccggaaggggagtgaaagagaacttgaaaccgtgtgcttacaagtagtcagagcccgttaatgggtgatggcgtgccttttgtagaatgaaccggcgagttacgatctgatgcaaggttaagcagcaaatgtggagccgcagcgaaagcgagtctgaatagggcgttgagtatttggtcgtagacccgaaaccaggtgatctacccttggtcaggttgaagttcaggtaacactgaatggaggaccgaaccgacttacgttgaaaagtgagcggatgaactgagggtagcggagaaattccaatcgaacttggagatagctggttctctccgaaatagctttagggctagcctcaagtgatgattattggaggtagagcactgtttggacgaggggcccctctcgggttaccgaattcagacaaactccgaatgccaattaatttaacttgggagtcagaacatgggtgataaggtccgtgttcgaaagggaaacagcccagaccaccagctaaggtcccaaaatatatgttaagtggaaaaggatgtggcgttgcccagacaactaggatgttggcttagaagcagccatcatttaaagagtgcgtaatagctcactagtcgagtgacactgcgccgaaaatgtaccggggctaaacatattaccgaagctgtggattgtcctttggacaatggtaggagagcgttctaagggtgtcgaagcatgatcgcaaggacatgtggagcgcttagaagtgagaatgccggtgtgagtagcgaaagacgggtgagaatcccgtccaccgattgactaaggtttccagaggaaggctcgtccgctctgggttagtcgggtcctaagctgaggccgacaggcgtaggcgatggataacaggttgatattcctgtaccacctagtatcgttttaatcgatggggggacgcagtaggataggcgaagcgtgctgttggagtgcacgtccaagcagtaaggctgagtgttaggcaaatccggcactcataaggctgagctgtgatggggagaggaaattgtttcctcgagtcgttgatttcacactgccgagaaaagcctctagatagataacaggtgcccgtaccgcaaaccgacacaggtagtcaagatgagaattctaaggtgagcgagcgaactctcgttaaggaactcggcaaaatgaccccgtaacttcgggagaaggggtgctctttagggttcacgcccagaagagccgcagtgaataggcccaagcgactgtttatcaaaaacacaggtctctgctaaaccgtaaggtgatgtataggggctgacgcctgcccggtgctggaaggttaagaggagtggttagcttctgcgaagctacgaatcaaagccccagtaaacggcggccgtaactataacggtcctaaggtagcgaaattccttgtcgggtaagttccgacccgcacgaaaggcgtaacgatttgggcactgtctcaacgagagactcggtgaaatcatagtacctgtgaagatgcaggttacccgcgacaggacggaaagaccccgtggagctttactgtagcctgatattgaaattcggcacagcttgtacaggataggtaggagcctttgaaacgtgagcgctagcttacgtggaggcgttggtgggatactaccctagctgtgttggctttctaacccgcaccacttatcgtggtgggagacagtgtcaggcgggcagtttgactggggcggtcgcctcctaaaaggtaacggaggcgctcaaaggttccctcagaatggttggaaatcattcatagagtgtaaaggcataagggagcttgactgcgagacctacaagtcgagcagggtcgaaagacggacttagtgatccggtggttccgcatggaagggccatcgctcaacggataaaagctaccccggggataacaggcttatctcccccaagagttcacatcgacggggaggtttggcacctcgatgtcggctcatcgcatcctggggctgtagtcggtcccaagggttgggctgttcgcccattaaagcggtacgcgagctgggttcagaacgtcgtgagacagttcggtccctatccgtcgtgggcgtaggaaatttgagaggagctgtccttagtacgagaggaccgggatggacatacctctggtgta

SEQ ID NO: 3883 - DNA, 3885 bp, Artificial Sequence
  Description of Artificial Sequence: synthetic nucleic acid sequence
ttatctttcttggaagttgttgtaatttcgtcttctttgtctttcttagttatttttgtgtctttctcgtctttgccgctttttggtattactggttttttctcttctctatctttcttcggagtttttatgtctttcttttctttgtctttctttggtgtttttgtgtctttagattctttctcgtctttatctttctttagtgtttttgtgtcttcgtctttctcgtttttggtaatttgtgtatttgttactgaagtatttgcttgattttgttcttttccattcacttcatctttattttgattggttgtttcaacaactttatttgtattattatcttgttgattattttcaactataggtgattgtgcagtgctaattttacgataaataaacttagtaattccgtcactcacagaagttctataatgttggtacccaggaattttcaccggttgcctttctgaagcaggggttttagcatcttccacagcatctttaataatatttccttgatcatctagccagacagttacataaagaattggaagttcatatgacgcatcgtattcttcttcatcattattattttgatctgttgttatggctgtggcatctgtattttcagtattatttgtaggtgctgtctgtgaagtttttggtgatgttccttgattttggtttgcagtattttcatccgcatacacagttacgttactgttaaataaatagagtgccaatgttaatgcacttgctgtaccatatcttaaagttttcttacttaaatatgtttgaattaatttcgaattattaggtttgttgtctttcatagttgtatgtgcctcctaattttttgatttaaattaaacttcgatatcaaatgcttatgatactgatttacagtgtgagcataatcgataaaatatacacaatacgttatttaatttataatatatcatgtattttaatttttcacaatttaatttcccctaataatactaaagactttttattactttcaacattgaaataacacttttataactgcattaaaatcgttgatttcttagagttttactgactaaacattataactttactatatagtgatttatctgatgattttttaattacgaatattttaacccatacctaaaaaagcttctcaaaagtctattcaacttttgagaggcttgatagtaatttaaattaaatacttatattgatgtctaaaatcaataaaatatttacatcatacctggcatgccacccattccaggttgttcattattttctggctctggaatactagcaacgactgcttcagttgttaagaacatagcagctacacttgctgcatgttgtaacgctgaacgagttactttagttggatctactataccttcttctaacatattaacccattcatttgttgctgcattgaaaccaacgcccgcttcagcatgttttaaacgttcaacaataattgaaccctctaatcctgcattttcagcaatttgtctaacaggtgcttgtaatgcttttaatacgatattaacacccgtttcaacatcaccttctgctttaatttcacttactttttgatatatattgactaacgcagtaccaccaccagcaacgataccttcttccaccgccgcacgtgttgaatttaatgcgtcttcaattcttaatttacgttctttaagctctgtttcacttgcagcccctactttgataacagctacgccgccagctagttttgccaaacgttcctgtaatttttctttatcaaactctgaatcagtttcttcaatttgtgctttaatttgacctacacgagcatcaatattattttcatcaccattaccatctacgactgttgtatgatctttagtcacttcaactttattagcagtacctagcatatcaagagatgcatctttaagttctaaacctaaatcatcagtaatgacttgagcaccagttaatattgctaggtcttctaacattgctttacgtcgatcaccaaatcctggggctttaactgctacagcagtaaatgttccacgcatacggtttaaaacaatattagtaagtgcatcgccttctacttcatccgcaacaattaaaattggtcgactagcctgcacaacttgttctaataatggaagaatatcttggaatgatgaaattttcttatccgttactaatatatatggacgttctaattcagctatcattttatctgagtcagttaccatatatggtgattgataaccgcgatcaaattgcattccttcaactacttctaattctgtattaaacccatttgattcttcaatagtgataacgccatcgttacctactttatccattgcttcagaaatgtagcgaccgatttcttcatctgctgctgaaatagctccaacttgcgctatctcgttcttattttcaaccttttgagaaatctcatgaagcgcttctatagccacttgcactgctttgtcaataccttgtcttaagcctacaggatttgcaccacttgtaacattcttaagaccttcctgaatcattgattgtgctaaaactgttgctgtagttgtaccgtccccagcgatttcatttgttttattcgcaacttcctgcactaattttgcacccatattctcatatggatcttctaactctatttccttagcaattgttacaccatcgttggtaattaaaggtgttgtgtaatccttatctagaaccacatttcgccctttaggtccaattgtaacctttacagcgtttgctaatttatcaacaccacgtaacattgcttgacgcgcatcttcagagaatttaagatcttttgccatagtctaaacaacctccacttattaaatcatttaattaatatttaaaattcgctctttattctataatagctaatatatcttcttcatttaaaattaaatatgttttgtcgccacgttttacttcagtacctgcatattgttggaagacgattgtgtcaccttcactgacttgaggagcaacttgtgtgccattgtctaataaacgaccttgtccaactgcaatgatcacaccttcatttgatttttctttagcgctatctgttaaaacgatgccacttttagttgtttgttcttgctctttcttctcaataatcacacgatttcctaatggtttaagcatgattgttcctccttcatttacatgtgatttagcactttgatatatagagtgctaatctgattttaatattaatcaaaattggtcaatatatcaagccaaaaggattattaattttgtacttaacctttatttacgataaaatatataatatacatatatagatggagggaaattatgaaaaggttatgggtatccctattaaccgttctattctacggtttagctcaaatactacctgggttggttttaggtaaccatttacttggagatatgtctaaaatgcaaactgcccaaacaatgattatcatgcaagtatctatctttatcatcgctgcattgttaatcattttcatgcaagcaaccattaaaaatcctactcaattagaacaaggacataaggaacctaaaagatatattttcgcctgggttctattaggattttgtattgtgatgatttaccaagtcatcatcagtataattttatttgccatcaatggcagtccgcaaagaagtccaaacactgaaaggttaatggctattgctaagcaaatgccgatatttatcgttttaatatccatagtaggtcccattttagaggaatacgtttttcgtaaagttatcttcggagaattgtataactttataaagggatcacgtgtggtaagctttatcatt

SEQ ID NO: 3884 - DNA, 3427 bp, Artificial Sequence
  Description of Artificial Sequence: synthetic nucleic acid sequence
gcgggtaacctgcatcttcacaggtactatgatttcaccgagtctctcgttgagacagtgcccaaatcgttacgcctttcgtgcgggtcggaacttacccgacaaggaatttcgctaccttaggaccgttatagttacggccgccgtttactggggcttcgattcgtagcttcgcagaagctaaccactcctcttaaccttccagcaccgggcaggcgtcagcccctatacatcaccttacggtttagcagagacctgtgtttttgataaacagtcgcttgggcctattcactgcggctcttctgggcgtgaaccctaaagagcaccccttctcccgaagttacggggtcattttgccgagttccttaacgagagttcgctcgctcaccttagaattctcatcttgactacctgtgtcggtttgcggtacgggcacctgttatctatctagaggcttttctcggcagtgtgaaatcagcgactcgaggaaacaatttcctctccccatcacagctcagccttatgagtgccggatttgcctaacactcagccttactgcttggacgtgcactccaacagcacgcttcgcctatcctactgcgtccccccatcgattaaaacgatactaggtggtacaggaatatcaacctgttatccatcgcctacgcctgtcggcctcagcttaggacccgactaacccagagcggacgagccttcctctggaaaccttagtcaatcggtggacgggattctcacccgtctttcgctactcacaccggcattctcacttctaagcgctccacatgtccttgcgatcatgcttcgacgcccttagaacgctctcctaccattgtccaaaggacaatccacagcttcggtaatatgtttagccccggtacattttcggcgcagtgtcactcgactagtgagctattacgcactctttaaatgatggctgcttctaagccaacatcctagttgtctgggcaacgccacatccttttccacttaacatatattttgggaccttagctggtggtctgggctgtttccctttcgaacacggaccttatcacccatgttctgactcccaagttaaattaattggcattcggagtttgtctgaattcggtaacccgagaggggcccctcgtccaaacagtgctctacctccaataatcatcacttgaggctagccctaaagctatttcggagagaaccagctatctccaagttcgattggaatttctccgctaccctcagttcatccgctcacttttcaacgtaagtcggttcggtcctccattcagtgttacctgaacttcaacctgaccaagggtagatcacctggtttcgggtctacgaccaaatactcaacgccctattcagactcgctttcgctgcggctccacatttgctgcttaaccttgcatcagatcgtaactcgccggttcattctacaaaaggcacgccatcacccattaacgggctctgactacttgtaagcacacggtttcaagttctctttcactccccttccggggtacttttcacctttccctcacggtactggttcactatcggtcactagagagtatttagccttaggagatggtcctcccagattccgacggaatttcacgtgctccgtcgtactcaggatccactcaagagagaatatgttttcgactacaggattattaccttctttgattcatctttccagatgattcgtctaacatgttcttttgtaactccgtatagagtgtcctacaaccccaacaagcaagcttgttggtttgggctcttcccgtttcgctcgccgctactcagggaatcgatttttctttctcttcctccgggtactaagatgtttcagttctccgggtctgccttctgacatgctatgaattcacatgtcgataacatgacataactcatgctgggttcccccattcggaaatctctggatcaacgcttacttacagctacccaaagcatatcgtcgttagtaacgtccttcatcggcttctagtgccaaggcatccaccgtgcgcccttaataacttaatctatgtttccaccatattttgaattgttattcaaaataaatagctaaaactagttattaatcttgtgagtgttctttcgaacactagcgattatttatgaattcaagcttatttaaaactctattcactcggttttgcttggtaaaatcttacttacttatctagttttcaatgtacaaagaatgttaataaacattcaaaactgaatacaatatgtcacgttattccctcatcttcgtagaagatgttccgaatatatccttagaaaggaggtgatccagccgcaccttccgatacggctaccttgttacgacttcaccccaatcatttgtcccaccttcgacggctagctccaaatggttactccaccggcttcgggtgttacaaactctcgtggtgtgacgggcggtgtgtacaagacccgggaacgtattcaccgtagcatgctgatctacgattactagcgattccagcttcatatagtcgagttgcagactacaatccgaactgagaacaactttatgggatttgcttgacctcgcggtttcgctgccctttgtattgtccattgtagcacgtgtgtagcccaaatcataaggggcatgatgatttgacgtcatccccaccttcctccggtttgtcaccggcagtcaacttagagtgcccaacttaatgatggcaactaagcttaagggttgcgctcgttgcgggacttaacccaacatctcacgacacgagctgacgacaaccatgcaccacctgtcactctgtcccccgaaggggaaacctctatctctagagggatcagaggatgtcaagatttggtaaggttcttcgcgttgcttcgaattaaaccacatgctccaccgcttgtgcgggtccccgtcaattcctttgagtttcaaccttgcggtcgtactccccaggcggagtgcttaatgcgttagctgcagcactaaggggcggaaaccccctaacacttagcactcatcgtttacggcgtggactaccagggtatctaatcctgtttgatccccacgctttcgcacatcagcgtcagttacagaccagaaagtcgccttcgccactggtgttcctccatatctctgcgcatttcaccgctacacatggaattccactttcctcttctgcactcaagttttccagtttccaatgaccctccacggttgagccgtgggctttcacatcagacttaaaaaaccgcctacgcgcgctttacgcccaataattccggataacgcttgccacctacgtattaccgcggctgctggcacgtagttagccgtggctttctgattaggtaccgtcaagacgtgcatagttacttacacatt

SEQ ID NO: 3885 - DNA, 4248 bp, Artificial Sequence
  Description of Artificial Sequence: synthetic nucleic acid sequence
aaatatgtctaaagctaattggttatctataataacatcaatggtgcttcaactttgtttagggctatttgtatataaataaacctgagataatatggctatctcaggtttagtgtaagtataaatatttaattaaatggcttttaccattgctttatcatcaattaattgtccaattttgtcagctacttcaacaactctattcgaataaccccattcattatcataccaagcgataactttcaccttattttgtcccataaccatcgtagattgagaatcaataattgctgaatgaggatttgtgttaaagtctacagaaactaaaggagcttcttcaacatcaagaacacctgataaatcggcatttttaaatgcatcattaacttgtgtaactgtaacattctgttctaaatcaacaactaaatcaacgagagagacattttttgttggtactcttaaagccattccatgaagtttaccttcaacttcaggcaatacttctttaagtgctttagcagcacctgttgacgttggaataatactttcattacaagaacgtgctcttcttaaatctttgtgtggattatcaatatttttttgatcatttgttattgcatgaacagttgtcatcagaccatttatgattccaaatttatcattgaggacttttgcaactggtccgatacaattagtagtacaagatgcattactaaaaatatcgtatgtatcaatatcaagttgattatcattgactcctttaacaatcatttgaacgtctccacctttagacggtccagtgagtaatacctttttagcacctgcattaatatgagcaactgctttatctccgtgattaaatttacctgtcgcttctataacaacatcaatatccatctcattccatggtaaattttctggattgcgatcagaaagtaatttaatttcatgtccattcactttaataccactttcaatcggttcaacttttttatcataaactccatgcgtcgtatcataattaagtaaatgtgcaattgtttcaggtggataactagcgttaatcgctttaacatttaaatttttattatttagtgctattcgtaacaccattctacctattctacccataccgttaattgcaatattcgttgccattcaaagcaccccttgttttatatgttatactttatggaaatagtataacatattaatttttaaatgaaagcgtttaccgataaatttatctataaatataaattaagctttatcatttataagattttgattcaaacattgactatggaattgaataaataaggattctaataaaacatctacttttggatttactctatatcgattaatcattttataagaagggtttagaatttgtgaaaaccacatcattcgaatagtatcattaagaaattttttctaccagaaaatactgattgtgtgtaagcatataacactactttcaacatcatattgggatgctataatgttgcgcaacaatgctgtctgaattcagtacctggaattttttacaatatcattcacatattgtgacatatcatgtgtgggaatatgtactgaagtttcctttggtaaagtaagttgagtcatattataatctttatgcataaggtacctcgttaatttaatttagtggtatttgttaaattatacgaaaaagccttatttttaaaagtatttcaatgtaaaggcaaagtgttatgacgagactcttgaagacgcagaataagctgaagactacaagctgaatctgtcaactaagaaagcgaaccaacaatacgaagtattataaataaagaagccagtaaatgaatttataaaaaactcatttactggctattttgctaggaattatgtcccagcttttttgcctctaattagcgtttaatatgtaattatttataatacatacactttgtgataacaaaataaaagtattctatacaattttcattatatttactattcactctccgattgaatatacccttcttcttcaagtaatttttgtaaattctgtttaagttctaatttatcacctagattatctatcacatgatctgccatcctactttttttatctatagatatttgactataaacacgtgctttagcatcttctaatgataaattattcctctccattaaacgatcgatttgaatactttcagatgtataaaccacccaaacttcatctacagtatcttgtagttcattttcgtacaacaatgggatatccataattacatgatatccatgttctagataattgtttttctcttgttccattatctctcttacaataggatgaactatttcattaagagcctcgcgtaagtcaggatgattaaaaactatctctcctacatattgacgattcatctcaccattttcgtcaattgcttcttccccaaaaatctctttaacttgttcaagacccttagagccttttttaactgcttcgcgtgaagcaatatcagcatctacgattttaaacccatatgctgttaataattctgaaactgttgattttccagtggcaataccaccagttatcccaatcactttagacattatttcactcttcctttatctctgacagtttgggcaaaaatgactatttctaccagctatcacttttgtttcaatcgaatgaccacaaaccttgcactttttttgtttatatacatttaaatgtaattgcatttgtccagttttaccatctgcatgcctataatctgaaatactagtacctccatattttataccctcttctaaaacttctcgaacataataaaagagggattttctttcttgtttagtgagtgaattagtaattttatccggagtaataccagctctgaataaagcttcacaggcatagatatttccagctcctgctataacacgatgatcaagaatcgtttgttttattggtttattcttatattttttcattgtcaaacattctaaatagtgttcaaatgccacctcttcaaatggttctggagcgatttctaataaagatggataactatcaaaattgactatatttctaatttctccaaaccgtctgatatcagaatagactaatttttgtttattatccaaatcgaaaatgacttgccaatgctttcgataattcggtgtacttatctcatcaaggttattaacaacaaagaatccgcctgccatacctaaatgactaactaagattctatcatcgtcatgatccgctatataaaaaataatgtacttacttcttctttcaactttttttataacataaccttcagtaagttttttaaaagtatctaattccataccttttataatcgtctcacggttattattcttaccgttaattacatttttagcaaaagttactttctctatttttgcactttttataaatggctcaatacctcttttaacatgttcaacttcaggtagttcaggcatgatattatcctttctttatttagcatcgtaccatgttgcaccataattcgaatctacttttaaaggtacatcgagcactaatgcttgttccataatttcttctacaaatttactaaaatcttctacttctgattttggtatttcaaatatgagttcatcatgaacttgtaataataacttagcatgatatttagtttctttaatcttttcactgaatttaaccattgctaattttattatgtcagctgcactaccttgtatgggtgtattcattgctgttctttctgcaaaacttcttaaattaacgtttctacttgttatatcaggaatgtatcgacgacgatgaagtagtgtttccacataaccttgtgcttttgcatctttaacaatgtctgacatatattgttttacacctggaaaactagctaaataatcatcaataaatgcttttgcttgttttctagtaatacccaagctctgactcaatccataatcgctgataccatatacaataccaaagttaacagcttttgcttgacgtctcattaaactatcaacctggtcagattcaacattaaatactttcattgctgttgcagtgtgaatatcatgtccgtttataaatgcatgttttaaactttcatcttgcgtaatatgagcaagtacacgtaactcaatttgtgaataatcagcagataaaatcacactatctttagaagttggtttaaaggcctttctaatctttct

SEQ ID NO: 3886 - DNA, 3087 bp, Artificial Sequence
  Description of Artificial Sequence: synthetic nucleic acid sequence
tacagtatctccaacctcgacaggcttcttgatcgacgagtacgataccatcctcatctcgtttatacatagctcctgatggacaagatgctacgcaacttggatttaaacagtgttcacatagtcttggtaaatacatcataaatgtctcatcgaattggaatttaatatcttcttctattttctgaatatttggatcctctggtcctgtaatgtgacctccagctaaatcatcttcccagtttggcccccatttaagattcaatctatcacctgaaattaaagagtgagctgtcgccacgggagagtgctgtccttgtttagcattggttaagtgttcatagttatatgtccacggttcataataatcttgaatgagtggcatgtctggattatagaagattttacctaaagcaatttttgaccatctgttaccagattttaattcaagctttccttttttatttagcacccaaccacctttatattgtccttggtcttcccatctttttggatatcctacacccggttttgtttctacgttattaaaccacatatattctgcaccaggtcgatttgtccatgtgtttttacatgtcacactgcaagtatgacaaccaatacatttgtctagattcaataccattgcaacttgcgctttaatcttcaagccaattgacctccttcatttttctaacagctacatactcatctctttgatttccaattggtccataatagttaaagtgataactaatttgtgcatatcctcctactaattgagtaggtttcaagtgaatacgagtaggtgcattatgagaacctccacgagtatcagtaatttcagaaccaggtgtctctatatgtttatcttgtgcatgatacataaacattgtgcctctaggcatacgatgagatgttacagctctggcagtaacaactccgtttctgttgtatacttctaaccagtcgttatcattaataccatggtcagctgcgtcttcatttgaaatccatacaactggtccacctctaaacaacgtcaacatgcgttcattatcttgataagttgaatgaatattccattttccatgaggtgtaaggtatcgaagcactaatgtatcttgtccacctttaacttttttatcacgagcaccaaataccattggaggtaaagtaggtttatataccggtaaactttcgccaaactgttggaatacctcatgatctatataataactttgacgtccagttagtgttctaaatggcactaaacgttcaacattagttgtaaacggtgagtagcgtcttccatctttattagagccagggaatactgcagttggaatcacttctcttggttgagaagtaatgtttaagaatgatatcttttcagaagcacgttctttagaaatatctttaagttccatacctgtttgattttctaaatcttcatatgacttttgtgataatttgccgtttgtagcagaggatatattcaaaatgacatctgctacttttctcgctgtatctattctcggtctatcatttttaactgaaatagtattatcatcattccaagttccaactatacttttaagttcttcgtactcttcactaacgctataactcacaccatgagcacctattttccctttttctagttttggaccaacagtaacgaatttatcgtaaatttgtgtatagtctcgctctacgatagaaaaattaggcattgttttacctggcacaccttcaatttctcctttagaccaatcttttacaataccgtattcagttgaaatttcttgttttgaatcatgtcctaatggtgtagttacgacatctttaaatttacctggaagataatctttcgccatttctgaaacagctttacttagagttttataaatatcccagtccgaacgcgattcccataatgggtcaatcgctgggttaaatggatgaataaatggatgcatgtctgtagaagataaatcatgtttttcataccaagttgcagcaggtaaaacgatatctgaatataatggcgtcgcagtcattctgaaatcaagtgatactaataaatcaagtttcccttctgtatcctcgcgccatttaatttcctctggtttatcatcttcatttggctctgccattaaaccagagcgcgcacctaacttgttcgaagacgtgttttaaccagtctcgccattcatcgatatcgtaataacctaaacgtgtttttacactgaccggtagaccacctgctttagaagcttgaatgatttcggctgccgtttcaggtcgtagaattaagccggatcctttaccttttttcgcaacgtttgcgacagggcaacccatatttaaatctatacctttaaaacccatatccgctaagccgatactcatttctcggaattgttctggtttatcgccccagatgtgcgctaccattggttgttcgtcgtcactaaaagttaagcgtccgcgcacactatgaataccttcagggtgacagtaactctcagtattggtaaattcagtaaaaaatacatctggtctcgcagcttcactgacaacatgccgaaagacaatatctgtcacgtcttccataggtgccagaataaaaaacggacgtggcaatgtactccaaaaattttctttcatgatttatttaaaccttctttataataataatctcgaatttttacgcatgatgatattaccacaaaactcacatagctgactacaacttttaaataaatgattactgagttttcgcgcttaattgtttaataaatttttaaagtggtaaagtctatatatgtactattttaatatataaatttagaaaggaacatgcacatgagtgaagcaaatcataaaaacatcgttgttgtaggtgcaggaattattggtacgtcagtagcgacaatgctttcaaaagtaagtcctaactggcatatcgatatgtttgaaagactagaaggcgctggtattgaaagttcaaatgaaaataataatgctgggacaggtcatgcggcattatgtgaattaaactatacagttgaacaagatgat

SEQ ID NO: 3887 - DNA, 3253 bp, Artificial Sequence
  Description of Artificial Sequence: synthetic nucleic acid sequence
gtaaaaataatccacttactgggaaaccaccaatgtgtttagattccttaatctttgttttttgtaataaaggtaaacttgcaccaccagctccgatgaagacgaacttagattcataattcattacatttgatgtatttaaatctttaaccacaacttgccagttaccattatttaatttttttatatctaaaacttcatgtttataattaatgccaacatttttttgttgtaaattagctattaactttttagtcaaagcaccaaagttaacatctgtacctgtctcgtcatacgtaatggcaattgcttcatctgattggcgtccttccatcattaaaggaacccatgagttaattttttctggatcttgagaaattttcattttttcaaataatacatttttctgtaaactcgccactcgactttttaaaaatttaacattttcttcccctttaacaaagctcatatgtggcactgattgaataaatttatctggactttcaatatgaccttcacgtattaaataagcccaaaactgtttagatatttgaaattgctcgttaatatgaattgctttagtaatatctactgaaccatctttaccttctttcgtatagttcaattcacacaatgctgaatgacctgttcccgcattattccaaacatttgaactttcttcgccgggttgactcactctttcgaacaattggatatctttttctggtgttaattcttttagtaaagttcctaatgttgcgctcataattccgccacctattaagatgacatctgttttgctatgttgagtattcataacaaacacagtcccccttttttattaaataaatggaacgattgacactcatagatgtcgatgtctttaataaaattaaagcgctttctctatattgcaaaaaaatctaagcgtctttcaaggaagtgctcatttcttccttatcataaccattaattgaactaatttaattatatatataaattgtgttacacaaaagaataaaagtcaacattatgagaatagcttcattacacaattcaaattacaattgtttacatgttaccccttatatacgaactaatgttataatgacttaaatatcatagaaaacaatgaggtgttttacgcaatgaagtcgttcacattttttatgcataatatttatgcaatgggcggaacggtaaagtcggtgacacaacttgcaaatacactggcagaaaaaggacatcctgtaacaattatttcagtttttagaggcgcagactctccatattttgaattacattcagcaataaaagttaaagtcgtagtggactatcgcttaaagcttaaaaatactagagctattacggcaaatcgtatcaaaaagtataccccctttttaaatacaaaagtgatttctcaatttgagccaggtaaaagtcagttttcgagttatgtagagaaaaaaatgattaaagcaatcaggcatactaaaactgatgtactcgttggaacaagagctagctttaatattctcatttctaaatatgctaaagctgaaatagtgaccatcgcaatggaacatatgaattttgatgctcaccctgatcagtatcaaaaggaaattattgctgcgtaccgtaatatcaataagattacaacgttaactgtcgcagaccagcaaaaatatcaatcacaacttaaaactcctgtatacgttatacctaatatggttaccgaaaaaagaattgctgctccaaagaaaaatcgtattattagcgccggacgtttagaatatgaaaaagggtatgatttattattagagagtattcgtttaatacaagaagacttgcgtcaattgaattatgacgttcacatctatggttctggtagtaagaaaacatcacttgttgactttattaatcaatatcatttaaatgatttgattaaaatatatgagccaacgcaagaattaaataataaacttgcacaaagtaaaatcgttgttgtaccttcacgcaatgaaggtttcggaatgattattttagaggcaatggtgcaagataatatagtaataagttttgaaggcaatgtagggccagattcaatcattaacaacggagataatggttatttagtaaactatgaaaatgtgtctgaacttgcaaaacgtatcgatttaacaacacaacattataatgagttagatcacatcattgaaaatagtaaagatacgttgaaacaatttagtccggatcatatatatcaattatttatgtctatgtttaaataaaaataggagtgagacttagttcatttaaaacgaactgtctcactcctatttttcaaatgagaatttatataacaattacatcattttaaaagattacctaaactctcgacatccaaaagcaaaatattgaaagcccgaaatgaatgactttatagcttcatttcgggctttgtatatgaaaaatacatttcaataaattttgatttacagaatgaatgacaagataaatgtccagatacagataaatacaagtaatccaatactataacgtaatgtcattttaagtagttcagattctttacctacttctttaacagctgctgttgcaatggcaatagattgtggagaaataagtttcgccgcaaccccacctgctgtatttgaagctacaagtagtgaaccacttgtaccaatttgttgtgctacagaagcttgaattggcgcgaataaagagttgttattaacaactgaaccagtcataaatacgccgatccaaccaaggattggtgataatattgggaatacgcttcctgcttttgagatgccttgtcccatagcattacttaaaccaccatatgttgtgatttttgaaattgctaagatgaaacaaattgttatgattggtaaccataattctttaaatgcttcaacaaataagcgaccagcatcaccaaagttgacttttttagccattaaaacagtaataataattgtaattagaattgctgtacctgtttgaccaattaagtttaatgataaagtaattggtttgtgtgaaatattactgaaagtaccaggtaagtcaaagtttgcaactaaagcagataatttaccttttggtgcaaataatgctttaaatgaaggtgcactccaaatcataacaatgacagttaagataatgaatggactccaagcaaataagacttctttacctttaagttttttcggtgcttctggtt

SEQ ID NO: 3888 - DNA, 3657 bp, Artificial Sequence
  Description of Artificial Sequence: synthetic nucleic acid sequence
tctaaagggtcaaccggcaatcgcaattccatttaatgctggaaaaattaaagtcctcattgaaagtttagatgaaggtaattattcttctatcacaagtgacgtatatgacggaatgttatacgatgcccccgaacatctaaagtctatcattaatcgctttgttgaaaaaagtggagtgaaagaaccactatcagtaaaaattcaaactaatttgcctccatcaagaggtttaggttcaagtgctgcagtagcagtagcgtttgtacgcgccagttatgattttatggatcaacctttagatgacaaaacattgattaaagaagcaaattgggcggagcaaatcgcacatggtaagccaagcggtattgatacgcagacgattgtgtcaaataaacccgtctggtttaaacaagggcaggccgaaaaattaaaatcactaaaattaaatggttatatggttgtcattgatactggagtaaagggttctaccaaacaagcagtagaagatgttcatgtattatgtgaatctgatgaatatatgaaatatatagagcacattggtacacttgttcacagtgctagcgaatcgattgaacagcatgatttccatcatttggctgacatatttaacgcatgtcaagaagacttgagacatttaacagtaagtcacgataaaatagaaaaattacttcaaattgggaaagaacatggtgccattgctggtaaactaactggtggaggaagaggtggcagcatgcttcttcttgcggaaaatttaaaaactgcaaagactattgttgctgctgttgaaaaagctggcgcagcacatacatggattgaacatttaggaggttaaatcattggtgaaaagtggcaaagcacgagcacatacaaatattgcgttgattaagtattgggggaaagctgatgaaacttacattattcctatgaataatagtttatcagttaccttagatagattttatactgaaacaaaagtgacatttgaccctgattttactgaagattgccttattttaaatggtaatgaagtgaatgccaaagagaaagaaaagattcaaaactatatgaatatagtgagagatttggctggaaatcgtttgcatgcgcgaattgaaagtgaaaattatgtgccaactgaacaatcaaaagaaaaacaagctaatgaacaagcaaaagcgcaaaatctttttgctcgctggagaaaagaagagcgtttttgctatacgacttactatcactttttctctattttcaaatgttggatgcatagacgctcctttgactgtataagaagcaaataaaaacttttgcacaagtgtgacgataacaattgcaacgattatggctacaatccattctattatttctttcttcattattatggctcccttgatatgtttttatgtcatttatcactgagcttacatgggctcataaaagattactgaacaacaccatttttaactttaatgtgttttcctttttcaattttgtcatattgttttttaggtacaacaacgacacgctttccttgtttagtctttacagtaacagtataaagtttctcatgaggcttcatttgttgtttcaacatattaaactgagcatctacactgtttttcttttcatgttgatttaaaaacgaatgtgcaaaaatataatagaataaccaattattataataagttgtagcaatatattgagatgagtatggtgcacttgaatcataaggtctttgagacggcatcaaagaacgagattgtgctttttgtcttgatacactttgttgtcctttatttttggttgctgttacacgacttgattttgttgcttgttgggcagcacgctgactagattgttgtgcattgcgagacgcatttattgcactagaacgactcatacttgtacttgaagaagttgaacctctagatgcagaagctgcactgctacttgaactagaacttgccgaactggaactactcgttcctcctgacgttgttgcatgagaatatgtactgacaatacttaaagaagacgtgagaagtaccattattacgcaacttgttttaaataatagctgtttcattttgtcacctttcttttacttcgtaacttcatctttcgaaacggctttgccttcaacatcatcatcaccataaatcatatatggtggtcgatatacatgaattttcttcccatcctttacaatatatggttttttattaccatcacctagtatatgttcatacacgtgatctaaatcagctttttctatatgtgatttaccttttttatctttatatttaatctcaacatttggcgtttcagaatctccatcatttaatatttcataataaacataatcatatttatcagatttttgactttccttagatggctctttttgttttccagaacctccacatgcacttaaagtaacagttatggtaagtatacttatgatcataaatacttttttcatattaatactccttttctccattcataaattcataataaattataacaaacaatttttaaattattattaatgattaactaaaaccttatttttaaaaattcagtttaaattaagcgccatggataatccgaaaaattaaaccaaaagcattcacttatatgtattttgataaattataaaacaagtatctttcaaacatgtaagtttcatgtctataaatgtaagtttagataaaggcaaggatatcccaaccatcctacaatttaaatatagataactaaaggagtgagaggatggctattttaacagcaaatcaattatcaaaagtatatggtcacaaacaaaaatatcgagctttaaataatataagtttttcagttgaaaaaggggaatttgtagctgtcatgggtccttctggatcaggtaaaacgactttactcaatgtgttaagttcaatagatactatttcagaaggaactgtggaagttgaaggcaaagaaattaataaactgagccacaaagaagtggcaaattttcgaaaacaacatctcggttttatttttcaagattatagcgttttacccacattaacagtaaaagaaaatattatgctaccactctcagtacaaaaattccataaatatgaaatggaacaaaattataaagaagtggctgaggcattaggtatttataacctgggaaataaatatccaagtgaaatttctggcggtcagcaacaacgtacggcggcagcccgggcattcgtccataaaccaacgattattttcgcagatgaacctactggcgcattagattctaaaagtgctcaagatttgttacaccgtctagaagatatgaataaacaatttaattcaaccattatgatggtgacacatgatccttcagccgctagttacgctgagagagtcattatgttgaaagacggtgatatacactcagaaatctaccagggtaacgattcaaaacaaacattttaccaagaaattatgaaacttcaaaccgcattaggtggtgtcagtcatgacatttaaccaacttatccttaaaaatttaagaaaaaatattaagcattatggaatgtttctattttcattattgattagcattatactttattttagtttctc

SEQ ID NO: 3889 - DNA, 3163 bp, Artificial Sequence
  Description of Artificial Sequence: synthetic nucleic acid sequence
atggaagtttctgtgggatatattaattatgagcctatacctagatttccaggtgtaacacgtgatattgcattagaagttaatcatgaagttacttcatctgaattgttatccattattcatgagaatggtgaagatattttaaatgatacactcgtatttgatgtatacgagggtgaacatttagaaaaagggaaaaaatctattgcaattagacttagttatctagatacagaaaacacacttaccgatgaacgtgtaaatgttgtgcatgataaaattttagaagcacttaaaaagcatggtgcaattattagataattatcataaaggacttacgcattagtaataaatactagtgcgtaagtccttttatttattgtatttttgattcataagatgaattgctttatctctgtttttaaaatgtttttttgaaatagtatcaagttgttgaatatcatatttttgaatgactttagcggcaattaaatctactttgttacttgctccttttggtatttccatatggagttttttagagatgtggtccatgtgtttaacaaatgcataacgagaaataatgcttgctgccgcgattgctagtgatttagattcaccttttgtttcaaattttgttttgtcaggaaaaggtaatgctgataatgcataatgttgataaacttctcgctttgcaaattgatcaataacaatataatccagttgatcttgctcaattttttgaagcacatttttgatagcttcattatgtaagacagctttcattttaacttgagaccatcctagactttgtcgttcgttatacttaacattatctaatgttaataaagaatgcgggataaaggtaatgagctgttctgcaagatcgacgattttagtatcgcttagtttttttgaatcatctacaccaagttcttttaagattttgatatgtgattggctcacataagctgcacatacagtcaatggaccaaaatagtcgccactgcctgcttcatcgcttccaatacaatgaaaacgattatattgaatactagttgtatttgatgatgtatgtttgccagttgttgattgtttatttggtagcaattgactcgcaagttgttcagcattcttaccttgaaacattactttgccagaactatagatattgataacagtattttgatatctcgtacgagctttcataccttgaggtaacttcgtcgtctcaaaagtagtttgagccatcaatgattgaatttcttttgacgtgagtttgtatacgacatttcccattaattgaatcctctcttttttgtactcttttatattttatcaaattttaatattgaagatagtcttaaatgatattgttgaatatgtcatctgtattatcttttaataacagacgtttacatcggtatttacactcatgtataatatttgatgataagtaaaaatatgtaaaatactacaatttacaatttaataaattggagtttgaaaaaattgtttaagttaaaatcattttaatccaaggtcaggagaaattagtatgggtgaatttaaaaatagaataaatgttacgattaatgatcaacatttcacaatcattggcgaagatagccctgaacatattcgttatgtagcacatcttgttgatgaaaaaatgcaagaattaggtcaaaaatcagcaggtttagatacaactcgaaaagcgattttaacatctgtgaatattatgcatgagaaagttatattagaagaagagaacagacgattacagcaagaaataaatcaattaaaacaaagagatgaataaatgctcattgatatagttgttcttcttattatttgttactttatagtgatagggtttcgtagaggtatttggttatcgatattgcactttgcttcttcaattgtatctttatatattgcgtcacaacattatcaatctattgcgcaacgtttagttgtctttgtgccatttccgaaaacggtggcgtttgacatggtctatactattccttatgatcatttgcaatacagatttgaaaaagtgatagcatttattataatatttggtatgtgtaagcttattttgtatctagttgttgttacatttgataatataataacgtataaaaagatacatttagtaagtcggatatcgagtgtcgttttgagtatcatagcggtttttatatatttacaaattggactttatttattatcgctatatccgcattcatttatacagtaccaattatctcaatcgctattaagtcgagttgtgattgaacaaattccttatttatcacaatttattttaaatttataaagtaatgacatgaggtcaggacaaattcgaacgttaatgttatgtcctggtcttctttttatggagtgatattgatgacaaaaaaagatgtaattcaattattagaaaaaatagctatatatatggagctaaaaggagaaaatacatttaaagtttcagcgtatagaaaagccgcacaaagtctagaggttgatgagcgtacattagaagagattgatgatgtaacagaacttaaaggcattggaaaaggcgtaggagaagttattaatgaatttaaaacacaaggtcaatcatcgacccttcaagcacttcaagatgaagtacctgaagggttagtgccacttttgaaaatacaaggattaggcagtaaaaaaatagcgaaactatatcatgaacttcaaattacagataaagaaatacttcaaaaagcctgtgaagaaggtaaggtcagtgctttaaaaggttttgcaaaaaagacagagcaaaacattttagaagcagtgaagtcgatgggtgctaaaaaagatcgttatcctatagagctaatgagaggactcaaccaagaaattgtaaaatttattgaacagttagaaggagttgaacaatattcaactgctggtagttttcgaagatataaggaaatgagtaaagatttagatttcataattagtacatcagagcctaaaaaagttcaacaacaattacttcgtattccgaataaagtcaaagatgttgctgttggggatactaaaatttctctggaattagcttatgatgatgagacgattggcgttgattttagattgatagaacctt

SEQ ID NO: 3890 - DNA, 3527 bp, Artificial Sequence
  Description of Artificial Sequence: synthetic nucleic acid sequence
tatataagtaatagagggcatgatagtattgctatatttgaagttttagaagatggcagatcactgagaagtattgaaatacaaccaagttacgatgcctttccaagagactttaatataactgaatcagataactatttaatttgcgcacatcaagaaggagaatcaaaagtttcaatttttgagcgtgataacataactggtaaactttcattaaaagataaaaaagctatagcaaatgaaggtgtttgtgtactactataagatgtctttgaataatagaaaagtgatataaaaagcccttgagtggttatgagataaaaaaacaaaactctgtatatcactcaagggcaaatcatatggagataactaacactagttcttgaagaaggttttaatatatttaaatttacctttatatggagggaaaaataaactcgattctagacgtgtagatttaaatgtgtatgatttcatatgactaaatgtatcaaaagaatacttaccatgatattgacctatgcctgaagaacctacaccaccgaaaggtaagttaggattagctaaatgcattaacgtatcgttaattgcaccgcccccaaatgataattcttcaaccactctatgtgtcatgttttcatcttcgctaaaaagatacaaacttagtggttttgatttactttggatgatttcaagtacttcatcgaaattatcataagtaataataggcaaaatgggaccgaatatttcttctttcatgattttattgtcattggttatgttatccaataaagtaggttcaatatataaatcttctttagaactattacctccaaaaacaacattatctttatgaatttgaatcaagtcattcaaccgattaaagtgtttttgattaacaatccgtccgaaatcagggcttttttcaatattttctccgtaaaattcagtaattgtttttttaagagcttttattaaatcatttttaactttccgctgaactaatatataatctggagcgacacatgtttgaccagcattagtaaatttaccaaaactaatacgttcactcgctactttgatattggctgtatcatcgacaatgacaggtgatttaccgccaagttcaagagtaactggaattaattttcttgctgcagcttcatagacaatttttccgactttttcactgccagtaaagaacatataatcaaatggtagacttaataacgtttgggtttcttcaataccaccttcaacaacagaaacgtatgcttcatcaaatgtatcttcaatgatgtccttgatcacaatggcaacatgaggtgttaactctgaaggtttaactatagcagtatttccggcagctattgctccgatgagaggctcgaaaactaattgaaccggataattaaatggtcctataataagcaccgtaccgtaaggttcttttttaatataactctttgtagggaataagtagagtggtgtatccgtttgtttggttttcgaccaattttttaactctttgcgcattagctttatgcttttcaaaagcataccaatttcagttgcgtatgcttcaaccttacttttacctaaatctttatataaggcatctaataattcattttcatgatttttgatatttttacttagtaatttaagttgttgttttcgaaatttaaggttttttgttttatgcgtattaaaaaaagctttactattgttaaatttatctctaattattgtcataaaattacctccaaattatttttttggtaaagaggttgagatagtcctgaatatattaaatgagaacataaaaagattagtgattatttcttcttaaatataaaaattttgtttaaaaagttacaaaaagggagtggaatagaattcatatcgaattcttagtccactcctgaaattaaccattacttttttgttgaagattcaaagcattagcgatatctcttccgacagatggtttttcagctaagattaaagatttcattttaattttcctttcacatttataaaatacgtcatgttatagaattacatacattgtaacatgtatctttttgtaaattactatatataaaattaattaagatagttatatatacatatcttgttcaatcatatagttcaaaaacacattatcacttaatacgaatatttacttactaaaaatttcaacacttttaaggtgttgttttttacttctttttttaattactatagaatgatttcgagtgtaattgggacacttaattttgttcttaggagagtgagtaataagtgcaaattgtagattttttgatagcacttttaccagccctattttggggtagtgtagtcattataaatgtttttgtaggtggtggaccatataatcagattcgaggtacaactttaggtacactttttatcggattttctctacttgctactggacacgcagcgtttgataaccttacagtaattattgtcggtttagtatcaggagctctatgggcttttggtcaaggtaatcaattaaaatcatggctggtattaaaacaagaacacaattaaaacaaaaacatttcgatgacgtaatgaatatgatcacaaattggtttccatctcaatcaacaatgtatgtcatcaaacaattagaaatggactttgaaaacgaagtataaggagtgatagcaatggaatacattggatttgcggacgctatcgagtttgtgaaaataagtggaatttctaaaaacgatttagaaaagcacgtttatagcaataaagagttccaagagaaatgtatgtacagatttggcaagaatcataaacgctacatcaagattagaccggcaattgactttatagaacaaaatttaatggtgtcagaaacgtcactttagaggagttttactgaagaaagaggatatatcgaaaaacttttagaaatgaaaggagagaatgataaatgaaatatctattaagttacatgacgatgtttatcgcaatgatcatcacaggaaacgaagtagccagatctaggtttcgaataaatgaaaccctcatctacaagtaattgatatgcatgttctattgtagtgtggctaacagataaatagttacttaactgtcgtttagatggaaatctatcatttgattgatattgaccttcgataatttgattttttaacttttcatataacgataaataaagtggttgatttactttcaattaactgacccctatctttatgtacaaattgaacctttttaaatatcagtttatctcgtaaaatatatttaatcaataagaaaaggggtaagtagtatgtctaaaatagtaggatcagatcgagttaaaagaggaatggctgaaatgcaaaaaggcggtgtcattatggacgtcgttaatgcagaacaagctaaaattgctgaagaagccggagctgttgccgtaatggcattagagcgtgtaccatcagatattcgtgctgctggcggtgttgcacgtatgg

SEQ ID NO: 3891 - DNA, 3166 bp, Artificial Sequence
  Description of Artificial Sequence: synthetic nucleic acid sequence
acttttttattaaacatttttaaagttatctttcataatcatatgctgtttcgataatgcctttaagttcactaattagcggttcttttggattagcagttgtacattgatcttcaaatgctaattcagccattctgtctatagtagagtgaagaagctcttcagttacgccttgtgattttaaattcatatcaataccaactgaacatcctaaatcatacaccgcattagctagagcatccactaattcttcagttgtattacctttgagtcctaaaaattttgcaatgtcagcatagtcagtatctgctctaaagaaatcatatttaggaaacagtgcatgtttttgtggatctttggcattatagcgaatgacatgtggtaataaaatagcatttgttctgccgtggggaataccatattcaccaccaattttatgtgcgatagaatgagaaattcctaaaaaagcattggcaaatgccataccggccattgttgaagcattatgcattttttctcgtgagtgtttgtcattttcttgaactgatgattttagataatcaaaagttaactttattgcttgtaagcttaagcctcttgtataatctgaagccatgacagagacgtaagattcaatggcatgtgtcaaaacatccattcctgtatctgcggcaacatctttaggtacacttaatacgaattgtggatcgacgatagcaatatcgggagttaacgcataatctgctagtggatacttaacgtgtgtctcgctatcagtaattactgcaaaaggtgtcacttcagaaccagttcctgatgtcgttggtatacatataaattttgcgtttttaggtttggtaattttataagtacgtttacgaatatctaagaacttttgttttgccccaaaaaatgaagtttctggatgctcaaagaacatccatattgctttggctgcatccattgccgaaccgccaccgagtgcaataatagtattaggttggaaatttataaacatttctaaccccttatagactgtatgagttgatggattaggttcaacttcgttaaacactttgatttgtggttggttttctcggcgtctcagcacttgttcaactatatcagtataaccaatattaaccattcctggatcacaaactatcattacacgttcaacattatccatctctgtcaaatacataactgaattttcttcaaaataaactttaggtgggagtttaaaccattgcatattattacgacgttttgctattgttttaatatttaataagtctactgcgcttacattatgagaaatagaatttctaccatatgaaccacaacctaacgtgagtgaaggaatgagttcattatacatatttccaattcctccgacagcagaaggtgtatttaccaatacacggcaagctttcatttttagaccgaatttttgttgtaattgactatcctcggtgtgaattacagcagtgtgacctaaaccaccaaattttaatatgtcttcacaaatttgtagtgcatgtcctgttgattttgcagttaccattgcgagtacaggtgataatttttcacgtgataaaggataatcttttccaattccatcaatttctgcgactaataattttgttttttctggaacactaattcctgacaatttcgctatatctacagcagatttaccaactatatcaggtttaactgcagttttatcttcattcatgatggcatcttctaattgttgtagttcatttttattaacaaaatatgtttggtgtaatttgaattctttaacgacgtcagtgtatacttctttatcaacaaccatgacttgttcagaagcacaaatcataccattatcaaaagttttagaaccaatgatatcattaacagcacgtttgatatgagcagttttttcaatataagtaggaacattacctggaccgactcctaatgcaggtttacctgtcgaatatgcggactttaccattccagagcctccagtcgctagaactaaagcaatatctttatgattcattaattgtttagttgcctcaattgatggcacttctatccattgaatacaatctttaggagcacctgcttttgttgcagcttctaaaatgactttagcagcatattttgatgattgttgtgcacttggatgaaatgcgaaaataattggattacctgttttaatagcaatcattgctttgaaaatagttgtagatgtagggttggtcgttggtgtcactccacaaatcacgcctataggttcagctacatacgttaatcctttttgtttatcttcacctatgatacctactgttttattgtctttgattgaattccatatgtactctgaggcatataaatttttgatagctttgtcttcataaatacctctacctgtttcgtcgtaagctagtttagctaaatgcatatgctgatcaacagcagccatgctcatctgatgtacaatgtcattaatctcatgttgtgattttttagatagttcttttagagcttcttgtcctttttctgctaatgaatcaatcatttgtgtgacttcatctttgtttgattcatatgtattttttttagttacagataacatatacaaccactccttagatattgtgaaataattcacaaacattatagtacagctctttccaaattaaaagaaaatacagactattaaagagtcaattgtgatgtttatatgaacacatttttaacctatatatttagtcggggttgaggtgtaagacttgatgcaatgggaacaagacgtatttggtagttaaaaaaatctatttttaaaagaagtaaattttaaaaaaattattgtaagtattcttactaaaaataatgaggggtgttgtaatgaaattatcgtctcacccgactaacgatgttatcagtttataaaataaaaaactgagacaatcatttatgtctcagtagctcatgctttaaaaataaattgataaagaataagtgaaatttatattaattattttgttcagttgcagtaagaagttgtatcgctttgggtaatacttgaatctcaattggtgtttctaaattaatttcgccatcaatatccactttcatactagggtttgttgagagtgtgatgtgc

SEQ ID NO: 3892 - DNA, 3170 bp, Artificial Sequence
  Description of Artificial Sequence: synthetic nucleic acid sequence
ctccttctcttgcaaaaggcgcccgttcaaaaaattgtggaaactcagattcataaactgactgcggacgtttgattttccaaggtgctctactggtactctcaacaccacctgcaatatatattgttccagcaccactttgtaccatcctacaggcttgtataacggcttcaagacctgagccacattgacgatcaattgttataccaggtattttaaaatctaatcccgcttcaagtaatgattttctagctaaattccccccattacctaccgtattacctaaaatgacgtcatccaaaagagacattacttttggatactgatctgtaaaatgattaaataaaggttctagtaatgattcaggttctaaatgcctcaatcatcatcaacgccaccatcatgattaaaatatactttggtcatagttgatactcctaacgttttttaatgaataacttaattatatttgaaacctttcgtgacaccaaataatttaaagttaatcattgaatacatggcaacctataattattaaaaatttttagcagttacacagcgatttcattatggttgcattagaaaagcctgtgacaaaaaagttgtcacaggcatacttaacttgaagtcaatcgatgactgaattaaattgttgatgtacatcgcgcttttttatactttatatgcattgcaatgaaaaacgttaaattccatctcattcctttaaagaatatcaatatgacattaaagtttgtttgtaatacttttagcaatattagtgtaagccatatcttccattggtggattatgtaatccagcacgtatatctctatagtaccgttgaagaggtctgctcatttctagactcttagctccaactattctcatagctaaatcaacgatttctataccttggttcattaccaccactttacttgctgaggtttcattccatatttgtgcatcctctgtatatgattgataccctctagctgtactccatagaaaatgtcttgcagaaagtaataaactttccattttccctaaattttgttgcactgtaggtaaactatcaatcgtacctgtaatactattaggctaacggtttcccaatcggaatagtcgatggtatggcgtcacctttttcgtatatccaacaagatgttataactgtattttcagaaggcccataggcattaacgtacatatcacaatgcttagaaatatgttgaacaaatgctggagtacttggcgcacctcctgtaatcactttaggaatatagaaatgatgcatcacattatatacctgtagtggaatagatgcgatggtgatattttcttgtgaaattaacttttctaataaatctgtattggtccgctcaactgatgttgcaatgacaagcggatatccatttaataaactaacagtagaaatcagttgccgaagcatcgaacacataattagcgtactgcagatagacttcatcatcggataaattgagtctttttgtccaagcacatactaaatttaatatattacgttgtttcactgatactgctttaggctttcctgttgttccagatgtataaatatgatacatatcatcttccaaattccctgcatattctatatttaaccttttattattttcagtgttatcaatatcttcaattttaattactggtatatgtgaggatattgcttttccatatgtgagcactgctgcgacttcagcgtcttcaataataaattcaatgcgtttatcgggataagtgacgtcaataggtacataagaacctccaacttttaatacagcaatcatactagcaaccatttcaaaacttcgttcagttaaaagggctacacgttcccctttttgaatgccattttgtatcaatgtttgagccatactattagaataatcatcaagttcttgatacgtcatcgattgtccattcattttaagtgctacatcatctgctttcgctttcatgacatcatgtaaaagttgctgtattgacttattttttggcaagtctaaagaacaatcattcacatgcttgtccaaccaaattaataagtcatcattttcatcaatatcttgaatttttaggttttcggtagatattacatgtttaataatcatttgaagttgttcagcaatatgatgaatggtctcttgtttatataaatctgtattatattcaatattgacgacatagtcatcttgatcttcttcaataataaatgacaaatcaaatttagctgttgttgactgaggtggaatatgtgtcaattgactatgtccaaaattcgcatgatttgtttcattattttgaagtacgagcatcacatcaaataacggattatgtgaagcatctctttcatcaacaagatcattgactaagctttcaaaaggatattcttgatgttcatatgcccctagacacatctctttcatctcagccatcaattgatcccatgtcttttgatcatgtggtcgaccacgatatacaagtgtattagcaaacatacctaacatattttcagtatcgcgatgagtacgcgcactgattacactaccaatagcgatatcgtcctgacgtgtatatttgtgcaataataccatgattgcactagcaaagaacataaagtctgtcacttgatgttgttctacataagatttcaattgctgtttgatttgacgattgtaatgaaacgtcaacatattaccgttggttgttttaatacttggtctaggataatccgtaggcatatttaatattggaacctgattttcaaattgctgtaaccaaaagtgacgttgtttagataagtctctgtgcaccatccactcactataatctttatactgaagcttaagttcaggtaatgatttatcttggtataaagcgttcaaatcagatagtaaaatcgtgttactcataccatcattaatactatgatgagtatccataaataaataatcttgttgtggtccatgtatatatttaactcgcatctgacttggttgttctaaatcaaacggttccataaatgattgaataatatcttgctcgttcgttagagatgtcgttacctcttcaaaatcaggcgaaacatgtgtcgcaatacgttgtttaacttcattgtcatcaattacatattg

SEQ ID NO: 3893 - DNA, 3150 bp, Artificial Sequence
  Description of Artificial Sequence: synthetic nucleic acid sequence
ctacgacaaaggcacaacctactttatcgactcaagttagtacaactactaaagcaaagcaactttcaacgccaactacttctaaaactgatagcagtaaagctttagtaagtttagcatctacagaacgtaaaatagataaataccaatcgatgactcagttagaaaaagaaacaactgaaggtgtagattggagaaaagatacaaaaaacacagggaatcaagtactcattgtggctccacatggcggaagtattgaacaaggtacaacagaattaactaaagcattagcagataaaggtaattatgattattattcatttgaaggtattcgacctaaaaataactctgaattacatgtgacgtctacacattatgatgatccgacattaaatcaaatgattaaaaaccgtactgcaactatttcgattcatggcgcatcaggtactgaggagattatctatcttggtgggccccgttcagatttaagaaatgctatagagaagcaacttgtaggacgtggatttacagttaaagttccaccagagtatctaggtggtcaaaataataaaaacttcattaataaagaagacaataacactggcgttcagttagaattaacgactgctttaagaaaagcattctttaaaaatggagatactagtacaaaaaatcgtaccaataaagaaaattggacaccaacaatggaagcatttattaatgcattatatgaaggtatcaatcaaacgtattcataaaaaatttttaataacccttatctcgtaatgcttcagctatagcatatcccatttttcctgatgaacgatttgatacgtatcgaacaggatcaataacttcaactgtaggcccagctgtaactaatgcgcgctttccagaaaaagagcttttgacaacattcttctgttgagtaaaaaatttattaataacagataggatttgcatgggttcttccattcgcccttttgctacataaccacatgctaaatagccactaccaggttcaataaaataatatccgtcttgacttagcactttcatattatgtttagtacgtggattgttatacatatttacattcattgcgggtgcaacgaattttggtgttgttgtagcaagtaatgtagaagtaattaaatcatcagcaattccaacacttaattttgcgatagtattagcagttgctggcgcgactataatcgcatctgcccagtctcctaatgatacatgttgaatctcttcaggattttcttctttaaatgtatttgtgtaaacaggatttctactgattgcttgaaaagctagcggagtaacaaactcttgagcatgatcagatagcataactcttacatcatagccggattgtattaatttacttgttaaatcaattgctttatatgctgcgataccgcctgtaacagctaataaaatatgtttcattatttatattctcccttaatactttatcaatacgcctaaattagaaatggaacggaataatttagttatgtgttatctattaaatatcaaatttaaaggcaactttggctaagcaaaagcatatccctcgtaaaaagagagcggaatagaattcattatcccaccctctcgcaatatgaccttaaatagagaatctaataaaattttcataacagaaactcagacccttaaacgttttattttaagtacatttcagggtagtcaatctactgcgaagagatttaatggctaaaactagtcatttatatttcagattcattgacgacttatttataattattatacacaaattaatcattaaattaaaaaagtgactattactaaatgtaactttcaagttggacaaagaatttttgtctgatttcaagcttgttttatacgctattcaactattttataatttactagtaattaaaaaacctaggacaatttttatgtcccaggctctaccaatattaataaaactttatcctaaatactctttcggtacaacaggttctattttaccatcagcaatttcttctaaagcttttccaacaggtttagctgaatggtactgatctaaaagcgctgtttcgcgtttttcatctaattcacgtgctcttttagccgccgtagtggcaataagatattttgaattcacttttgcagtaagttggtttaacggtggatttaacattattttttgacctccagtaacatttttctatatttagcttcgattcgctctctttttaaatgctcagcttcaactattgactgaattcgattcttagcgagttcaacctcgtcgttaactacaacgtagtcgtataaattcatcatttctacttcttttcgtgcctcgttcacacgactttgaatcttttcatctgattcagttcctctaccaacaagacgttctttcaagtcatctaaacttggaggcgctaaaaatatgaacaacgcatctggaaatttctttcttacttgcttagcaccttcaacttcgatttctaaaaagacgtcatgaccttcttccatagtatcctttacatattgtacaggtgtaccatagtaattacctacatattgtgcatactcaataaactggtcgtctttaattaacgcctcaaattcttcctttgttttaaagaagtaatctacaccatcaatttcaccttcacgcatatgacgtgtcgtcattgatatagaatacttatatgaagtagttgggtcttcaaatatcttctttctaacagttccctttccaacacctgaagggcctgaaagaacaattaacagtcctttttccttatccatgccttacgacctctctaagctattcttctattatttaaatataatatcatattgctacgatatatgtatagccgtactttgttatagagtcaaattcatcttatttcgtcatatctttaaaatttttaagcacttcaattcgcctttataaattgctataaaaattaagaatattcaactttaaaataatttacagtctttaatcatgacctctcagtttacgcatgttacaatatgatgaatgaaaaagtataaggtggcagataattatggcatatgatggcttatttactaaaaaaatgattgaatcattacaaggtttagtctcag

SEQ ID NO: 3894 - DNA, 2998 bp, Artificial Sequence
  Description of Artificial Sequence: synthetic nucleic acid sequence
aatgcgacaacaactgcaaatgagtaaacctagtatgagtacaggtgtaaaaaaactacaagaatacgatatcgtcaaacaacaattcacgcgtggtagccgaaagcaacattttattgcagagaaagatttcttcactttcttccgcaacttttttactaaaaaatgggaacgtgaaattgacactaatatggaagcaattgaagatgcagaaaatatcattcacccacttcttgaaaagaatgatatagatgaggaagttaaaaaacaagcaataaatgtaaaagcgcagttagaccactctaaaatatattacaagtggctcgctcaattaagtgaagctctagagtcaggagaaatttttaactatttcccaattccagatgaacaacatcatcatgatcaataagaaaaagccaagcgataatgatttaacattcgcttggcttttttttgttataagttatcgtcttcaggtttgtctttgacctgaactattcttagagaacgtctttcaatttctttatgcttatctgcacgtctttctaacttgatacgatctcgtccgagtataattaagaacgaaatcatcattagcgtaaatataacaattaaaggtacactagcaagtaatgatgctgttttcaatacttctaatgcacgttctcctccaactagcattaaagagaacggtagtaaacataacgcaaacgcccagaacaaacgattagcacgtaacggttctcctatcacttttttctgtgacgctgctgctaaaatatatgaaccagaatcgaatgttgttgctaagaataagaaagctgatattaagaataagataatagtaattgtcgagaatggtagttgatgcattatttctatgattgttgcctctgtaccataattgtttaaatagcttattacattaaattgctcagtaatttgtagatatacagcatagttaccaaaaataccgaaaaataacacacaacctaatgttccatagcatattgttcctaatacaacttctttaagtgtacgtccttttgagatacgcgcgataaacaatccaataaacggtgcataaacgagccaccatgaccagtagaatattgtccaatcttgagggaaattcgtttctttacgaccttttatgccaccaaatggttccatccatgtcgccatatggaagaaatcttttatcatattaccgaaccctgtaactgtagtttccataataaacacagttggacctacgatgaatacaaatgctaataataaaaatgataaccaaacgttaacatcacttaatttttgaataccttttttcaaacctgtgtaagaactgattgcgaaaataactgtaatagttagtaagatgattgaacgtaaaatcatattagatccatctaaaccagtcaatcgttcaataccagctgagatcatcggcacgcctagagcgagtgatgttgcagcaccaccgagcaaaccgaaaataaataaaatatctacgatttttcctaataatttatccgtatgtccttttaaaattggtcgacaagcttgactaattttatagacgggtttcttcttaacgaaaactaaataaccgattggcaaagctggtagcacatatattgcccaggctataggtccccagtgaaacataccatattgagttgcatattgaagtgcttgatcggacattgattttgcaccgttaggaggtacttgataataaaatgcccactcaataacaccccaatataaaatatctgaaccaataccggcacagaataacatggctgcccatgtgaaattattaaattcaggtttgtcagtcgcttttcctaacgtgacattcccatacttaccaaatgctatgtataaaacaaaacaaaatatagccagtcccataaagagatataccgatccaattgaattagaaatggcactattgatatcggtaatgattatttcacttgctttcggaaaaaccatcataggtataacagcaaaaagtaacacaatgactacgcctatgaaggtcgtccagtccataactttttcctttttcaaatgtgatccccctaatattaatttatgaatctttactttaaattacgttcaatggatagtgattcacaaaaaagacaataacgaacttttaataataatgcaaattacatacatgtatcatcaaaatctaatttgaataattatataatttaagcctctcaaatattcatcttaaattgctatgacaacagtgttaagttaaaatttaacaaaatgaacgaactttacaatatttcatatcgtatttttatacacttttaacgtatatatatttattttatttttttctccactgatactcactcttaatctataaataaaaaatcgccaatatttagtcattcaaataccttactcgatgagatgaagtatttaaaacactatatatatggcgattaaattccaacttataaaaattgattaatatcctaaaatggttttaataacaaatcctgtaatgacggatactgttataacaaaaaatcctggtatcataaagctcgtaggtcttgttctacctgtttcatctagttctacagcaaataatagtgtcggttgagctggaataacgaaattcacatttaatgtttgtaccatcgcaacaaaatagatgggaggtatacctaaactcataactatcggcaccataattgatgctgtagctgtttgagaaatgacaatcattgcaactacagaaacaagtatgataacaagccaaggtacttcactaataattgacccaatatcatttttcaatatttttaagttatgtggagcattaaatattgttgcacctaaccaacctgggccaagaactgcaaaaagtgctcccattgcagattgtgtaatattcgatgacagaatatcagaagtattgatttttattaataataaattgattgtagcgctgagatacata

SEQ ID NO: 3895 - DNA, 3876 bp, Artificial Sequence
  Description of Artificial Sequence: synthetic nucleic acid sequence
tattgaatcttaaaattagaaatatttacttgctgtaggtgcagctaaagcttcactcaattcttcactgaaggggagtacagttatagagaagccttgcatgtctaacgctgtcatatagtcacctacgaaccattgtttaacaccaatatcattctgattgaattgttcatctagatatttagtaactatatttaattctgatagtggcgtaccacccataccattaaccattacgattaaaggttttttctcaatttctttgtataattgatcgagtaaacgttcaacaatcacgttaataggttgtacgtcttcacgatgtaaacctttttcaccgtgaataccgataccaatttccatttgattgtcttcaatatcgaaaccgtttttaccagttgtgggcaccattggaggcgttaatgccataccaatacttttaatatctggtaaaagtgcctcaactttagatttgatttcatcaagtgcaacacctttttcagctaggtatccagcatatttatgcacaaatactgtacccgctacaccacggcgtttttccgggtcagaaatagcaatatcatctctgacaataacactttcaactttaatatcttccatttgagccatttcttgagccatttcaaagttcataacgtctcctgcatagtttttaataacaagtagaacgccgtcaccattgtccacagctttaatggcatctaatattttatcaggtgtaggtgaagtgaagatttctccacatacagctgcatcgagcatgccttctgctacaaatcctgcgtgtgcaggttcatgtccactgccgcccccagaaacgagtgcaacacctgattgttttttatgctttctaacaacaatagtgtcagatacaacttcaacatcgttgtttgaaactgtaattccatcaagcatatcttttaaaattgtgtttttatcttgaattaactttttcattcaaagcgactccttttagttgaactgacttttagataaatcattaacagttaaaattgcgtctgcgatttcatcagcagtgattttatcacttaagttagcaaacgtatcatttggtgttaatgcacgttcacctacttgaactaattcttcataacttgtgttttcaatgtgaagaccttctaatgttgttggcatattgatattatcgaagaatgttttgtatttcatgaatttttcagttggcgcattttcaagtactaattgtactaaaataccgtatgccactttttcaccatgagttaagtggtggatatccccttctaaagctgtgaatccattatgaattgcgtgtgcacctgctaatccgccgttttcaaatcctaaacctgaaagtaatgtattggcttcaatcacagcatctacttgtggtgtcacgatatgtttttctacagaagtataagcactgtaaccatattcaaaaataacctcttcacatttttgagcgattgctaaacttgctaatgtaggtttgccatggaacatgttttgcccttgtctacgaagtgtagattcaacttcgattaatgttgctaaaccatcactcatacctgatgcaaataaacgtacaggtgcttgtgcaacaatttcagaatctacgataactgtatcagggtttttagggtagaattcataaccactaaatgatccatcttcgttataaataacagatactgctgctgttggtgcatccattgatgctgtagacgcaaaatcgatgacgcttgctttaagttcaaatgctacagctttacctgtatctaacgctttacctccgcctaaaccaataacaacgtcaatgtttttttctttatattgtttaactatacgttgaatttcttcttcagaagattctcctttaaatacttcatattcaaaatcaacgttgttatttgctgagaaactttcttttattttttcttcagtgatattccaaaccacttcatctgcaataatcaacgcgtgactaccaagacgttctgtttcttcagcgatagagctaacaatacctttcccttgtacatatcttcctggtgattgataaataaatttagacataagtattcctccaaaacatcttttatatttatattaaaaaataagatttaaaatgaaataatgtaatctcattcccctaatcttaatttttaataagcatggatcatactgtctctcatctctcaattcctagtatacgctttcaaaaaaatttttaaaggattatccatcgaaaatttaatagaatttgattaaattgttgttaattcttttgaaaaatcattaaaacagcgcatggttagtgcattatgacaatttatttaaaactatatttacatttattgaaaatatttttaattataatttaactgtcgatttcaaaccctaaatcttcaatcatgcgataatcttcctcattcggttgaccgcctgtaattaagtaatctcctacaaaaattgaattagccgctttcaatgcgagtggttgtaatgaacgtagatttacctcccgtccacctgcaattcgaatttcttttgttggattgattaacctaaacatcgctataattcttaaacatttcattggtgacaataaatctaatccaccaaatttagttcctttaataggatgtaaaaaattaataggaatgctatcagcatcgatggctcttaaagcaaatgccatatcaataatgtcctcattcgactctcccataccacatatcacacctgaacaaggagaaatattattatctttcatcatttcaaccgtattcactctatcctcatatgtatgtgtagttactacttcatcgtgataacgctcactcgtatttaaattatgattataacgatcgacaccagcagcctttaattttttagcctgttcttctttcgttaatcctaagcacgcacaaatctttagttgtgggtgtatctttttaatatcttctactgtttcgcaaatatgatcgacttctctgttactaggacctctaccactcataacaatacagtatgtaccgatttgattttcagttgccacttgagcgccttctttaatttggtcctgttcaacaagtgcataacgttgcttttctttcatttttacagattgcccacagtacccacaatcttctgcacagataccacttttagcatttaatatcatattaagcttaacttttttaccatagtaatgttttctcactgtgtaggcttcatttaataaatcaaatgtatcaatttcagcattttcgaaaatagatattgcttcatcttttgttaatgactcttgatttaacacacgttgagctaggtttaatgtcataatctttaactcctttttcttaaaaattagcattttcaaatcattcgattgcacattgtaaacttttcgatattataagtttacattaatctagatacgattgaaaatatttataaaaaaaaggatggaacaacgcgtacattgtttcatcctcgcaatggtataacacggaattaaagtactccataaacattataaaaatgacaatgatataagtgataaaattaaagacgacaaattaacaggatttttgcacagtgatggtcaaaaagtatcagtgacttatgctaacgataatcctacacaagcaggagaactaacaggtgcaaatcaaaaatggttaatgagtcataacatgaatgccatgaaagataatactaataaattgcatcaagcgttaactaaaatacaacaaaaaatgcccggggatgggggagacacgcctcatcaagatatggctaaaccatataaactaacaacgcactatttatatggttcatcagattcta

SEQ ID NO: 3896 - DNA, 3019 bp, Artificial Sequence
  Description of Artificial Sequence: synthetic nucleic acid sequence
aaccttgtaaagaaatccatgaagattcaagaaaagtatatgagtacactattaaaggaaatacagttgctgttgtaacagatggaactgctgttctcggtttagggaatattggagcagaagcaagtattccagtaatggaaggaaaggcagcactgttcaaaagttttgcgggtattaatggtgtgccaatagctctagatacaactgacactcaagaaatcataaaaacagtaaaacttattgcaccaaactatggtggaattaatcttgaagatatatcagctcccattttatattggttcaaaacatggtattgaaagggaaatgatagagtcacaactccctgatattcaatattatccaatatcaagcggtaaattacgtcgttatctatcttttgaaaatgcaaaagatgtctttaaagttttgaaaggaattttagatgcacgtaaaatacttaaaaaacaaaaaccagacttacttttttcaaaaggtggttttgttagtgttccggtagttatagccgcacgttctttaaaaattccaactatcatacacgaatcagatttaactcctggattagctaataaaatttctttaaaatttgctaagaaaatatacacaacctttgaagatacacttacatatcttccaaaagataaagctgattttgttggggctactgtacgtgaggacttaaaacaagggaataaagaaagaggatatcaactcactgattttgataaaaataaaaaagtgttattagtcatgggaggaagtttaggtagtaaaaaacttaataatatcattcgtcaaaatattgaggcacttctccacgattatcaaattatacacttaactggaaaaggacttgttgatgactcaatcaataaaaaaggttatgttcaatttgaatttgttaaagacgacttaactgatttattagcaatcactgatactgttgtaagtcgtgcaggttctaacgcaatttatgaatttttaacgctacgtataccgatgttactcatccccttaggacttgatcaatcaagaggagatcaaattgataatgctaaaaactttgaatctaagggttatggtcgtcatattcctgaagatcaacttacagaagttaacttattgcaagaattaaatgatattgaattacatcgtgaatctattattaaacaaatggaaacatatcaagagagttacacgaaagaagatttatttgataaaattattcatgatgcattaaacaagtagggggcacctataatgaatcgatggaaacgcatttcattgcttattgtttttacacttatttttggtataatagctttttttcatgaatcaaggcttggaaaatggatagataacgaagtatatgaatttatttattcatctgaaagtttcattaccacatctattatgttaggtgtaacaaaaattggtgaagtttgggcaatggttgcgctatccttattattagttgcttaccttatgctaaaacgcttcaagattgagacattattctttgtaatagtaatgagcttatctagtacactcaatccactattaaagaatatctttgatagggaacgtccaacattattgcgtttaattgacatttcaggctttagttttccaagcggtcatgctatgggctcaacttcattctttggaagcgctatatatgtaataaaccgtcatgattcgggtatctctaaaggcgtgttaatcggtttatgcgcacttttcattttattaatatcaacttctagagtgtatctaggcgttcattaccctacagatattattgccggcattattggtggtgtattctgccttttactcagtactttattactacctaaacagttaatagcttagttacatttttcttttgataacactcaactacttttagtttgaacctagttcattcaatattatgtgactaacgaagctgattagattgaaaaccatccaaaattagcaacataacaattaattatgaaaataaaaacatactaagattagctatgaagaaatctatgacgatagattttttcatagctattttttatagttatagagagaagtagactgtccagactcttggattttaaatccgtataaaaaacaagtcagctttactctcgccttttgaaattcgtttgtagtatgttgggttcttgaaaccgtgtataggaaaatgaaatgagaaaggttaagtaaagtttttagcttctcaattattcaaaggaggtttttttatcgattacttaggtgttgatattagtaaaagaagtagtgtagttgcacattataaaaatgaaaaattccaaaaagagtttttcatccaaaataataaaaatggttacaactatttactcaagtatttgaatgacttagaccacccacaactcatttttgaatctacaggtatctattcaagaagtatggaacgattttgttgtgtaaatcaaattaactatattcaaatgaatccgttagaagccaaatttaaaacgagcgctctaagatcatggaaaactgatcaggcagatgctcataagcttgcttgtttaggaccgacgcttaaacaaacagacaacttacctatacatgagttaatattctttgaattaagagaacgcgtccgttttcatctagaaatcgagaatgaacaaaatcgacttaaatttcagatccttgaattactccatcaaacattccctggtttagaaagattatttagtagtcgatattcaatcattgcactcaacatcgcagaaatctttactcatccagacatggttcttgatatcgacaaggaggtactgattacacatatattcaattctacagataagggaatgtcaatggataaagctacaaaatatgcacttcaattaagggtgattgctcaagaaagctatcctaatgtcgatagacattcctttctagtcgaaaaattacgcttacttattcaacaattaaaacaatctat

SEQ ID NO: 3897 - DNA, 3319 bp, Artificial Sequence
  Description of Artificial Sequence: synthetic nucleic acid sequence
cattatttacagcattgtcataagcttgttgttggtcatgatcctcattaatatatttactactatttttagtatcgtttttatctttaatgcttttacgtaaaccaagcattgcagtatctaatgttgttgcttcttgacgaatatttctcacttcatcacgtgttgttgctgcagttactttagctacttcagcatttttctgaggttcattgagactcgttaaaccacgtattccagtttcagcagcttgttggtcttgtatcagtttttgagtaccatgtaatgcatcttttgtagtgttaacagtttgagttaaacgttctatagctaatttgtctagaacaggttgagcattgttgttgattgtagcttgagcttcattgacagcattatcataattgtgctgttcaggttgatcttcattgacataattgttactttgttttacttgatcaacgttttgaacactgtttcttaaagcttccatcgcatggttcgattcagttgctttgtttaattcttcttgtacttttgtacgggtattagctgaattaattaatagatttaattcacgcttttgaccgtcatttaagctatttaacccattgacagtttgtgtagcttgttgtttagcattagctaattgttgaacaccatcaagatcttgttgtgcttgttgaacgcgtgatagcgcttgttcaattgtagctttattaagctctacgtttggtgtggcattgatgatattttctgcgttctgtagtgcttgatcgtaagctgtaactttagtcggatctgcgttgatatatgcactgctacgtttgatgtcctctttattttgaatgccatctcttaaattactcatagcagaatttatttctttagctgtagctaacttttgagcaacatctgttcttgttttagcttgattgactaaatctttttcggcgttgatttgagctgtgttcaaactagataaaccttctatttgtctatttgtgctttcttggtcagtgtgtaatttattttctccacttaacgctgtttgagtcgtattgatttgattaatagcctgctcaatttcatttttgttcatgattggatcttgaagtttatcaataatagtttgaccggcttgtacagaattatcatagttatgttttggttgttcatcttcattgaaataattactttgttggtgaacgttattttgttggcctactttatctcgtaaagcttgcattgcagtatttatttctctatccaaagttaattgttgattaactgctgggattgtctgctgtgcttgaacattttcaattgctttttgacgttgtgcatcatttaatgctgtaagtttattgatttcagtaatcgcattatttttagcttcttctaatagatgtgaaccttgtaacgcattttgagcgtcagtcaattgttgtaacttttgttcaatttccgatttatttaatgttggattaccgatttcattaataatattttctgcttcttgaagtgcttgatcatacccacgttgatgttcagttgaatcattaatgtaatcgctactttgtttgacattagtcttttcagctactttatctcttaattgtttcattgcattatttaatgatttagcttcattaagatgctcttctacttcagaacgtgtatttgaaccgttgactaaggattcctcagcagatttttgagggtcatttaaataacctaattgtccaatttcttgattagcagttcccttatctctttgtaacttttctgcaccatgtaaatcatttttagctgtgttaatttggctaatcgtttgatcaatagtagatttatttaattctgaattgtgttgaccagttatatatgtcgagccattatcaattgcattatcataagtattcttttgagttgaatcctcgttaaaataattacttgttgaatgtattacattttgattgttaactaaataatcgttatgaaaatgaagataaatacgattatcttacaggtctaggtaatgtgaaagaatttgatagacacttaaatgaggtctcaagtaaagctgaagaaaagaaacaaagtttagccttacttctcattgatattgatggctttaaagatgtaaacgatcattattcacaccaatcaggagatgctgttctcaaacaaatgtctcaactattaaaaaactatgtcccaaaccagttcaaaatatttagaaacggtggcgaagaattttctgttgtaataagagattacacactagatcaaagcgtgaaattagcagaaaatattcgaagtggtgttgaaaaatcttctttccacctaccaaacaaagaagtaatcaagctatcagtttcaattggtgtaggatacttaactcaagaagatcgtaaatctcaacgtaaagtatttaaagatgctgatgacatggtacatgtggctaaaagtgaaggaagaaataaagtcatgtttaatcctattgtcaaattataatcaagctaaatgctatgttaactgctacgttaaaaaattattaaagcgtatacagttatgcatagcattttttactatttttaattagtattgaaaatgttattaaaatcaagctgtctattgaaacttaagtcttcaagttgtaaacttcaattgttcataaaaatattaaatagcttcggaggtgatgagatatgtcagattcaatcactatcattgatgaaaataaagtgattgatgtagtcttaattgctgggcgaatcttacttgaagcaggcgctgaaacatatcgaattgaggatacaatgaatcgtattgcccatagttatggtttacatgatacatacagttttgtgacatcaactgcaattattttctcattaaatgatcgtactagtacgaggttgattcgtattcgcgaacgtacaaccgatcttgagaaaattgctttaaccaatagcctatctcgtaaaatttcgagtaagcaacttacaattgacgaagcaaaaagtgagttactgcaacttaaacgtgcgtctcttcagtattctttcttaacaaatctcattgctgcctttgtagcttgtggttttttcttattcatgtttggtggcgtagcttccgacgcttggattgcatgcctagcgggtggcatagcttttttaacgtttagtttcgtgcaaaaatatatacaaattaaattcttttcagagtttgtagcatctgctgttgttattagtattgcagcaatattcactaaactaggtatagctaaaaatcaagacattattactattgcaagtgt

SEQ ID NO: 3898 - DNA, 4189 bp, Artificial Sequence
  Description of Artificial Sequence: synthetic nucleic acid sequence
tatcacgcgcatgttcaataatcattgaaccttcagtcgtagtaatgagctgtttttttgtacgaataaaaatctcaactccaaatgcagcctcaattgcctttaaacgttgagtaactgcaggttgagaaatatatagaatttctgctgctttgcgtaaagtttttgtctcatctaagcgaagatgtaatgtctttagacctctttgtaaaagataactatcaagaggtgatagagttgctccaatcatattatggaattgattcaattgttcagctaattgagcatccttaacagttacaactccagctaacacatcgttatgtccgccaatatattttgttgctgaatgcagaacgatatctgcaccttcttcgagtggtgtcgaaagataaggtgttaaaaaagtgttgtcgataattgttaatagttgatgttttttgctaaggatataatatggttctacatcaatttcaatcatttgtggatttgagattggttcaataaataatgctctagtttgtggagtgatgtttttttccacttcttcataatttaaaaagtctacatatttaaacttcaaaccatattgtttttcgtaaaaatcgaataaccgaaatgttccaccatataggtcaaatgcaacgagaatttcatcacctggtttgaatatattacatattaactgaatcgccgccataccactggaagtagcaaatgaagcaatgcctttttcaagttgtgcaaaagcttcttcaaaggctgttcttgttggatttttagttcgtgtataatcatagcctgttgattcacctaggtgaggatgctgatatgcagtagataaatatattggattggcaattgcgccagtgtgatcttgtgttaaagcaatttgagctaaatctgtatccttcatagctagctcctcctattcagtaaaaataaaaaagcttccgtcctttagacccgaatgattcggatgtaaaggacgaaagcttaaacttcgcggtaccacctttgtttgctactttattgctaaagtaacctcaatcagtacgccatagtgttaaaacagtatactgaaaatagctgatacacaatctttttatcgtaacatcattaaataaaacaaaaactcatttaatccatatgtgaataaatgagtattaacgataaattgtgacgtataaaatttccagtacgccatttaacatcaatgttaatactgtatcgctataacgggcgaacccgttgatacctcatattggcatcaacactccaaggccattttcaaactttctttcaatgccttctctcagcgtgtgaagactctctgtataagcagtgtaagttttactttcctttttacagtgtgtaaaatgttttttaaattgttaatacatagattacatagtttgaatttatttgtcaatgatttttctgaagattttgatttaacaattaatttattatcagaaatacatctgaaaatatgtgacgtaataagcttcatattaagccattagtattaatttgaaagtcttgtattattggattgaacttttttaaaataagtaatgaatcaatgaggattgattattcattagagatacttaaattaagatagaaagatgtggaaaagagatggcatatacagatgatcagagattgaaaatgaataatgatgatagtgtgcaatttattgcactagaattaattagacctaatccttatcagccacgtaagacgtttgaagaagaacgactcaatgatttagcttcatcaattcaacaacatggtatattacagcctattgtattacgtcaaactgttcaaggttactatattgttgtgggtgagcgacgatttagagcatctcagttggcgggattaacagaagtgccagctattattaaagaactatctgatgaagatatgatggaattggcaattattgaaaatttacagagagaagatttaaatgccattgaagaagcagaaagttataaaaaaatgatgacagatttgaatattacacaacaagaggttgcgagacgattaggtaagtcacgtccttatattgccaatatgcttaggttattacagttacctaaaaatgttgctcaaatggttcaacaaggagcgttatcaagtgctcatgggcgtacgttattaactttgaaagacgccagtaaaataaaaaagacggcaaaacaagccactcaggagtcttggagtgtaaggtatttagaggagtacgtcaatggtttagtcagtaaagacatctcaatgaaactggacagagagaccaagggaagtaaaccgaaaatgattcaacagcaggaaagatttttaaaaaagcaatatggtgcgaaagtagatatttcgacatctaaaaatgtcgggaaaatcacgtttgaatttaaatctgaagcagaattcaaacgcttgattcgtcaacttaataaagattataaggaatattaaaaaattagcctttataaataggaagcatatacatagttttataaatatacctcaaaaggatagtattttaaaaccatagacgtattatctaaatgaataaattaagttataataaatgaattatgaaaaaaatgaaagggagggcatattttatatgaatcaacttaaacatattttatcttcattgttcgaacctttaacaaaggttgaaacatatgaaaatttaattactaaagtaataatgattttaatttatatccttgtagcgattgttgttatagcaattttgaataagattattgagcaagcatttaaaattcaaaataaaagcaaaaaaggaaataaaaaacgttcaaaaacactgatttctcttgtacaaaacatagtaaaatatatcgtatggtttgttgttatcacaacaattttaagtaagatttcaatctcaacttatatatatgtaattgtaacattactcattgtatatataatccctaaatttttcaaagcaatacctgcaccattaatagctatcatcgtattgactgctctttatatgtatacaggttctgacgtgagaactgttggtgatttaggaaatattaagcaagctttaccgcactttttaattcctaatgttccctttaatttagaaacacttcaaatcatttttccatactcgctatctatggctattgtaggtctagtagaaagtttacttactgctaaaattgtagatgatgcaacagacacttatagtagtaaaaacagagaatctcgtggccaaggcattgctaatatgattacaggattattcggtggtatgggaggttgtgccatgattggacaatctgtaatcaatgtcaaatcaggtgcaaacagtagattatctactttttctgctggtgttgtcttaatattcatgattattgttcttggaggacttgttgttcaaattccaatgccaattttagcaggtattatggttatggtttcgattggtacatttgattggaattcttttaaatatattcaaaaagcaccaaaaacagatgcagttgttatgatacttacagtgataattgtactgatgacacataacttacctctcggcgtggtcgtaggtgttattttcagtgctttattctttgctactaaaatatcaaaagtagaagtaacatctgagaagtttggtaaaactaaccgtttatcttttaaaggtcaaatcttttttgtttctattgactctatgatggatcaaattagctttaatattgaaaatagtattatagaattaaactttaataatgctcatttatgggatgattcagcagtagatgctattgatacaatggtaaggaagttcgaagaaaaaaataacattgttcatgtagaaaaactaaattcagatagtcgtaaaatagtctcagaattaagcaaactaaatgaaaatcatttaaactaaggagtgttgtttatgtataaatcaattttattagcagccgatgggtcagaaaatagtttacgttcagcacaggaagttttgaactttatagatgaaaatactatagttactttaattacagttgtaaatgttgaagaatcgaaaacagatgttttacatggtaaacaaggacatagtttaacaaatgaaagagaagacaaattatccagtataactgaactatttgtagaacataatgta

SEQ ID NO: 3899 - DNA, 2990 bp, Artificial Sequence
  Description of Artificial Sequence: synthetic nucleic acid sequence
gcatccaatgacgttttttagttatttaaacattgaaatcaatgacaatacgtccagtattattatgattgatgacttgatcgatggcttttgggatttcatcgaatgaaataacatgtttgatgtcatgtaattgttgtggttttaagtcttttgcaagtcttctccaaacacgttttcttagtttaattggagtaaatactgaatcgataccaattatacttgctcctcttaaaatgaaaggaaagacggttgtttcaaaattgttaccaccagtcatgccaattaatgcaacacttccgttgttatccaatcgtttgacgatgtacggtaagttttcaccaccaactggatcaatggctgcctgccatgttctcttctctaatggtttactattatcttctggtaaacggccaattacttctttagcaccaagctttttaagtttttcttcggcgtcatctctacccgtacttgcaataacatcataccctaagttatttaacatgagtaatgaaatcgttccgacgcctccagtggcacctcgtacaagcacttctttaccttcaatagacatacctgatttttcaagttgttctatagctaaacctgctgtatagccagcagtaccgtaaatcatagcttcttccaatgttaaatcttcaggtaattcaatcacccattctgatttaacacgtgcgtattcactgaagcctccgtaatgacttacacctaaatcatagcttgttacgatgactttatctccaacctcaaagcctggagcatttgtttcctcaatggtacctgctaaatctataccagggaccatcggatattgttttactattttgttatggtcctgagtggctagtgcgtctttataatttatgccagaataatgtacttttattaaaacgtcaccctcaggtaagtcatctttagttagttctttataactatttgaaacaataccgttgtcatcttgatcgactacaaaagctttgaatttttctaccatatttctacactcctctaatgatgaattgaatcaatattaaattttaaagatattatttaatgattcgcttgatattaccctgtttttatttttaatataaggaaactgcttttctaacaaactttatatcattcattgtataatttaatttgaaaatttaaaacttattaatagcaaaaatgtcaatgtacacatctaattcacaaaattaactttttaaggttttagagggggatttaaatgggggaaaggataagaagtgttcaaataactgaggtagagcaactacaactaattgctaaaagaacattttttacaacgtttagagaatcttatagtgatgaggacttcaagcaattttttagtgatgcatatgatatagatgtgttgagaaaagaattggaacaaagtaattcttttcattatttttatgaagttgatcaaaatatagtaggtttcttgaaattgaacattaatgatgctcagactgaaaacaaaggtcatgcatatttggaaatacaacgcatttactttgatgaagcatttcaagggagtggaagaggacaattatttatcaatctagctattgatcaagctatcaaatttgggaaatcgaaaatatggcttggtgtttgggagcataatcctaaagcgcttagcttttataaaaacagaggatttagagttacagggtcgcatcaattttatactggaagtgtagtagataatgatttgattatggagttggatcttacaacaaactataaacaaagtttatagttcaatcataaaatataaatgagctagggttatgtttaatattgttcgcatttagcattaatattagatataattgtagcgttgaattttagtacaatatctatgtaattgtattcaaagtgaagtcatcgaaattaaaaatgcaatcaatatatacagattaggtttatatttttaataggtaatgatagttattatagtgacattcaaacatacaacctaaattttataagatgttgtcgatttaatataaagagaaaggacgtatagtatgaataaactgacaattattgtcacgtattataatgcggaggaatacatcacaggttgcttagagagtattaagcaacaacgtacacaagattttaatttgattattgtgaatgatgggtcgacagaccaaagtaaaaaattaatggatgaagctattaaagactatgataaaaacattcgatttatcgatttagatgaaaatagtggtcatgcacatgcgcgtaatattgcattagaagaagtagaaacaccttactttatgtttttagatgcagatgatgaattagcttcttatgcaatcacgttttacttagaaaagtttaataatactgatggtttaattgctccaatacattcttttactacacaacgtccgcaatttgttgatttagatcgagtaagggttgaatactttaatgccaaagagaatattaattcatttttaagaaaacagtcagcttgtaacattatttttagaacagctattgtcagggcgcatcatattcgatttaatgaaaatttaaatacatatgtggattggtcatttgttcttgaatatatgaagtatgtaaataagtttgtacgtatttttaacttcccattttatttccgtggggaagtctatgatccatttgaaacacttacattaagtgaacaaaattttgatattttatttaaagattacgtcaacagcttttatgatgccattaaacgagcaacaaatccaaaagttagagaatttattgtcactaaaatgggaaataaaattgctaatgaatttgaaccaactcgatatgatattaatgaacgctatcaaacacataaggatacgcttgttgaattatcgaaatttttacatgtacatttagttaaaaaccaaaagctaataaataaaattgaaacaattttgttaatgaat

SEQ ID NO: 3900 - DNA, 3460 bp, Artificial Sequence
  Description of Artificial Sequence: synthetic nucleic acid sequence
taagcaccagctgtagataatagtttgaactctttaattttagaagtagaaggtacgtgtacacctcgacataaatcagtaaattcaccttgagtataaagtgttacactctcatcttcaggaattgcatcaataagttctaatttataagggtcatccttgaagaagtcttttgctttttctttactaactacttctcttacaattttatgattttcgttcacaatttgtttcattgttttctcaattttatcaaaatcatccgatgaaaccttatcatccatatcaaaatcataatagaatccgccttctattacaggtccaactccaaatttaacgtctccgtataaacgttttaatgcttgtgccattaaatgagctgttgaatgacgaagtacttctaacgcttcttcactcccaggagtaataatttcaatagctccatcttgttctaaagggcgtgttaaatctacaagttgaccattgaattttcccgcaactgctttttttcttaatcctggactaattgattgagcgatgtcttctgtagtagtccctttatcaaattcttttgtattaccatctggaaattgaatattaatttgattcatattttttcctcctatttaataaaacatctgatcgttggcttattgaataaattaactttactgagcataaaaaaactcgtccctagcaagggacgagtttgtcgtggtaccaccctagttaagtatatgaaaagcatacgtgaccagtcatatactatactttacataagataacggtcttgagccggatattcattacaaatatcaatattaacgaagtagtaataatttaatgtgttagccatattctcatcaattaatgactttctgtgtaacagagattaaattatcgtatcttcaatagtttcaacgattaagatttatctctattatacaccacatactataaaattcaattgtttctaaaatttttaccagtcaaataataaggtgtcgataaagtcttaattctttcaataattcgtgctgctttagtcttttcagtgccatctctagttattgaaagatgatgctcaagctcactataattaaagttagaactaaaaaatgtaggaagttcatgtaccattctataatgtaataaaggaccaatcacttcatctcttacccacggtgtgacttcttctgcgccaatatcatctaacatcaaaatattagcttctcgcacacgttgtaattttttctcaaaactaccgtctttaaagccaccttttaaagtgcgaataaattctggtaaatatacaattgttgatgaaatcttttgcgatttaagttgatttgcaatagcacccaatatgaatgattttcctgtaccaaaaggaccatataaatataacccctttactttttcatcgttagtaattgctgtacagatttgatcagctgccattgctacatcaagtctctctcgattattcatataaatatctttgagctttgcatgaagtgtatctctttgcatatggtgagatgtaataagttgtgaatcaaatcgttcctcatcatgtttaattttacacgggcaaggtagatatctaattttgattctttcattttcaatatatagttcaggaacatgtccttttacaaaattcggacaatcatcatagcgatgtccatcataaactttttgttgatctttatactcttgaagaacatttaaatcttcgtctatcatctcattagttatattactacgatttttctcaagaaaatgtttaacgtcagtatcattgattacattttgttttattttttgtatacgtttatctagattttgagaatcgcccatgatatttctgaaacttttcattagttatcttcctccttccacttttgatttaacttttcaagaaatgcttgtcgatcttcttcgagagtgtcatcatttatttctttattttcttcttgatcgtccctattttgaagccatttaggtgtcttttctttggataaaaattgattttgtcttccacgattgttctgtcgtttatcattagaatgtgtttcgtaatttttaggttgattaacttgtaatgcatattcatatgcttgtttggcatttgaaataccaattttcttccagttggaagcaatttcaaaaatataagattttggcaacttcatatcttcttttaacataacaaactgtaaaagtatattgattacaccaaaattcattttttcacggttaatcaattcttctatcatacttttttgcgactgtgtaggttccgaattgttgattataactaccatcatttttattaactgttacttccgttgaacgcaaaaacccaacaagattttgcttcacttttttatatctacttaacctatcaaatgctttcgttaaatgtttcaaactttgttctaaagtatccccatctatcgcatttttcgttgaaagtgttaaaaataaccaacgcgcttttggtttttctttaacaacttcttcaatcactttttgagcttgataactatttttcatagcacgcctccaattacaaactgggcagagtttcgacttacaaaaccatgtcttatgtaacttcaaataaccttcatcagtcggcttgaactctaagacgttaccacattgttttacattaaaagccttttttatttttaaaatttccagtatatctgcataacttacattatctatcttcttttctctccatgggcgttgtttcccacttttcgtcatatctttaagtgtttcgttatcttgattttcgtctatacatctagtagtattatattgcaggttctgttgcaaagtaaaaaatatagctaaccactaatttatcatgtcagtgttcgcttaacttgctagcatgatgctaatttcgtggcatggcgaaaatccgtagatctgaagagacctgcggttctttttatatagagcgtaaatacattcaataccttttaaagtattctttgctgtattgatactttgataccttgtctttcttactttaatatgacggtgatcttgctcaatgaggttattcagatatttcgatgtacaatggcagtcaggtttaagtttaaaagctttaattactttagccattgctaccttcgttgaaggtgcctgatctgtaattaccttttgaggtttaccaaattgtttaatgagacgtttaataaacgcatatgctgaatgattatctcgttgcttacgcaaccaaatatctaatgtatgtccctctgcatcaatggcacgatataaatagctccattttccttttattttgatgtacgtctcatcaatacgccatttgtaataagcttttttatgctttttcttccaaatttgatataaaattggggcatattcttgaacccaacggtagaccgttgaatgatgaacgtttacacca

SEQ ID NO: 3901 - DNA, 3037 bp, Artificial Sequence
  Description of Artificial Sequence: synthetic nucleic acid sequence
tagcttcttcatttgcaataaaattacaagtcttactcatagaaaatctgtaatttctttactatagtgaactagttattttttatcatgttttttcttttttagtgataagataaatcccactattaaaggaaataaaagcaaaatatagatgtatctcatttaaattattattcctcccatttttcttctaattgacgttgaaatgcctctcgatcttgttttaattttgcatcttcattatgtatctcttgagattgtttatatatcttttcgtctaaccatttaggtgttttttcacgattggtatattggcgcgacttacctatattagtcatttgtggttgtcgcttgttgtgaatgcgtttctcagcgtcaaaggtaaactctaaccattcaattttacgtccttttttagctttgatcttattaatatgaaggttattaaaaattgaagaaagctcattaattattggttttaataaacgtttagttatatcattcatctgataagttttaggtatatctagacgatttttaaagtcagttatatttatttttacataaccagtgagtctgggacataaagtcccagactcttttttgctaaaataattgaaattctttatttaatgagattttcaacacttaaattataataatccgataatgttaaaagattgtaagcatctagcaaatatttatcattttcccacttgcttatcgtttgaatgggaactctatttttttagataaaaattctttcacgcctaaaaatcaagttaatctgttaatattaagacaaaaaaggagtaataaaaatgaatattatagtctattgtggagcaagcaagggaaacaaaaaagaatacgaaaatagtgcaattcaattaggtgaatggatagctaaaaataatcacactttagtttttggtggcggaaatgcaggattaatgggaacaattgcaaatactgtaatacataacaacggaaaaacaattggtgtaatgcctacgtttttaaaacaaagagagttagcacatgataaattagacgaactaataatcgtggaaagtatgtctgaaagaaaagaagttatcttaaagaaaggcgatgtatgcatagcacttcctggtggacctggaactttagaagaaataacggaagttgtatcatggtcaagagttggacaaaacaataacccatgtatctttttcaacacaaataattattattcccttatcgaacaattctacgatcaaatggtttcaaacgagtttttaactcaagaagatagagataaaatattattctcaaactcattccaagaaattgaagaatttatagaaaactataaaacaccaaaaataagaacttattaatcaaaattgctttattaacgttgaagctccgagctcttaacaatcgctaaatttgttgaattgttaaatggtttttggatgaggtaaaaataaataagtgttaaagtaagaatatagcattatcctcaatcaacatttagtcttttaatgtgaagtaaatcttcgcccaacacatagctgctcacaaattgagtggctatttttcatgctttattccaattgttttattgacgttgagcctccaaacctttaacatcaataaattttctcggcataaatgcatgtggtatgcttaatgcagtgctcatttttaatttcacagcattatagctattctccagaccactcatttttgagtggttcttttattttgcattttaagccctttctaggacattttattattccacgtataaaaaccaatgactaaaaactttttcgttcaacagagaggctataaatcattttaaaatttatttctcaacactttcagaaagaaaaatatattttttatctcaattgttcttcttagaaaaaagctaaaacctgaaaagtgggtgtataatgtaacttttgtattttaaagagcataagaggaatcctgcacaaaaatgtctccattcggtagccatttttgttaaaaacattgatttgacagtgtcaaatagaattcctttttatgcgctgaaatttgttatatggagactgaatgtatactaaaaagatactgaatagatcccaaaaattaaaaatggctaccgaatggagacataaaaatggaaccatttggtatacatttttatgaaatccttacaaaaaatattattatatttagacagcattacaaattttttaagaagtaattttgcttttcgaagtttccaattgctgtaattgaatgtgttttttctttatcaattgtttgaattaaattaccatcttcagcgttatctaaatttaaaagtttatgcttttatttaagtaattacaccgaaacttagtatacgttttcgatataaaattcattctaagtcattaacaatttctgcatttttttagggggggcttgttaaataatcgagcgaaataatggaatattttgattaatttttgtaggatttatgcgccgttttttcatatgttagacaagcgtaaaaacaaaagtagagcacacatttatgctaagaaattttaataatgttgtgaggctctctaactaaattttaagacgaatggcgtatagtgtgagcgatgaagtcgacaattctacaagttttggaattgttaagagtttcaaaaatcaatgttaatacattaatttcaactctaattctgtactcattttacagttaataaaatgagtattattaggctaataattattattacgagattaattaagtttataaaagtcttagagattttcttgtcattgtattctggacttttatatagaagcatgtaatatataaacaaatttgctgtaaacattccgaatattgaagctaagattccaaaatgaatctccataaaaatagtttgaataaaaaatacgagaatgaaattattaaaaataataagatttcataaattaacagaatcatgatttttctcctataaattaaagaaaacataaatcataatcaattttttaa

SEQ ID NO: 3902 - DNA, 3149 bp, Artificial Sequence
  Description of Artificial Sequence: synthetic nucleic acid sequence
tctactattaagtttgtttaataattgatttaaacttgcaatttcgtctgaagatagacattgacatctcgcttcaattaactcgcatctcgccgtgttgatttgctgaattaaagcccttgcttcttcagttaatatcagttctttacatcgtaaatcttcatgagattgttgactcatgatataacctttttggactaactttttaatccatcttgatacaattgattgttccctactaatcttcatagttaaatcgtattgagataaacgatcataattatataaaatacgtagtaactctaattgttcagaagtaatgtcagttcgttgaccaaagcgtctattaactaaattcaaatcattatttgtcagtgtgataagtttttcaagttgtttatacatgttgttctactccactatattaagttaataatattatatgccttatttataaattatacaatacaaatatacacattgcacaaattcgttgcatcattacctatttttatactacattagagtatgtctaaattgtaaaaaaggagagcgtttatgacagccatcaaagatagggattattttttcgataatgctcgagcaatattgatatttctagtcgtattaggacatttattacagccttatacatctgaagataaatttttacaagctttatatttattaatatatagctttcatatgcctacctttctgtttatctcaggctattttgctaagaatttagataaacctaactatttagaaaaaattgcaaaaaaattacttcttccttatgtaatattttttgcgtttttctcactttattactatttcactggtaaagaagatgcaattcaattagacccatttaatccggtttttgcattgtggtttttactcaccctttttttctttcacgttgttttagttatagtgagaaggtataatccgtatattgtattattcatatccatacttgtttctgtattagctggtttctctggcaatatcgatagttatatgagtatatcaagaaccattgtgttcttccctatcttctttataggacatttggttacacaatcacatacggaaaaacttagaaataaaaaatggatccccatttcaataatcattctgattaccttctttataggatacacaatccatcctattaatggagattggttattaggaagtacaccttatacttctttagaaagtaacggggaggatgtttatagtcctctaaaacgcttattactctatatcattatacttttaactatgtgtgcatttctaaatctaatgccacaaactaagcgtatttatacatatataggacagcgcacaatgtttgtttatttattacacggtatcgttataggagtcattcgcgggtttgatttatatccatttaaggatcagatttctatctttacctatctttatttatttatcagtgcgagtgtgattgtattaatattatcttcaaaatgggtttgcaaatggacgaatccgttcattaatttaaaaaggccctctcaatttaaaaattaaaatttcataaaacaattcagtaaatcaccaaaatgtagagattaaaatatgttatgatagtaataatttgaaagaattatgagactatttaaacaatttaaatactacattttggtatttttatatagagaggttttagcaaatgaaattatcattaaattcaagttcaaaatttttaagagcccctagtattcgtcaattttctaatagaattaaagcgattgacgattgtgttaatttaacaattggacaacccgattttcctatgccagatgtggtcaaaaatgcttatatcaaagcaatcaaaaacgataaaacaagttattctcataacaaaggtttatttgaaacacgcgaagctattagccaatattttaaacgaaaatataatttcctttatagtgaggaagaaatcatcgttactaatggtgcgagtgaagcattagatacatcgttaagaagcattattgagcctggcgatgatatacttattccaggaccgatatacgctggttatatcccattagttgaaactctaggtggaaatccagtatatatagataccacacaatcagattttaaagtaacacctgaactgattgagtcgcatctaacgcataaaactaaagctatacttctaaattaccctaccaacccaacaggtgtaatactcgaacgctctgaagtcaaaaatatagtagacacacttgtaaacaaacacatttttataatcagtgatgagatttatgctgaaaatacgtttaaaggacaacatacatcttttgctgaatttccagaaattcgagatcaattattacttataggtggtttgagtaagtcccattctgcaacaggtattcgaatcggctttttacttggtcctgaatatttaattgaaaaattaacctttatgcacgcttacaattgtatttgtgcaaatgtaccagctcaaattgcttgtactaccgctttaaatgaagggataaatgtccctctatacatgaatcgtgattatatcgaacgtcgtaattacctgaaagaaaaattagaatcattaggcttcgaattaactgctcaacctgaaggcgcattttacatcttccctagtattaaaagatttacggaaaacgattttgaattttgtgttgatgtgttggagaaagcacacttagctatggttcctggttcttccttcaccgatattggcaaagggtatattcgaatttcatatgcttatgatatggaaacattaaaaaaaggaattcatcgattagaaaattatttacagcaacattatccagagcaaatgaccactccaactaaataaatcgtctggcaaacgtttattcctgaattgaaatttatgagtgtaccaagcccacacaacaataggtttaaatgtatcaagtgtgtgtgcttatctgagatttacactcgcaaatcgtgagcatccactttaaatagtacattttcattttttacattggtgattacttatatctcccaattttgctaatagttactgatacttattaattccaatgaaataataaaatcgcctaagacataattcgtgtcttagg

SEQ ID NO: 3903 - DNA, 3405 bp, Artificial Sequence
  Description of Artificial Sequence: synthetic nucleic acid sequence
cacgtgaaattccgtcggaatctgggaggaccatctcctaaggctaaatactctctagtgaccgatagtgaaccagtaccgtgagggaaaggtgaaaagtaccccggaaggggagtgaaagagaacttgaaaccgtgtgcttacaagtagtcagagcccgttaatgggtgatggcgtgccttttgtagaatgaaccggcgagttacgatctgatgcaaggttaagcagcaaatgtggagccgcagcgaaagcgagtctgaatagggcgttgagtatttggtcgtagacccgaaaccaggtgatctacccttggtcaggttgaagttcaggtaacactgaatggaggaccgaaccgacttacgttgaaaagtgagcggatgaactgagggtagcggagaaattccaatcgaacttggagatagctggttctctccgaaatagctttagggctagcctcaagtgatgattattggaggtagagcactgtttggacgaggggcccctctcgggttaccgaattcagacaaactccgaatgccaattaatttaacttgggagtcagaacatgggtgataaggtccgtgttcgaaagggaaacagcccagaccaccagctaaggtcccaaaatatatgttaagtggaaaaggatgtggcgttgcccagacaactaggatgttggcttagaagcagccatcatttaaagagtgcgtaatagctcactagtcgagtgacactgcgccgaaaatgtaccggggctaaacatattaccgaagctgtggattgtcctttggacaatggtaggagagcgttctaagggcgtcgaagcatgatcgcaaggacatgtggagcgcttagaagtgagaatgccggtgtgagtagcgaaagacgggtgagaatcccgtccaccgattgactaaggtttccagaggaaggctcgtccgctctgggttagtcgggtcctaagctgaggccgacaggcgtaggcgatggataacaggttgatattcctgtaccacctagtatcgttttaatcgatggggggacgcagtaggataggcgaagcgtgctgttggagtgcacgtccaagcagtaaggctgagtgttaggcaaatccggcactcataaggctgagctgtgatggggagaggaaattgtttcctcgagtcgctgatttcacactgccgagaaaagcctctagatagataacaggtgcccgtaccgcaaaccgacacaggtagtcaagatgagaattctaaggtgagcgagcgaactctcgttaaggaactcggcaaaatgaccccgtaacttcgggagaaggggtgctctttagggttcacgcccagaagagccgcagtgaataggcccaagcgactgtttatcaaaaacacaggtctctgctaaaccgtaaggtgatgtataggggctgacgcctgcccggtgctggaaggttaagaggagtggttagcttctgcgaagctacgaatcgaagccccagtaaacggcggccgtaactataacggtcctaaggtagcgaaattccttgtcgggtaagttccgacccgcacgaaaggcgtaacgatttgggcactgtctcaacgagagactcggtgaaatcatagtacctgtgaagatgcaggttacccgcgacaggacggaaagaccccgtggagctttactgtagcctgatattgaaattcggcacagcttgtacaggataggtaggagcctttgaaacgtgagcgctagcttacgtggaggcgttggtgggatactaccctagctgtgttggctttctaacccgcaccacttatcgtggtgggagacagtgtcaggcgggcagtttgactggggcggtcgcctcctaaaaggtaacggaggcgctcaaaggttccctcagaatggttggaaatcattcatagagtgtaaaggcataagggagcttgactgcgagacctacaagtcgagcagggtcgaaagacggacttagtgatccggtggttccgcatggaagggccatcgctcaacggataaaagctaccccggggataacaggcttatctcccccaagagttcacatcgacggggaggtttggcacctcgatgtcggctcatcgcatcctggggctgtagtcggtcccaagggttgggctgttcgcccattaaagcggtacgcgagctgggttcagaacgtcgtgagacagttcggtccctatccgtcgtgggcgtaggaaatttgagaggagctgtccttagtacgagaggaccgggatggacatacctctggtgtaccagttgtcgtgccaacggcatagctgggtagctatgtatggacgggataagtgctgaaagcatctaagcatgaagcccccctcaagatgagatttcccaacttcggttataagatccctcgaagatgacgaggttaataggttcgaggtggaagcgtggtgacacgtggagctgacgaatactaatcgatcgaagacttaatcaatttttaaaaaacgttttgcgacgcaaaatcttacttactatctagttttgaatgtataatcattcatttgtctggtgacaatggcaaggaggtcacacctgttcccatgccgaacacagaagttaagctccttagcgccgatggtagtcggactgacgttccgctagagtaggacgttgccaggcaaatatcgtatggatgcgatgagcctaatcgagaccgaaaggtctctttttttatacaaaattagttttaaaaaagaaagtgtttgatatgaaaaagtaaacatatcgaggaatagaaagcgcttgtaacttatgaatttgggagcgagagtaatgaaattagtcgagctacaaggttcaacaagagacgaaaatgaaacacaagagggcgagcgcttatctcaagtgaagaaagtttcttagccgagggaacaaactgacattctaaaataagatactaaaatgaagacgacgaattaataatatattcgtcgtcttcggatttggttataaaattaacttaaataagtaatgaatataacattttattttcattgatataaatattagaaggatcaaattgacatacgcgatcttttaactgaatgagatcatcatgatgtttcagctgtatacctataataacagttccagtgttttgtgatgttttctttaaatattcaaattttgtaatatcgtcttgaggtccgaggacatcattgacaaattctcttaaagcaccaggtctttgtgggaaatttaaaataaagtaatgtttcatttcttcaaatagaagggaacgctcctcaatttctttcattcgattaatatcattgttgcctccacttactatgcatacaatagttttattttcaatctgctttttatattgttctaaggcacttt

SEQ ID NO: 3904 - DNA, 3037 bp, Artificial Sequence
  Description of Artificial Sequence: synthetic nucleic acid sequence
aatattatctctactttaaatgttaaaattaaactttttatattgtttattgtaaacatttaagcggagtagaattaataatcaatgactcgaaaatattgaatatattagtattgatttatagaaaagccacggacgctctgtctctggcttttatttttgaccattgagaactatgtaaataaacttatttttaaccaagtcccctctatagagaagtaatactatgtttattaccaattttaatatatctttttcatttttattcctcatattattatgagcttagggttaattgccataaaatttatgttacaataaaaataacaatgttattaaatatactacaaactaaattgaccatcacttaactaggtgctctgttaaacttttgttataaattaaagatagaagcaacctattcatataaagtggtatctcttgacaattttactcgtttataagatgttataattatgtagtgtataaggaggcatacaagatgactgaagaattcaatgaatcaatgattaatgatattaaagaaggtgacaaagtcactgttgaagttcaacaagtagaggataaacaagttgttgtgcatattaatggtggcaaatttaatggaattattcctattagccagctttcaacacatcatatcgaaaaccctagtgaagttgtaaaagtcggtgatgaagtcgaagcatatgtcactaaaatcgagttcgacgaagaaaatgatactggggcatacattttatcaaaaagacaacttgaaactgaaaaatcttatgaatatttacaagaaaaactagataacgatgaagtgattgaagctgaagttactgaagtagttaaaggtggtttagtcgttgacgttggtcaaagagggtttgtacctgcttctctaatttcaactgatttcattgaagatttttctgtattcgatggtcaaacaatccgtattaaagtggaagaacttgatcctgaaaacaatagagtcattttaagccgtaaagctgtggaacagttagaaaacgacgctaaaaaagcttcaatattagattctttaaatgaaggcgatgttattgatggtaaagttgctcgattaactaactttggtgctttcattgatattggtggcgtagatggtttagttcacgtttctgaattatctcatgaacatgttcaaacaccagaagaagttgtgtcagtaggtgaagcagtcaaagttaaagttaaatctgtagaaaaagattctgaacgtatttctttatctattaaagacactttaccaacaccatttgaaaacattaaagggaaatttcacgaagatgatgttattgaaggtactgtagtacgtttggcgaactttggcgcattcgtagaaattgctccatccgtccaaggtttagtgcatatttctgaaatcgatcataaacatatcggttctcctaacgaagtattagaacctggacaacaagttaatgtaaaaatattaggtatcgatgaagataatgaaagaatttcattatcaatcaaagcaacgttacctaaagaaaatgtcattgaaagtgacgcatccacaactcaatcatatcttgaagatgataatgatgaagataaaccaacattaggcgatgtttttggtgataaatttaaagaccttaagttttaattaaactaaaatcatttgcgatataaaatgtaatgactccaatttacgtgtaagcttaaaatcaaatttacgcgtgataattggaggttcaagtttagattcatctcaattattacaagctctatacgaaacattgtatatggtgactgtatcacttgtaatcggtgctttaataggtatacctcttggcatcttgttagtggtaactagaaaaaacggtatatggtcgaatacaatattgcatcaagtattaaatcctatcattaatattttaagatcaattccgttcattattttattaatagccatagtgccttttattattattgtaatatcaaaaaaattagatttagtagatcgtcctaatttcagaaaagtacatacgaaacctatctcagtgatgggaggaacggtcattttattttctttcttaatagggatttggctcggacaccctattgaacgtgaggttaaaccgcttatattaggtgcaattacaatgtatatggttggattgattgatgatatttacgatctaagaccttatttaaagttagcaggtcaaattgttgcagctttaattgttacgttttatggaattacaatagactttatttcattgccaattggtccaacgattcattttggcatattcagcattcctattacagtaatatggattgtagcaattaccaatgctattaatcttatcgacggacttgatggacttgcctcaggcgtctcagcattggcattaatgactattggattcatcgctattttacaagcgaacatatttattatcatgatttgctgtgtacttttagggtctttacttggtttcttattctataactttcacccagcgaaaattttcctaggtgatagtggtgcattaatgataggatttattatcggtttcttatccttactcggctttaagaatatcacatttattgcattattctttcctatagttatattagcggtgccatttattgatacattatttgcaatgattcgtcgaatgaaaaaagggcaacatataatgcaagcggacaagtcacatttacatcataaattacttgctttaggatatacgcatagacaaaccgttttacttatttattcaatagcgattatgtttagtttatctagtgttatcctctatttatcccaaccgttgggtgcacttatgatgttcattctcattgtctttacgattgagttgatcgttgaatttactggattaatagatgataattatcgaccaatattaaatttaattacaaaaaaaggaaatggtaagcaacatcattatgatgagcatcaccgttcataataaaaaaacactaa

SEQ ID NO: 3905 - DNA, 3308 bp, Artificial Sequence
  Description of Artificial Sequence: synthetic nucleic acid sequence
agttaacgaaaagcttttaaaattaattaagtaatatcaattagttattgacttttcttaaaacaatatagtacaataaaaaagattgattttactaaatgaacattgaaaactgaatgacaatatgtcaacgttaattccaataaacagtaacgaaacgttacaaactatttagtatttatgagctaatcaaacatcataattttttatggagagtttgatcctggctcaggatgaacgctggcggcgtgcctaatacatgcaagtcgagcgaacagacgaggagcttgctcctctgacgttagcggcggacgggtgagtaacacgtggataacctacctataagactgggataacttcgggaaaccggagctaataccggataatatattgaaccgcatggttcaatagtgaaagacggttttgctgtcacttatagatggatccgcgccgcattagctagttggtaaggtaacggcttaccaaggcgacgatgcgtagccgacctgagagggtgatcggccacactggaactgagacacggtccagactcctacgggaggcagcagtagggaatcttccgcaatgggcgaaagcctgacggagcaacgccgcgtgagtgatgaaggtcttcggatcgtaaaactctgttattagggaagaacaaatgtgtaagtaactatgcacgtcttgacggtacctaatcagaaagccacggctaactacgtgccagcagccgcggtaatacgtaggtggcaagcgttatccggaattattgggcgtaaagcgcgcgtaggcggttttttaagtctgatgtgaaagcccacggctcaaccgtggagggtcattggaaactggaaaacttgagtgcagaagaggaaagtggaattccatgtgtagcggtgaaatgcgcagagatatggaggaacaccagtggcgaaggcgactttctggtctgtaactgacgctgatgtgcgaaagcgtggggatcaaacaggattagataccctggtagtccacgccgtaaacgatgagtgctaagtgttagggggtttccgccccttagtgctgcagctaacgcattaagcactccgcctggggagtacgaccgcaaggttgaaactcaaaggaattgacggggacccgcacaagcggtggagcatgtggtttaattcgaagcaacgcgaagaaccttaccaaatcttgacatcctctgacccctctagagatagagttttccccttcgggggacagagtaacaggtggtgcatggttgtcgtcagctcgtgtcgtgagatgttgggttaagtcccgcaacgagcgcaacccttaagcttagttgccatcattaagttgggcactctaagttgactgccggtgacaaaccggaggaaggtggggatgacgtcaaatcatcatgccccttatgatttgggctacacacgtgctacaatggacaatacaaagggcagcgaaaccgcgaggtcaagcaaatcccataaagttgttctcagttcggattgtagtctgcaactcgactatatgaagctggaatcgctagtaatcgtagatcagcatgctacggtgaatacgttcccgggtcttgtacacaccgcccgtcacaccacgagagtttgtaacacccgaagccggtggagtaaccatttggagctagccgtcgaaggtgggacaaatgattggggtgaagtcgtaacaaggtagccgtatcggaaggtgcggctggatcacctcctttctaaggatatattcggaacatcttctacgaagatgagggataacgtgacatattgtattcagttttgaatgtttattaacattctttgtacattgaaaactagataagtaagtaagattttaccaagcaaaaccgagtgaatagagttttaaataagcttgaattcataaataatcgctagtgttcgaaagaacactcacaagattaataactagttttagctatttattttgaataacaattcaaaatatggtggaaacatagattaagttattaagggcgcacggtggatgccttggcactagaagccgatgaaggacgttactaacgacgatatgctttgggtagctgtaagtaagcgttgatccagagatttccgaatgggggaacccagcatgagttatgtcatgttatcgacatgtgaattcatagcatgtcagaaggcagacccggagaactgaaacatcttagtacccggaggaagagaaagaaaaatcgattccctgagtagcggcgagcgaaacgggaatagcccaaaccaacaagcttgcttgttggggttgtaggacactctatacggagttacaaaagaacatgttagacgaatcatctggaaagatgaatcaaagaaggtaataatcctgtagtcgaaaacatattctctcttgagtggatcctgagtacgacggagcacgtgaaattccgtcggaatctgggaggaccatctcctaaggctaaatactctctagtgaccgatagtgaaccagtaccgtgagggaaaggtgaaaagtaccccggaaggggagtgaaagagaacttgaaaccgtgtgcttacaagtagtcagagcccgttaatgggtgatggcgtgccttttgtagaatgaaccggcgagttacgatctgatgcaaggttaagcagcaaatgtggagccgcagcgaaagcgagtctgaatagggcgttgagtatttggtcgtagacccgaaaccaggtgatctacccttggtcaggttgaagttcaggtaacactgaatggaggaccgaaccgacttacgttgaaaagtgagcggatgaatattaataattgatgatccaaaggtttatcaaagacttctttagaaaaaataaatgccaatctacctataaaaaaactaacccaagtcataatatgattaatgaatgcttttttgccatgttctgatgttggttcatcagcaagtatccatacaaataaaggtaaaatgacaggtgcgaaaaagatacttaaataactcaatgctgataaaacgtaactattgtcatttttatgcatattactatttgtattttccacttttttcaccttctttacttttctttactattataaaaacattaatagcgagctattacaacagttataagagaagcttacgatattgtaagtatgtgttgttataatcaatataaaattaagaaagacctgagaatttatattatcatccacaatcgaagtgagtagcgaaatttattggaaaaggtacttatattgaagatattgttaatggttcattt

SEQ ID NO: 3906 - DNA, 2913 bp, Artificial Sequence
  Description of Artificial Sequence: synthetic nucleic acid sequence
gctaaccgcattcacgtaagaattgcttctcccgaattcatgttccctagtttttatggtattgacgtatctacaacagctgaactcatctcagcaagtaagtctcctgaggaaattaaaaatcatattggtgcagattctcttgcttatttaagcgttgatggcttaatcgagtctataggacttgattatgatgcgccatatcatggcttgtgtgtagaaagttttacaggtgattatccagcaggactttacgattatgagaaaaattataaaaagcatttaagtgaacgtcaaaaatcatatatagctaataataaacattattttgatagtgagggaaatttacatgtctaaagcatatgaggaatctggtgtaaatattcaagcaggatatgaagcagtcgaaagaataacaagtcatgttgaacgtacattgcgcaaagaagtattaggtggtttaggtggatttggtgcaacatttgatttgtctcaattaaaaatgaaagcgccagttctggtatcaggtactgacggtgtgggtacaaagttaaaattagcaattgactatggaaagcatgacacaattggtattgatgctgtcgcaatgtgtgtaaatgatattttaacaacaggtgctgaacctttatactttttagactatattgccacgaataaagtagtgccaagtactatagagcaaatcgttaaaggtataagtgacggttgcgaacaaaccaatacggcacttataggcggtgaaactgctgaaatgggagaaatgtatcatgaaggtgaatatgatattgctggttttgcagtaggagcggtagagaaagaggactatattgatggttcaaatgttgaagaaggacaagcaattattggtttagcttcaagtggtattcattcaaatggctatagtctagttagaaaaatgataaaagaatcaggagttcaattacatgatcaatttaatggtcaaacctttttagaaaccttccttgcaccaacaaaattgtatgtaaagcctattcttgaattaaagaaacatattgatatcaaagcgatgagccatattactggtggaggtttctatgaaaatattccgcgtgcccttcctaaaggtttatcagcaaaaatagatacacaatcattcccaacgttggaagtctttaattggcttcaaaaacagggcaacatttcaacgaatgaaatgtataacatatttaatatgggtattggatatacaattattgttgacaaaaaagatgttcaaacaacattaacaacgttacgtgcaatggatacaactgcatatgaaattggtgagattataaaagatgatgatacacctattcatttattggaggtagaatagtgaccaatatagcgatttttgcctcaggatcaggtagtaactttgaaaatattgtaaaacatatccaaacagggcaattatctggtatcaatgtaacggcactgtatacagataatgaaggggtaccctgtattgatagagctaaaaatttaaatattccaattcatattaacaagccaaaagacttttcatccaaatctttatatgaacagcatctacttaaattattatccagtgaggaagttcagtggattgtattagctggttatatgagactagttggccaagacttattacaagcttatgaaggacggatattaaatatacatccctcattattgcctaaattcaaaggtttagatgccataggtcaagcgttagaaagtggagatactgtaactggatcaactgtccattatgtagatagtgggatggatacgggagaaattattgaacaacagcaatgtgatataaaaccggacgatactaaagaacaattagaagatagagtaaaacatttagaatatgaactttatccaagagttatagctaaaatcattaaatagaggagtatcttatagaatgaaaaaagcaatattaagcgtttctaataaaagtggaattgtagagtttgcaaaagcattaactaatttagactatgaactgtattctacgggtggtacaaaacgtgtattagaagatgcgaatatcaatattaagtccgtgtcagaattaacacaatttccagagattatggatggtcgtgttaaaacactacatccagcagtccatggtggtattttagctgatcgagataaagaacatcatttagagcaattacgagaacaacatattgatttaattgatatggtagtagtcaacctatatcctttccaacagactgttgctcaacctgatgtaacagaaactgatgcaatagaaaatattgatattggtggacctacaatgttaagagcagctgctaaaaactttaaacatgttacaactatcgtacatccttccgattacaacgaggtaattgagagaattaaaaatcatcaattggacgaagcatatagaaaatcgctaatggttaaagttttccaacatacaaatgaatatgatcatgctattgttaactatttcaaagacaataaagaaacactaagatatggcgaaaatcctcaacaatctgcatattttgttagaacatctgatagcaaacatacgattgctggtgcaaaacaattacatggtaaacaattgagttttaataatattaaagacgcagatgcagcgctcagtttagtaaaaaaattcaacgagccaactgctgtagcagtaaaacatatgaacccgtgtggagtaggaattggacagtcgattgatgaagcatttcaacatgcatatgaagcggataatcaatcaatatttggcggaattatagcattgaatagaacggtagatgttaaattagctgaagcattacattctatctttttagaagtagttatcgcacctcaatttactga

SEQ ID NO: 3907 - DNA, 3000 bp, Artificial Sequence
  Description of Artificial Sequence: synthetic nucleic acid sequence
tgtaacacgtatacaaacgtgggctataaaatttgatatttatttatcaattaaaaagaagcaaggtatcatgatcgatgcgagtacaacgagtatcagtaatgctgtacttcatatcaatcaacttacagacgatgactttaaagttgaaaaccttattttacaagagttacctcaagcccatactagaaaaataaaacaaattatctcaaagcatatagataatcatcaattatcaacttctgaaaataaaatacaacaattacttgtgcatctaattttaattatcaaacattctcaaccagaggaagaagattggagcactgatacagaatctttaactattgcgaaaaagtgtataaaagatatcaatgaaacccttggatatcaacttaacaataaaacaagtgaatgcttttccttttttattagctaccatttcaataagtttgatttagggatccaacaactatttattcaaagttatatcgatcgactcattgaattaatggagcaacatattggttttcccttttcacaagatacaattttaaaagataatatgaacgtccactttagtcgtacatatttgcgattaatgagtcatgtttatctaaataatccattaacaagtcaaatcaaacgactatatccctttgtctttaatacactatatgatagtattcgacaattatcacaagataccaatatccaattaagcgaagatgagattgcctttttaactatacattttcagtcttctatcgaacgccataagtcatcacatattcatgttgtaattgcttgttattatggcttaggcatttcaacgttgcttgctgagaaaatcaaacaacttaatcatgcaatacagatcgtagatacattaaaacttgaagatattaataactatcattttgaagggattgacttattaattactactcacgactttgatacaagtcaacttttacaaatacctaaagtcatacaagtatcacctttattttcagatgaagatgctaaaaaaatcgaattctttgtaaaagccatgcaaaacccattatcaaaagatgatatattatcaaaaattcagttgagtgttgagtccaatttcaaactgaatcattcaaatcacattcttccaatttttgagaaatccaaagaaattttagattatcatcatgcaactctagatggctatatagaaagtgccatagatcgcgaaaaacaatcttcaacatatataggtaaagggatagcactcccacacggcaaccctgaaaaagtactgaaatcacacatgattatatttaaaccttctcaacctataacatggaaacaacatgaagttaaacttgttttctttttagcaatgagtaaaaaagatttaaatattaaccgtaaaattatacaatcaattgctcaattagaagaagatgacatccatcaattatgtcttttagatgatttacaactaaaaaacactttgtatgcacgttttaaagaataattgccactattgacggcaattattcttttttatgcttaaatgtatgcgtttacaattattgttaggaaaaggagcgtgcatactatgaaaatacttgcaattacatcatgtccaaatggaattgctcatacatatatggctcaagaaaaattagaacaagcagcaaaagatatgggcgttgatattaaggttgaaactcaaggaggcgtcggagcagaaaacgtgctcacttctaaagaaatcaaagaagctgatggaatcatcattgctgccgatagacaggtagatttatcaaggtttaatggtaaacctctcatcaatgaaagtgtacgtgaaggtattcatagacccaaggaattaatacaacgtgtgattgaccaagatgcacaaatttaccatgatcaaaatatttcttcaaatatgtctagagaccaggaagaatctcataaaagtaatattcaaatggtatatcagcatttaatgaatggtgtttccttcatggttccatttatcgtcgttggcggtttactcatagctattgccttaactcttggaggacacaccactccaaaaggattagttatccccgaagattcattttggaaatctattgaaaatattggtagtttatcgtttaaattcatggttcccatccttgctggttatatcgcggtgagtattgctgataagcctggtcttgttccaggtatgattggtggtgccattgctgctgatggtagtttatatggaagtgaagcaggagccggtttccttggtggtatcgtcgcaggtttcttagcgggctatattgcaaaatggattaaacagattaaagttcctaaagctatggctcctattatgcctattattattatacctattctatcttctttaatagttggtctcatttttatatttgtaataggcgcaccaatttcaaatatatttggtgcattaacatcatggttaaaaggaatgcaaggtgctaacatcattattcttgctcttattattggcgcgatgattgcttttgatatgggaggtccagtaaacaaagtagcattcttattcggttctgcattaattgctgaaggcaactacactgtgatgggaatggttgctgtagcagtatgtacaccaccgattggtttaggtttagctacatttgttcgtaaacaccaattcaataaagcagaacaagaaatgggtaaggcatcatttacgatgggattatttggtattactgaaggggcaatcccttttgctgcacaagatcctctaagaatcattccagccaatatgattggcgcgatgattgcttcagtaatagcggcggttggaggtgtcggtgataaagttgctcatggaggtcctattgtcgctgtactaggtggaataagtaatattttatggttctttatagctgttgtcgttggaagcttagtaaccatgttcacagtcttgttatttaagcgtcacacccctgc

SEQ ID NO: 3908 - DNA, 3345 bp, Artificial Sequence
  Description of Artificial Sequence: synthetic nucleic acid sequence
gtgagttaataaacgataatcaatacgttctaaatagttgaatgtattttcaatttcttgtttaaattgctccatagaatcagaaggaagttgatgattcttactatcttcaaattttaaaaaggatttaaagtcactataaccatcaaaacctagtttacgagtgaagcgatgaatcgtagcatttgaagcatgtgtctgtgaggctaaatcttgtattttcatatttttgcaaacatctatatgtgtattaacataatgtgcaatttgtatatcattatcatttaattgatcgaaattagagtttacacgttcatctaaaatcatcttaacacctcatcactgaaaatattttctttatatgaaaatataatctaattatacaaaaatgtttcaaagtgcgtcaacgtcattgtcattatgtaagcgtttactatatattggtaataacttattaaataaagagcaataaagataaacatatattagttatcataattaagggaagtgggaggtattcaaaaatgaatgcaattaaacgatttggtagtgcaatgatagtacctgttttaatgtttgcttttttcggtattgttttgggattcgctacattatttaaaaatccaaccattatgggaggattagctgatcagcaaacattttggtttaaattttggtctgttattgaatcaggtggttgggtaatatttacacatatggaaattgtctttgtagttggcttaccattatctcttgctaaaaaagcaccaggacatgcagctttagcagctctaatgggatatttaatgtttaatacttttatcaatgcaattttaactcaatggccacatacttttggcgctaatttaaaaaaaggtgtagaaaacacaacaggattaaaatcgattgcaggtattgaaacgttagataccaatattttaggtgcaatcattatctcaggaataataacgtggatacataatagatattacagtaagcgtttacctgaaatgttaggtgtatttcaaggattaacattcgttgtaacaatctctttctttgtcatgctaccagtggcagcaatcacttgtgttgtttggccaacgattcaacacggtattgcttcaattcaatattttattgttgcatcaggttatataggtgtttggttatatcatttcttagagcgtgtactaatacctacaggattgcatcattttatctatgcaccaatcgaagtaggtccagtagttgttaatcatggtttgaaagcagaatggcttcaacacttaaaccagtttgccgaaagtaataaaccacttaaagaacaattcccatatggatttatgttgcaaggaaatggaaaggtttttggttgtctaggtatagcattggcaatgtatgcaactacaccaaaagaaaatcgtaaaaaagttgctgcattattaataccagcaacacttacggcagtagtagctggtattacagaaccacttgaatttacattcttatttattgcgccatttttattcgtattacatgcactactagcagcaactatggatacactgatgtatggatttggtgttgtaggtaatatgggtggcggtgtactagattttattgcaactaactggataccattaggaaaagcacattggatgacatatgtctttcaagtagtaattggtttaatctttgttgcaatttactacttcttatttaaatatttaattttaaaatttgatattccattaccaggacgtaagaaaggtgaagaagaagttaaattattttccaaacaagattataaagataaaaaaggagattcaactcgcaatcattcacctaatagtgaatatgaagaaaaggcgatgtactacctagaaggtcttggaggaaaagaaaatattaaagacgttacaaattgtacgacacgtctacgtttaactgttaaagacgaaagtaaagttcaagaaagtgcctattttacacataatcaaatgtctcatggtttagtaaaaagtggcaaaagtgttcaagtcgtcgttggaatgtctgtacctcaggtaagagaagcatttgaaaatattgtaaatgatgatctatcttagatataaagtaactcccaaaataattcaaatagagattattttgggagtttttgtatttatatgtgtaaataagttattcttgctcatatattctatctttctattcatgaaatgcgtgctttatgtagcatttttgctctataacttgctgataggatatcaatattacgcgttgcaatagtttgaagcagctttgtgaaaatctcaggaggacatgtgacgctcgcgcaattattatttaatgtataattcacattatgatgattcgcaaacatattcataatatcgatgactttatctttaatgaaggcatcttgtaaaccatcgatcgctaaatcaaagcgtttaatagattggtaaagttgttctgaatcaagaagttcatttacacggttgggtaaaagtatttgataaatagcataattgtggaaacttaagaaacttatcagataaggtagttgtagcttggggaggctaacttccaatgcgaacacattgttttgcttaatgatagaatactgaaaagattcacaaaaagtaatttctttacataaatgtattaatttttttcgcgttgagcgagatttcaaacctgcaacattaatgatgtaggtttcaaatttatcaatcaacatatggggacctccaatcgttaacaatatatgtatgaaaatgatatgaatgcttattttttatacgctgttcgtttaaataaattgtaccactctttttttttagaatcactaagacttttgattgaagttgaaagattatagttatcttatttcgaatgagtaatcattgaaagaaaagttttattcattgcatagttaagaaccagattttatattatttgatgcttagttatttagaagcaagcttaaatcaaattatgttagtatgaaaaataataaatattgaaaggagatgacaatatgtataaagctgtagtgtttgattttgatggtactgtcattgataccgaaaagcatttgttcgatttaataaatacacatttaaaaatccatcaagtagcgccgatttctttagaattctataaacaatttattggcggtgaagctactgaattacatacatatttagaagatgctattggtttcaaaaataaagaaaaaatttatgatcaatattatcaaacaagtgttgaattgccggtaaattctacaatcattcaattgatgcaatatttaaaaaaacgtcatatcccaat

SEQ ID NO: 3909 - DNA, 2901 bp, Artificial Sequence
  Description of Artificial Sequence: synthetic nucleic acid sequence
attcacgagtggtctgaacgatacctttaccaaatgttttagaaccgtaaactttagctttatgatagtctttcatagcacctgtaaacacttctgaagcactagctgatccctcattaactaagatggatactttcatatcttttgcttgttttagtgcttgattagaagtttttaattcttccttatccttacctttttctaattgaacgacagtatttcccttatcaataaagatgttagccatcttgactgcctcatctaataacccccccggattatttctcaaatctaaaatgatatgacggatgccttgcttatgcgctttgatgattgcagatttgagttcaccagaagtattgctttggaatttattgattgttagtacgcctacattgcctttcttctcatactctacactcttaacgtgaatggtatcgcgtttaatcttaatatccttttcttgcgaaccacgttttatagttaaagtaacatatgttccttttttgccgcggaccattttaacaacttgatcaagtggtttaccgactaccgaatgatgattcacttgtgtgacgatatctttaggttgaataccagctttttctgctggtgaatccttcattgggctagtaacacttatctgttcatttttcttttgcatttcagcacctatgccaacgaaatcacctgatacaccttcattaaattgttttgtttcttcagcagtcatatattctgaatatggatctttaagttctttaaccataccatctatggcagattgagttaatttatcagaactttgctttttgtaataatctttattaagtgtttgatagacatattcaattttttttaaatttgcacgttgttctttatttaaaccacttttttgatggctaattaaaattgttgatactacagtaatgatggatgttaaaagaataatacccaaaataacgagtatgaaatgccataatttaatttttatatgcttgctattcttagatggtgttgacattgtgttatcatcttgagatgttgcatgatttttttgatgatcattcatggtatcacatccttatacgttcatattgagttatacaaaatataaattcatagattatattcaaacttaatcatataacgcttgtaatgtttctttactcattccgaaaccaacttctttaataataactggaacatcaacgcgtttaacaatagattcaatatttgacatccatgaagcaaattcacggttcccttcaggcatgactaattcttgaggtgagttcacatgaatttgtagcgcttgagcatctaataattcaaccgcttgtagagctttatccactggtacatcggcacccacattgctgaaaattgttcctttgggatttgttttacgcacaatgctaaatgtttcaatcatattaggattgcgcaaagctgcatgtgttgatcccaccgccattgcaattccagtttctctagcaacaattgctaatttttcattaatttgttttgtccaatcacttccaccagtcattgcatttatatagattggatatgccaaatcgaatttcgtagtatgacttgtcatatcgacttgactaacatcaatactggggatggaatgatgaacaaatctcactttatcaaaatctgaaaccagcgcatctttttgtgacattgcgatttctacatgttcatttttcctctgttctctttgtgagtcactcattaaaacaccctacctttgttaaattatttatatatagttttaaaaccattttttctttttaaagaatatgattaatattattgttataattagcattaaagttaagcacacgaaataagcataatgccatttcaactcaggcataaattcaaagttcattccatatacaccagcaataaaagtgagtggtgagaatataacagatacaagcgtaagtatctgcattatactattcatcctaaatgaggtgaatgattcataattttcacgaatctcattcgtcatttcttgagaagtccgaataacacttctttgtttaataagatgatcatcaatatgttgaatatacattctatgtttggcatctttaattatatttccttcttgtttcattgtatctacaacttcttgcatcggaaataatacgcgtttgattttaattaaatccgaacgtaattgaaagacattttccataacgctcttactatagcggtcatcgacatgcttagcttcaaaattatacactttatcttcaataccataaacaaagttaaaatatttatccaccatacaatccagaatatgaatgacgatgtctgcacaatctaattcactatcatgattttctgcattgtattgagccacacgctttaatgatggaaaatgtttgtgatggtatgtcactaaaacattaccttctaaaaatacacttagtgagattggtgagtaatcatcattaataatactatgaaatatcatatattgatacgcgtcatattctatatatttaactcgtgggtcaccattgatagcatcatctatttctaagtaattgaaatcaaaatgattttttaaatactcattttcttcatcagtggcattttcaaaatcataccatataatcgttgcatctttaggaatctctttcacatttgaaactaatgtaagaggttgcgataaagattgaaatctaacggtcaccgtcatctttcttaccccctcatactttataaattacattttatcatgaattatgttacatgtatgtgctcttttcggttagtatagtgttataactaaggaggttaaataaatgaacaagacatttaccgtaacccgaactgtgacagaagatgctatagataataataatc

SEQ ID NO: 3910 - DNA, 3374 bp, Artificial Sequence
  Description of Artificial Sequence: synthetic nucleic acid sequence
gaaaaaaaacaaagcacatgacacttataattatgcaaagaatcaacttgtattaattggcgataaaaataaaagttatacctctgtaaaagatttaaatcaaaacgacaaactcgcactaggacaaataaaaacagtgcctgctggtaaatatgcaaaacaatatttagatgatcaacatttatatggtgatgttaaagataaaattatttttgctaaagacgtaaaacaagtattaaattatgtggaaaaaggaaatgcacaggaaggattcgtttacaaaacagacttatatcaacaaaagaaaaaagcaaataaagttaaagtcatcgaagaaattaaattaagcaaaccaattacttataaagcaggtgcaacttcagataaaaaattagctaaagaatggattaacttcttaaaatctaataaagctaaacaaattcttaaagaatatcaattttctgtataaggagttcagagctatgcctgatttaacgtccttttggatttcttttcgtgttgctttaatcagtacaatgatagttactatttttggcattttgatttctaaatggctatacaataaaaaaagatattgggtaaatctattagaaagttttatcattttaccaattgtgttaccacctactgtccttggttttatactattaattatattttcaacaagaagtcctgtaggagaattctttactaatatcttacacttaccagttgtatttacattgacaggtgcagtgattgcatctgtcattgttagttttccccttatgtatcaacatacagtgaatggttttcgaagtatagattcaaagatgttaaatactgcaagaacgatgggagcaagtgaaacaaaaatatttcttaaattggtgttaccattatctaaacgttctattcttgcaggtattatgatgagctttgcaagagcaataggtgaatttggtgctactttgatggttgctggctatatcccagacaaaacaaatacattgcctttagaaatttattttttagtggagcaagggaaagaaaatgaagcatggttatgggtgcttgtattagttgcgtttgcggtaactgtcatagcgaccataaatctggttaatcgtgatacgtttagggaggttgattaaatgctcacaattaaagtgaatggtgttcttaatcagacgaaaattaatataaatataaaggatcaacaccctaagatatatgcgatacagggaccatctggaattggaaagacaacaattttaaatataattgccggtttgaaagctataaattattcatatataaaggttggtaaacgtgtattaactgattcacgacaccatttgaatgttaaggttcaacaacgtcgtataggatatctatttcaagattatcaacttttccccaatatgaatgtttataacaacataacgtttatgactaaaccttctgaacatatcaatgaacttattcatactctaaaaatagagcatttacttgaaaagtatcctgtgaccttatcaggaggtgaagctcagcgcgtcgctttagcaagggcgctaagtacgaaacccgatttgattttgcttgatgagcctttttcaagtttagatgataaaacaaaaaacgaaggtatcaaattaattttaaaaatattcgaagcatggcaaattcctattatatttgtaacgcattcaaattatgaagcgcaacaaatggcgcatgagattataacaattgaagattgtatacaaatatagtaagaagtgctatttatctgttaattttaacaataatttgtatattcaaaatataaagagaggtttagagatctaatgcaagaaagatactcgagacaagtgttgtttaaggaaattggtttaaaaggtcaaagtctacttgagaaaaaacatgtgcttatagtaggtatgggtgcgttaggaacacacttagctgagggattagtgagagcgggaataaataagttaaccattgttgatagagattacattgaatttagcaatttacaacgacaaacgctctttatagagcgtgatgcagaagatgtactaccaaaagtaatcgctgcacagaaagttttaaaagagatacgtaaagatgtagagatagatgcttatattgagcatgttaattacaatttcttagagcaacatggcatgcatgtcgatatcatattagatgcaactgataattttgatacacgtcagttaattaatgactttgcttataaacatcagattccttggatttatggtggtgttgtacaaagtacatatgttcaggcaacgtttattcctggtgaaacaccgtgttttaattgcttaatgcctcaattaccatctattaatttaacatgtgatacggttggagttattcaaccagctgtaacaatgacaaccagtttacaactcgttgatgcattgaagttgctgactggtaataaggttaataaacacttcacttacggggatatttggacaggagatcattatacatttggttttagtcgtatgcaaaatgaagattgtaaaacttgtggtaatgctccaacatatccacaccttaatcaacatcaacaagattatgcgaccttatgtggaagagacactgttcaatataaaaatgctgatatttctcaggaaatattactatcatttctcgagcgaaatcatattcaatatcgcacgaatttatatatgacaatgtttaggtttagagaacatcgaattgttgcattttctggaggtagatttttgatacatggaacgacagaacctaaaaaagcaattcaattaatgcatcaactatttggttaaatataagggagtgaataaacatgcacaaacatcaacatcagaatattcatttaaacagaccgattcatgtagcaattttgactgtatcggatacgagagattatgattctgataaaggtggtcaactgattcaatctttgataaatcaacatgagaatcatgttgatattaaccactatcgaattgttaaagatgatatagaagctattacacaccaacttaagctttggttaacttcgtcaaatcaactagatgtcattattacaacgggaggaacaggtatctcacaaagagatgtgacaatagaagctgttcgcccattgttaactaaagaattagaaggttttggtgaattatttagatacttaagttataccgaagatgttggtacaagagcattattaactcgagctattgcaggtacctgtgatagcaccttaatttttgcacttcctggctcaactggtgcaattaaacttgcaatagaaaaattaattaaacctgaattgagtcacttagtgt

SEQ ID NO: 3911 - DNA, 3428 bp, Artificial Sequence
  Description of Artificial Sequence: synthetic nucleic acid sequence
atgcaatagaaaatattgatattggtggacctacaatgttaagagcagctgctaaaaactttaaacatgttacaactatcgtacatccttccgattacaacgaggtaattgagagaattaaaaatcatcaattggacgaagcatatagaaaatcgctaatggttaaagttttccaacatacaaatgaatatgatcatgctattgttaactatttcaaagacaataaagaaacactaagatatggcgaaaatcctcaacaatctgcatattttgttagaacatctgatagcaaacatacgattgctggtgcaaaacaattacatggtaaacaattgagttttaataatattaaagacgcagatgcagcgctcagtttagtaaaaaaattcaacgagccaactgctgtagcagtaaaacatatgaacccgtgtggagtaggaattggacagtcgattgatgaagcatttcaacatgcatatgaagcggataatcaatcaatatttggcggaattatagcattgaatagaacggtagatgttaaattagctgaagcattacattctatctttttagaagtagttatcgcacctcaatttactgaggaagctttaaaaatattgacacaaaagaaaaatattcgtttattacaaatagatatgacaattgataacgctgaacaagaatttgtttccgtttcaggtggttacttagtacaagataaagataataaagatgtgactcgaaatgacatgactgttgctaccgacattcaacctacagaagcacagtgggaagctatgctcctaggttggaaagttgtaagtgccgttaagagtaatgcagtgatattgagtaacaacaaacaaacagttggtataggtgcagggcaaatgaatcgtgtaggttccgctaaaattgcaatcgaaagagcaatagaaattaacgataatgttgcgcttgtttcagatggtttcttcccaatgggagatacagttgaatatgctgccgaacatggtattaaggcaattattcaaccaggtggttcaattaaagatcaagattccattgatatggctaataaatatggcattacaatggttatgacaggtatgcgtcattttaaacattaatttttgaaaagaaaggggtaatctattgaaagttttaatagttggagctggtggacgtgaacatgcattagcttctaaaatcaatcaatctccaattgtagataaggtttacgcgattccaggaaatgatgcaatggtcaatattgctcacttataatgaaaacttaaaatccaacatcaattatgaaatattaagtcttcagcaaattgataaaacaatttatgattaccaggaaaaacttattgccgaagtagattgggaaaatgaatggaagaattattttcatccatttagagcttcaaaacaatttacgatagtaccaagttgggaatcatatgttaaagaaaatgataacgaattgtgcattgaattagatccaggtatggcttttggaacaggtgatcatccaacgacaagtatgtgtttaaaagcaattgaaacttttgtaaaaccaactgattcagttatcgacgttggaacagggtcaggcattttaagtattgctagtcatttacttggagttcaaagaataaaggcattagatatagatgaaatggctgtaaatgtggcaaaagaaaactttaagaaaaatcattgtgatgatgcaattgaagcagttccaggtaatttattaaaaaatgaaaatgagaaatttaatatcgttattgcaaatattcttgctcatattattgaagaaatgattgaagatacttataatactttaattgaagatggttattttatcacatattctcttaattgaaaataattatcatttatattgacaactgtatgtgcctcgtttaatataattctcaaatcgtaacaattacgatttgttttatgcaattattttaagttattgatttttatgaggttaatcatttttattaacaatttaatttaaaaatttacaataaaaaggagtgttttatgcaacgtcaagtggtcgaattttcaaaatataatccatctggaaatatgacaattcttgttcattcaaagcatcaaccgagcgaatacgcagcgattgcacatcagttgatggcgacaacacatgtgtgttgtgaacaagtagggttcattgaatcagtaaactatgaaaatggggataactatcacttggtaatgagtggaaatgaattttgtggtaatgcgactatgtcttacattcactatttaaaagaacgtttattgatacagcatcaacaatttcaattaagagtttcgggatgttctcatcctgtagagtgtaaagttcattcgcaacattatgaagtgactatgccaaaagtacatcaagttaaggaaagatttgtgaaattaggggaccaacagtttaaagcatttgaaattagatacgatacatacattcattacgtgttgatgtgtgatggtgtagatttagcaatgaaacagcgcgtggaagattttgtcagtgcgcaaacatggcatcaacaatttaaaacgattggcgtcatgctttttcaacaagataaacaattcatatatccactgatacatatacctaaaatagatagcttaatctgggaaaatagctgtggttcaggagcggcttctatcggtgtgttagttaattatctaacagatcatgatattcaagattacctagttaaccaacccggaggcagtattattgtctcatccagaaagtctggacaaaatgaataccaaacaacgattaagtgtcaagtttcaactgtcgcaacaggacaagcatatatagaacaggagacaatgacgcaaatatgaatgatcatacaaaaatagagaaccaattacaatattatttagaacaatttacgtacttacatcaactcgttttggaagatagtcggcatattgttgatttagaaaatttgattgatgaatacagtcaatggatacttcaacctttggcagagcatcactatttaacatggaacgatttagaaacaaaaatgagcttaaccaagaagcttcaagaggtatcagcaaaatgtgtgaaacaagtagaagtcattcgcgcacaacgtttgttgaatggtagggcgaccacgtcaggttatttcgaaaatatagagcattgcattaatgaagggtaagtactcgaggaatagtaaggcaatgtgcccacccctctttatctgtaggatactctgtatctggtagtcccatccatccaattaaaatgcgttgcccgtctgcatcaacaaacgtttgtggcgcgtagaaatcaaaaccattatccaattcttgaaaactttcatggtcgaaaaatagattattaaagtttt

SEQ ID NO: 3912 - DNA, 3126 bp, Artificial Sequence
  Description of Artificial Sequence: synthetic nucleic acid sequence
tttatcaaaatatttgttagaaggctcttttcctttcatttttaaatagcacctctcaaactctaactattattaatcataaatcttctcaatgttcttatattaaatcatgtactatgaaccttaataattgctaatagacgtcaaacaacataatatacattttatattttaattttacaattcattatatctatgtttcaaatataattcaattcaaattttatgtcttgattagaattgtatttaaaattttacatattcaaatcatatgtcaacaactcaattagaaatggttctcactttttaagaacaacattattttaattctaaagcaatgattagacaattacagtggatataacaaaattgttagttttatcaaattaaaaaaattcacgttatcacattcgattgatggaatatgactaacgtgaataaattttaaaagtgtaaagaggttattggggttattggtgcatcattatttaatactgctttaatattatctatacaaagttgtaccattcgatttctagtgacttgggatgcacttcctatgtgaggtaacaccacagcgttaggtaatttcagtattggatgattaggttgaataggttcttgacgcgtaacatctaaaccacaggcttgtatctcatgattttttaatgcttctaaaagtgcttcttcatctacaatttcacctcttccaatattaatgaagacagcatcatttttcattttattaaaagctcgagcatcaaattgattctcagtttccttagttaaaggtgctgtgcaaataataaaatcactttgttcaagtaaagatttaaacgttacatatgtagcatttaaatctctttcagcatttaagtcacgtttgcgattgtgatatattatccgtgcatcaaacccttgtaagcgacgtgcaaacgcttttcctatatcacccattccaaaaataccaacagttgcaccgtatacatcttttcctgataataagtagggtccccaacttttccacttaccctcttgaatatatgatgtcgcttcaatgattctacgagctacagtaagcatcaatgtaaaccctagttcggcagttgtctctgtcagtacgtgaggtgtattggtaacaactacaccatgtttctttgctaatgaaatatcaatattgtcaaaacctactgccatattagcaatcactttaagttgttgtgccctgagaaatacttcttcatcaatatgctcactcaatgtgatcacacatgctgttgcatcttcaacgttagcaagaaatgattctctagacatgggcgttaaatcgtgttcccacatgacaacttgtcctatttttttaagttgctctacgtagtgttgtggaatttgacgtgttacgagtattttattcatatgcacacctctattaatttcaaaaacagatagatgatattttatttttctaattctgcaatagctacatttaaatctttaaatgaatacgtaggcggtatttctttagattgaatatcttcatacgtactcacaccagtttgaacatgtatcgtatcaatacctacgttaatacctgacataatgtctgtgtcatataaatcaccaaccattgcaacttctgatttttctaatccaagtatatctaaagacttagacattataattggttcaggtttaccaataaactctggctgaatgccagtagagacactgaccacactcgtaatagcaccattaccaggtaaaaaacctctctctttaggtatggatacatctggatttgtagatataaatttagctccattacgtacagctaatgttgcgattgataatttttcatatgttaccttttcatctaaaccaataactacataatcaacatgttcatcattctttattgaaagtcctgcatcagttagtgcagttttgagtccatgaccaccaatcatatatacagttgcatttggatgctgttcagagatataatccgctgttgccaatgctgaagttacaacttcatctggtttagcatcaatatgcatctcacgtaacttctcagtaacttgaacaggtgtctttgtagaattattagttacatatagatgcgggatatgattattatttaaataatctataaattgtgcggcaccgtcaatttcatctgtgcctttatacattgtcccatctaaatcgattaagtatgcctgataatgtttcactagttattcgctccttttccaaatgcggtaattggtacattttcattttctaaaaattgtcctacttcttgaataaattgcttatagtatggtagtgcatcatcaaataacggctcaattttattcatatttaaatcgatatagtgatgtgcaaactgttttctaacatcaatagttcgattgatatgtgattgtgtttcttttgaaataacattttccaattctaaaatatctattacatctttataattaccaggatctcttaaaataaacccatctataatcatattgccaatatctacagaagattcaattaacatttgaccaattcgttcaaaagcatataggttccttttattatcattgtaatcttcagtgagcttttgtaagtaagtgattttctgagttagtttatctttatctacaaaatacattcgcttgtcacctcttcatacatctaataagttaatcataccatagttttgcagtcatcatcatttgtcgttatacttaagtgtaatagttttcgcaatataaaggagcgtcagagttatgatagatatgtacttatatgatgatgaagaacaaagccaagtacagttcgtcggctttgttggtgagcatagtcgttacgacttaatgcttgtacaaacggatagacattatggtaaaactttagttttaaatatgcagacaaatcaatttggcattataggttcagatgatatagaagaagaaggttacatttctcatattttaggagtatcaaaggaagaagcggatgaaattattgaatatttaaatgaagttattcaatagaagagatatgttataaaagtccacttaaattgagatgacgctctcaacttagtggacttctattgatcta

SEQ ID NO: 3913 - DNA, 3592 bp, Artificial Sequence
  Description of Artificial Sequence: synthetic nucleic acid sequence
aatagtacatgaagtagcaagtatttatcttttagataacgcctgtaaaaatataaaatagtggaaattgattttttaaacgttatcattcatattcaaaatatttaacttagtttgtcaaacaacgtttatttttatataaccataaaataatatcataaagaagctatatgaaattcgaagtataatgccaatgtttcatatagctcctattctaaatattaaaatttaataattaaatgtatcaatcgtcctattcatttgatgcatagcctgagagtgggtaatgatctgagtaatcattgtatttgtatactcactttacgtctccaatacgccgttatcctgatttaacagtgcatagattaattcgtaaatatttaatagagaattctatggataaaaaagaaatacgtcattgggaagagacgttgccagaattagctgagcacacatcacaacgtgaacgccgtgccattgaagccgaacgtgatactgatgaattgaaaaaagctgagtatatgattcaacatattggtgatgaatttgaaggtatcattagctcggttgctaattttggtatgtttatagaattacctaatactattgagggtatggttcatatcgctaatatgacagacgattattatcattttgatgaacgacaaatggcactaatcggtgaacgtcaagcaaaggtctttcgcattggtgatacggtcaaagttaaagtgacacatgttgatgtggaagaacgcatgatagatttccaaattgttggcatgccattacctaaaaagacatcatcacaacgacctgctcgtgagaaaaccattcaagctaaaacacgtggcaagtcgttagaccacactaaaagtgatcgtaatggtaaaggtaaaaagaaaaaacgtaagcaacgtaaaggtaaaaatgcacgtaaaaaagataaacaaggtaatacgcatcacaaacctttttataaagataaaagtgtgaagaagaaatcgcgtcgaaagaaaaaatagtcagcaaagatgaggtgagtaatagtggctaagaaaaaatcaaaatcaccaggtacgttagctgaaaatcgtaaagcaagacatgactacaatattgaagatacaattgaagcgggtattgctttaagaggtactgaaattaaatctatacgtcgtggtagtgccaatttaaaagatagctttgcgcaagtgagacgaggcgaaatgtacctgaataatatgcatattgcaccatatgaagaagggaaccgttttaatcatgaccctttacgtacacgtaaattactcttgcacaaaaaagaaattcaaaaattaggtgagcgtacacgagaaataggttattctattattccgttgaagttatatttaaaacatggtcaatgtaaagttttattaggcgttgctagaggtaaaaagaaatacgacaaacgtcaagcacttaaagaaaaagcggtaaaacgagatattgatcgcgcagttaaagcccgttattaagcaatatcattgcttaatcgggccatctttgatatgattgattgcagtgtcaaattgttttattgatgatttaaccaaatattttgttagattgatttgaattgaggggacgttcttggattcgacaggggtcccccgagcttattaagcgtgtcggagggttggctccgtcatcaacacatttcggttaaatataactgacaaatcaaacaataatttcgcagtagctgcgtaatagccactgcatcgcctaacagcatctcctacgtgctgttaacgcgattcaaccctagtaggatatgctaaacactgccgcttgaagtctgtttagatgaaatataatcaagctagtatcatgttggttgtttattgcttagcatgatgcgaaaattatcaataaactacacacgtagaaagatttgtatcaggacctctggacgcgggttcgaatcccgccgtctccattatatagcctgtaacccatgtggttgtgggctttttattttcgttgccccagatatgccccagcacataaaaagcgtcctataattaggacgcaatattatcataaatcgtgattgatttatccatagtattaatttgtgtaattactttatgaaccttttcatcttcagtataaatatcttccttaatattgtacttaaagtatacgagttgtctatttgttgctttatcaacaatgattatatcttttgaaaagtagtcacaagtaatatcgaaactagtttcattaataatattccaattaaatattttcatatataatctcccttataagtattttactatttctttttgtgtactgggatataaatggccatatctgttatatacttcgttgctatttgcatggcctaaaccttgagctatcaccatgatacttgcaccgtgattgactaacatagacgcatggctatgtcttaattcatgtataacgattctagagaacttctgaccgtctggcagttgttcatctaatgtttttaatgcagtggtaaacaaacgatctatagttgattcgctttaagctttgaagaatgtaccgaataatacatagtcatctttatatacattgttttctttgtaccattttaaatattctttgatatcattcatcatatgaacaggtaaatacgtattatattgttgtagcatttttgtattcgctccaaagccaccagtagccaacactacaccatgacgtgtatgaatcttcactttagcaccatttgctttacgtgcttcaataccaacaacttgattaccttctttaattaacttttctgcagtagtttctgtaaaaatacgaccatgattatgtttaacgtagtctcctaaattttcaatgtactctaaaccttgtgctttcattggtttatgaccacgacgccataaagcacccacaggcatatctacaaacgaacgatcaaaatgtacacctttgtctttcaaccaatatactgattccaaaacgttatctgtgagtgttttaactaaatcataatcacctgaaatttcgacattattacgatctttacgtttaccacctaaatatgtttgaatacgatgtaattcgacagaatcaaaaagatattcatcttcattactgctattttcaagatagtctttaatttgacgttttaaagtattgaaatcttcaatgtaagcttcatctatatcattttcatcatgatttaataactgtatgagtgtctctttttcaccagcaagtgccgggaatgcattttgccatttaggctcagcagcgttgacttgaccacctgtacggatagtattgccacctatagctgcaaatttctcaagcatgatgacttcttttccttcatctaatgccgtagcagctgcactgagtccggcacctcctgtaccaatcacaacgacatcagtcgtctcttcaacaacctcatcagaccactgaacgactggtttaggacgcgcccgtaaaatatctgggtcttctcctgcttgttcaattgcatctgcaataccttgcacgatgccttcacttgttactgtcgcacctgaaatga

SEQ ID NO: 3914 - DNA, 3389 bp, Artificial Sequence
  Description of Artificial Sequence: synthetic nucleic acid sequence
tagatgaactccctgagaatgcacgtaattacttagagcgtatttcagaattatgcggtgtccatatttcaatcttctcagtaggtccagaccgcgaacaaacgaatttattagagcaactttggtagaataaaacgtcaagaaagcatgtgagctttgtttaattagagcaatgagcgaaatgattaacattattcttagtgcttgctatatgcatgaaagtaaaaaagctttctaattcatatctatcaatatttgcagtgaatcatctttaaacaggcggccacaacataatggtcgcttgttatttattttggagtagattaatgactttcaatctccttttgtcctactccagttttattttaaaacagcaatttgaaatgagttttgaatgaaatcaatggttttattcttctccacagtaagcttcatagcatgattgtgttggttgattaacgaaacaaaaatattattaaatttatgtaaaaaatatcttgtcatcaaaagtagagctatgctataatctatcttgtgcttaagaacggctccttggtcaagcggttaagacaccgccctttcacggcggtaacacgggttcgagtcccgtaggagtcaccattctaggtcccgtagtgtagcggttaacacgcctgcctgtcacgcaggagatcgcgggttcgattcccgtcgggaccgtattgcctacccaatagggtaggcatttttttatgcttttttacgtacaacaatgtaccttcactttattaatctttctgattcacactacctatttttttaacatgcaatgaaaacttaatattcctatacatacttatatttctatcgttacaaacactgtcattactgcactttttacatatacgaaaacgataaaatatgatgataaacctaaacaaaagcgtcaagcatattgcaaaagtctaacttattttgcggaactgtatttcaatggtaaaattataaataatattattctataattttaaatactaaaatagaattaaccgttcataaatggtaaattatataataggtagctatatgttatatagagaacagaataataatgaagcacttcgaaaatttgatataacattagcaatgtaaacgaacggaagaactacactttgagaaaagaggtttataatatatggctagaaaagttgttgtagttgacgatgaaaaaccaattgctgatattttagaatttaatttaaaaaaagaaggttacgacgtatattgcgcttatgacggtaatgacgcagtagatttaatctatgaagaagaaccagatatcgtcttacttgatatcatgttacctggtagagatggtatggaagtgtgtcgtgaagtgcgtaaaaagtatgaaatgccaattatcatgctgacagcgaaagattctgaaattgataaagttttaggtcttgaattaggtgcagatgactacgtaactaaaccatttagtactcgtgaactcatcgcacgtgtgaaagcgaacttacgccgtcattattcacaaccagctcaagaagtaagtggtgcgacaaatgaaattacaattaaagatattgtgatttatccagatgcatattcaattaaaaaacgtggagaagacattgaattaacgcatcgtgaattcgagctgttccattatctttctaaacatatgggtcaagtcatgacacgtgaacacttactacaaacagtgtggggttacgattatttcggtgatgttcgtactgtggacgtaacaattcgccgtttaagagaaaaaattgaagatgatccatctcatccagaatacattgtgacacgtagaggcgttggatacttcctccaacaacatgattagagggagcgtcttatgaagtggcttaaacaactacaatcccttcacacgaaactcgttattgtttatgtactactcattattattggtatgcaaatcatcggtttgtattttacgaatagtttagaaaaggaattactcgataacttcaagaagaacataacacaatatgcgaagcaattagacgtcaatattgaaaaggtttataaagataaagataaaggttcagtcaacgctcaaaaggatatccaagaccttttgaatgaatatgcgaatcgccaagaaataggagaaatacgctttattgataaagaccaaattatcatggcaacaaccaagcagtctaaccgtggtcttatcaatcaaaaggttaacgacggttcagttcaaaaggcgctctccttagggcaaacgaatgatcatatggttcttaaggattacggaagtggtaaagagcgtgtttgggtatataatataccggttaaagttgataaacagacaatcggtgatatatacatagaatcgaaaattaatgatgtatacaatcagctgaacaacattaatcagatattcatcgtagggacagcgatatcactattcattacagtaatactaggattcttcattgcacgaacgattactaagccgataaccgatatgcgtaaccaaaccgttgagatgtctaaaggtaactacacgcaacgagtgaagatatacggtaacgatgaaatcggtgagctcgcacttgccttcaataacttatcgaaacgtgtccaagaagcacaagcgaatacagaaagtgagaaacgtcgcctagattctgttatcacacatatgagcgatggtattcttgcgacagatcgccgtggacgtgtacgtattgcaaacgacatggcgctgaaaatgctcggtctcgcgaaagaagatgtcatcggctactacatgcttggtgtccttaacttagaaaatgaattctcattagaagaaattcaagaaaatagtgattccttcttgttagatattaacgaagaagaaggcattattgcacgtgtaaactttagtacgattgtacaagaaacaggtttcgtgacaggttacattgccgtactacatgatgtcacagaacaacaacaagtcgaacgtgaacgtcgcgaattcgttgcgaatgtttcacatgaattacgtacaccactgacatcgatgaatagctatatcgaagcacttgaagaaggtgcttggcaagataaagaactggcaccatcattcctatctgtcacacgcgaagagactgaacgtatgattcgtttagtgaatgatttacttcaattatctaaaatggataatgaatcagatcaaattacgaaagaaattatcgacttcaatatgtttatcaacaaaattattaaccgtcatgaaatgacagcgaaagatacgacattcgtacgcgaaattccgcaacaaaccatctttgctgaaatcgatccagacaagatgacacaagtatttgataatgtca

SEQ ID NO: 3915 - DNA, 3217 bp, Artificial Sequence
  Description of Artificial Sequence: synthetic nucleic acid sequence
gctgacacaatcttgcacttttcatcatctatcgtgcaacatatgagtgggcctttatttatcattgttctgctctttatctttttctgtttaggatttatcgtgccgtcctcatcaggattagcagtactatctatgcctatctttgcgccattagctgatacagtaggtataccaagatttgttattgttacaacatatcaattcggtcagtatgcaatgttgttcttagcgcctactggacttgtaatggcaacacttcaaatgttaaacatgcgctactcacactggttacgtttcgtatggcctgttgtcgcgtttgttttaatatttggtggaggcttacttattacacaagttttaatatactcataatcttttaaaagtggaaaaatatttacctattcatagttatatcttttagaaatgacgaaaaaaagaacgcctagaacattaatagtcgtcctaggcgttcttagcatatgagcagtcgatgcttaaataaaaaagttctatattcaaattttacatgcatgggacgcttcattgttgaaataatctaactcattcaatacgtacgctctcccacttctttattaatcttaacaaaagccgtatggatttaactatattctaacattcattttaaatatgtgatgatgtaaaacggtcaatgacatcttctattgctttatcccaaaatgcataatcgtgatgacctggcgcttttttaaattgatatgaaatacctttttcatctaaatagttcacaaaatcaatattaccttgatacaattcatcttcagttccacaagtaatatatagttgtggtaacgtttgtccattgtctattgcttgttcaactaaatagtatggatcaaaagatgtccccgcgacatgttgcgtattacctacaatcgcttctggagtaaaatcataccattgatattgaccaatcatagaaacatcatatggcgctgaaagcatagcggcttttgagaaacgataactttgcgttaatgcaaatttgattgcaccataacctcccatagagtgacctgctataaaattatcttctctctttttagacaatggaaatatttgatgaacataatcataaacttctagtatatagtcataataactatgtccataagccatatttgaatagaaactatgatcagcattaggcatcaccactgctagttggtgggtattcgcatagcgttctatactcgtatatctcatataagaggaagtatcacttgataaaccatgtagcaataacatagtttttaatggtttcgcattttcatttgtatcaaagtaacttttatcttctggaagaatgacattaatcgtttgatgcattcctaaagttttagataaataatttaatgtaatatgagccataatgttggatcactcctccctgtgtaaaaaattaaattacttacgtagctggatctagctttttctctaataaacgtaataaaacatctataagtatgacaatgataacgataggtatggcacctgctagaataaatagtgttccatcagttgcatttgtacctctaatcacaatatcacctaatgttggtgcaccaataaatgaacctacagctacgacaccaatagctacaacaagggcaatccgaataccacctataataactgaaagtgacagaggtaactcaatcatagttaatacttggttacgcgtcatacccatcccttttccagcatctttaatatttgggtcaacttcattaattcctgtatacgtatttttaataataggaagcaaggcatataagaacacagtaaaaatgactgtattcataccaagtcccatactaagcattaatatcgctaacatagcaataaccggaacagtttgaataatattcgcaatagtgataataacacctgataatttaccaaatcgtgcaatgatgataccaagaggtatgcccactaaacatgctagtaaaacaccgtaaacagacattaacaaatgattaacaaacaattcccataggtagccaaagttcatttgatagtagtgaacgagttgttgtattaaattcccttccatgtttattgaccacctttctgtttatcttttttattgtcatcgtcttcaaaataatgatgttttttcaagaagtcctctgcaactgttgcaggctctttccctttaccatcagcttgataatttaattcttgcatttgttctgttgatatcttaccttctaattttttaacaatcggtttgagctctggcttctcttttaacaattgatctgatgcaagtggactggcatcgtatggtgggaagaatcgacgatcatctttcaacacttttaaatcatatgctgaaatacgtccatctgtagaataacctacggcaacgtctaatttgccagaactcagtgcatcatagacaagaccaatttgcataggtcttaccgtaccgaaactatagccatattcttttttaaatgctggataaccgtcacctttacggtccatccatgaactatccatacctactcttaaatctttagcatgcttttctaagtctgaaacagtttctaaatgatatttcttagctgtctcttttgttactatcaatgcatatgtgttttcaaaaccatatgaattgaagaaggtttgattgtatttctttttaaacccttcttgagtcgctttcatggcctttttaggatctttaatcggatcttctttcaacgcccctgttaagtcagtgcctgtataacgcgtacctgacatattagcttggccacttgtgacagcattatgttgaatcgtacttgaacctaaattattaattaaggtaggtttaatttcaccttttgtatcatgttcaataagtaatctcagcatgtgcgatataatttgtgattcacttgttcctaaacttgtgattctaacatcgtcatctgaatgactattttttaaaccgggtaagttacatccagataacactgttagacataatactaaaacaattagatattttttataattcttcatattatcctccttcaatgattatctggaaacttttaatcctttaggtacaacccatttttcaatcagtgataaaacataatctacaataagtgcaatagcagtgacaagaatagttgcagtaataatcatactcggttcaaatagcgctaatccg

SEQ ID NO: 3916 - DNA, 3030 bp, Artificial Sequence
  Description of Artificial Sequence: synthetic nucleic acid sequence
atgaatttaatgtttgaaccctcgtcaatagcgttgcgccctgctttcatgattataggtccatctgcaacaggatcagaaaatggcacaccaatttcaacaatgtctgctccattctcagttaatgtttttaaatgatgaataaaatttaaatcacccataatatacggaatgaataatttactcattttgttcaccaccgttttctttgtattgtttaattgtttccatatctttatctccacgacctgaaatagtcacaacaataatttctttttcatccatatttggcgctaatttttcaacataactcaatgcatgtgcactttcaattgctggaatgataccttcaacttttgagaatgttataagtgcttccatagcttcattatctgtagcacttacatatgatacacgaccaatatcattataatacgaatgttcaggtccaatacctggataatctagtcccgctgatatagagtgtgccaattcaatttgtccatcatcattttgaataaggtacattttggaaccatgtaatacacctggtttacctttccctatagctaaagcatgattatgcgtatgacttccttttcccgcagcttctaccccatataatttaacatcatcttgtataaatggatagaacgtacctattgaattggatcctccaccaacacacgcgactaacgcatctggaagtcgtccttctttacttaaaatttggcttttaatttcattaccaatcaaaatggaatacaaatcgaccctattttaaatacaaataacaatattttgtatataacaccatctcatcaatttccaactggttatgtcaccaatttaaaaaaaagaacacaattaatcaattggtcccatcaagctaagcaaagatatattatcgaagatgattatgattcagaatttagatattttggcaaacccatacctgcattacaaagtttagacacaaaaggaaaagtcatttatattagtactttctcaaaatctttatatccaagctgtaggattgcatatattgttttgccacaaaatttaatgcacaaatataataatcaaaaatataaagagggaaatacagtgcctgtgcatgttcaacacatgattgctcaattcatgataagtgggaaatttgaaagacatttgaataaaatgcgaaagatatatagagataaacttgattatattttaaaacgattaaagccctacaatactcaaataaagattgaaggcgcactaactggaatgcattttacaataactgttaataatggattgtcaatgaaacaatgtttaaaaaatgcgaaaaaaaataatttaaaattaaaaccttatcattacgaaaattattctaaagtttatccaaaatttattttaggatttggggggataaaaaaagaagaattagaagatcatgttaatgcattaattcattcactcgttatataaatactagattttaagaaactttaaaatgttttaattattgttacgatacacaacagtaattaaagcatttaaggttggatatgttacttaacctttataagccacatatgaaattacctcttataaaagttgttaagtagcgaatttatttattaatactttcttttttagaactatttttgcataaaaaaaagagacctttcggtctcgattaggctcatcgcatcttatacgatatttgcctggcaacgtcctactctagcggaacgtcagtccgactaccatcggcgctaaggagcttaacttctgtgttcggcatgggaacaggtgtgacctccttgccattgtcaccagacaaatgaatgattatacattcaaaactagatagtaagtaagattttgcgtcgcaaaacgttttttaaaaattgattaagtcttcgatcgattagtattcgtcagctccacgtgtcaccacgcttccacctcgaacctattaacctcgtcatcttcgagagatcttataaccgaagttgggaaatctcatcttgaggggggcttcatgcttagatgctttcagcacttatcccgtccatacatagctacccagctatgccgttggcacgacaactggtacaccagaggtatgtccatcccggtcctctcgtactaaggacagctcctctcaaatttcctacgcccacgacggatagggaccgaactgtctcacgacgttctgaacccagctcgcgtaccgctttaatgggcgaacagcccaacccttgggaccgactacagccccaggatgcgatgagccgacatcgaggtgccaaacctccccgtcgatgtgaactcttgggggagataagcctgttatccccggggtagcttttatccgttgagcgatggcccttccatgcggaaccaccggatcactaagtccgtctttcgaccctgctcgacttgtaggtctcgcagtcaagctcccttatgcctttacactctatgaatgatttccaaccattctgagggaacctttgagcgcctccgttaccttttaggaggcgaccgccccagtcaaactgcccgcctgacactgtctcccaccacgataagtggtgcgggttagaaagccaacacagctagggtagtatcccaccaacgcctccacgtaagctagcgctcacgtttcaaaggctcctacctatcctgtacaagctgtgccgaatttcaatatcaggctacagtaaagctccacggggtctttccgtcctgtcgcgggtaacctgcatcttcacaggtactatgatttcaccgagtctctcgttgagacagtgcccaaatcgttacgcctttcgtgcgggtcggaacttacccgacaaggaatttcgctaccttaggaccgttatagttacggccgccgtttactggggcttcgattcgtagcttcgcagaagctaaccactcctcttaaccttccagcaccgggcaggcgtcagcccctatacatcaccttacggtttagcagagacctgtgtttttgataaacagtcgctt

SEQ ID NO: 3917 - DNA, 3726 bp, Artificial Sequence
  Description of Artificial Sequence: synthetic nucleic acid sequence
aataccaacaaaaataattgttttgatacgcaaacaatataaaaataaataaaaatggtcatttccttaaaagcaacaaggaaatgaccatttttaattgcctgttaaaactttaacagtgtactttatttatcattatagattagatgttttggttataattattatacgttgttgcttcatcagttaatcacacggatgaaattattttatagaaaataattgaacgacttcacacatattctataaatctaggtctctagtcatctcaatcatttgagtataaatatcataataaatataatttaaggccatcggatgtggttgaatgattttatcataatcttctgtgtaaacaatgggcctaggtgttgataaattaacataatgaattaaatgattaggaaaatcatctcgtttagggttattacaaataagcactaaatcgacatctaaatcaataagttgaagtacatcactttcaacttccgaagtgtagtatggtgaaaataacagtaccctatctgttgtatctatatcgttaaaattttgtaaatcttcaagtggtaagctagacgctaatttttcatggctttgtaatatgaatgactcatagaattttaaatcatcgtagcctttgatatagacatgtccttctccaccaattgcttgaatgagacattgagctgccatttgaatatccaactcttgtttttcaagccgattaaaaataccagttaattgtgtgtttaagatttttgacattgtaaacctccaatctctttactgaaatattgtaaataatcctagatagatatgcaatatgtgaacatttttcgaaatgtattcgcttccaaaaacgtaaaaacaactaattataaaaaatatcaatattaaataaaatattcgaatgcaatcagtatatatttttgatataatgacgttgaaaaaaacgtgcactgttgcactcaaggaggaactttaatgcctttagtttcaatgaaagaaatgttaatcgatgcgaaagaaaacggttatgcggttggtcaatacaatcttaataacctcgaatttacacaagctattttagaagcgtctcaagaagagaatgcgccagttattttaggtgtttctgaaggggcagctcgttatatgagtggtttttatacagttgtgaaaatggtagaaggtttaatgcatgacttaaacatcacaatcccagtagcaattcatttagaccacggttcaagctttgaaaaatgtaaagaagcaattgatgctggattcacatctgtaatgattgatgcatctcatagtccttttgaagaaaatgttgaaatataggagtgcatccttatattaataataaaagagttggtaaagacacaaattatgattttattactttagcgccgggttggaatgaaattttaattagaggtcacaatatatccaatagtcctaaaacagaatttatatttaattacatctataggtaggtgagaatattggaaaatctaatatttatgaatagagaagggacattttcggaaattgtttcaataaaatcattttgatgattaaggtggtatgttgctacaaatgtatctgtatctgattcaaagttaggcaaatgtgcaatgactcgtttaatatcacttgttgtatctttaatagtacgaccagttagattctctaactcacgacctaattctactaatgtcatctttttaccttctagaatattaaaatcttgttcatgcatcgttcttctctcctcttaaagctatcaactattcgctatcttccaatctaaatgtttgttaaactcactaatacctattcgcaacatataatacccttcccgtttcgtatttaaacgttaggaataactacctatcgttcttgtcgatgattattttttctatcattctgtgagggcttctgctgtgtatgtggtttagaggattgactgtcatgttcatcttgattgctttttattttgttagtttgatcatcatgattagcagatgtcgattgattatctgaagacttttcttttgcatcatgattatctttatttttcttatctcgggatgtgcttttagcaggcaagtcatttacatcttcttggagactatcctgtttgtgtttaagcttatccttttgctcttgtaactttttcttctgtttttttaaatccttattttcttttttcaactgatcaatgcttttttctaaagaagctttttcgttacttttaccacatgcagttaacaccaatgttgtaattaatagtaaggttaaccattttctcatgatagactcctttgtagttacttatcgatactctttattttaacatggttttttgatttaatcattttttaacataaaatatcatttcattacatttaatttcacaaagtaacatatatatttaatggtaaattatttactctttatttataaaagttttacttttattaaagttatctttttagttatgatatcattcgcgctattttatcaaaattaaacgacgtttgtgtgaaatagaaaaaagatttacaattcctataattttgtctaatagcccttttgaacttgtataagagtaatgatatacatgtgataattatgatatgattgtgtttatcatactaatcatcatgtttttaaatgatactttaacttagttatcctttttaaagtagtatttatttatgaatttaaaatttaagggagtattttattatgaaatccactgcgcaattaacaaaggagaataatgtcaaagctttgcgactgaacaataccgatcgtgaaatatttgaaaattacatgacatatgtgcgtgctgacttacgagttaaccctcacgattcagaattaatgttaaaccgtactttgaaacacttaattcgtgcaggtgatactggaatgcttgcgatggagtttttcaaccatgatcctaaagcacatgctaaaaaagagataagggaactcccaaatgaaacatttaaaaacatttttaaatatataagtcataacttcattcttttaataggtattttttgttttctcaaaggattgattggcttttttatagggggcgatagtaatttactatatttatatacgtttcccctaactgtcattattggtttagtaattatatttttatttatttggatgaactttaaaacggtacaattacagtgctttaacaactcttattggacctggtggctcacctatggtgtcatcgcattattattaatcactcttttttatgttttttttataccgcaatcatttttagcgtttggaccatatattaaagttagtaattggactttcatcattattgcgataataatcatccctatttcattttatgtgaatcatcacttttataataaagaagcaaatacacgcatataaaaagacttacactcaaaacgtttattttgagtgcaagtctttattttatctcaatttaatttattagaaagacatctaaaaagaaccaaataaccattacaatcattattagaccttgagcaattgtactcgctaaaaatgcaatcactgagccaaaactcacctttatagcttgttgaaagttaaacccttgaaccaattcaacaatgaacacagcaacaaaaggaataatgataataccaaagggaggaaaaacgaaacaacctacaatcacaccta

SEQ ID NO: 3918 - DNA, 3019 bp, Artificial Sequence
  Description of Artificial Sequence: synthetic nucleic acid sequence
aggaccgggatggacatacctctggtgtaccagttgtcgtgccaacggcatagctgggtagctatgtatggacgggataagtgctgaaagcatctaagcatgaagcccccctcaagatgagatttcccaacttcggttataagatccctcgaagatgacgaggttaataggttcgaggtggaagcgtggtgacacgtggagctgacgaatactaatcgatcgaagacttaatcaatttttaaaaaacgttttgcgacgcaaaatcttacttactatctagttttgaatgtataatcattcatttgtctggtgacaatggcaaggaggtcacacctgttcccatgccgaacacagaagttaagctccttagcgccgatggtagtcggactgacgttccgctagagtaggacgttgccaggcaaaatattactattccgcagtagctcagtggtagagctatcggctgttaaccgatcggtcgtaggttcgaatcctacctgcggagccatggctccttggtcaagcggttaagacaccgccctttcacggcggtaacacgggttcgagtcccgtaggagtcattttatggagaattagctcagcttgctgaacttcctcttctaattctatcttcatatcctcatcatattcttcttgtaataactctctcgtcgcactcatatcatcgacagcatttgtcagttgataatacccatttactatagattttagtgcattgttcttatcaatgatatcttgtgctttagtttgatcattccaaaaatcaggatcagtcatcatttcttcatactcttgtatgttcgtctctttattttctaagtcaaagagaccccctaatttgatttaagtgattttgatattcttctaaatttcttttaatctcagatagttccattcatcttctctcctatttaatcattctatgtcataatatttatatcatacagtatatgcctattttttaaaaataaacggccattccatcgctatatcatattactaagcatttaacttacaagcgatgtaaataaaggctgagtcattcataatttgatatgcctcagcctttatatttaaactattttattgattacgctttcccatgacaatttttatattttttaccactaccacatgggcatggatcatttctacctacctgatcaccttttacaatcggttggggctttgctttttctttgccatcttcagcagttacatgttttgcttcaccaaagcttttagatttttcacgttctacatcatcttcaaactgaaccactgatttcaagatatacttacatgtatcttcctcgatattttgcatcatgatatcaaataattcatgaccttcattttgataatcacgaagtggattttgttgtgcatatgaacgtaaatgaataccttgacgcaattgatccatcgtatcaatatgatcagtccaatgtgtatcaattgaacgtaataaaatcatccgctcaaattcactcatttggtctcctaatgtttcttgttgctgtgcatatgctttttcaattttagaccatacaatttcaaaaatatcttctgaatctttacctttaatttctgtatcttgaagatctccttcttgcaagaacacatcattaacgtaattgataaatggcgtgtagtcaggattatcgtcttcttcattaataaaatgattaatcgcacgttgcaatgtagaacgtaacatcgcgttaacgacttgagaactttcttcactatcaatgatttcattacgctcattataaataatttcacgttgcttacgtaaaacttcatcgtattctagaatacgtttacgcgcgtcaaagttattaccttctactcgtttttgagctgattctacagctcgagataccattttcgactcgattggcgttgaatcatccattcctaaacggttcatcattttctgtaagcgttctgaaccaaaacgtaccattaattcatcttgtaaagataggtaaaaacgactatctcctctatcaccttggcgtcctgaacgtccacgtaattgatcatcaatacgtcttgattcatgacgctcagtaccaataacagcaagtccacctaactcttcaacaccatcaccaagtttaatatctgttccacgtccagccatatttgtggcaattgtaactgcacctttttgccccgcgtttgaaacgatttcagcttcgcgttcatgatttttagcgtttaatacgtcatgtctgacaccacgtttttttagtaaatttgaaatatattcagaagtctcaacagcaacagtacctagtaagacgggttgtccttttttatgtttttctacaacatcttcaactaccgcatcaaactttcctttttgactaatataaattaagtctgaattatctttacgttgaacaggtttgtttgttggaatttgggtaactgtcatattatagatattacgaaattcttcctcttcggttttcgctgtaccagtcatccccgctaacttattatacattctgaaatagttttggaaagtaatggatgccatcgttttagactcattttgaattgctacaccttctttagcctcaattgcttggtgtaaaccttcagaaaaacgacgtccaggcattgtacgtccagtaaattggtcaacaattaatacttcaccgtcaacgaccatgtaatcaacatcgcgttgcaaagtaacatgagctcttaaagctgtattaatatgactaatcacttccacattttgaacatcataaagattatctactttgaacatacgttcagctttatctgcaccttgttctgtaagatgtacagctttggttttttcatcataattataatcatcttccgctttaagcatttttgcaaaaacatttgcttgagtatataaagaagtagatttttccgcttcaccagaaataattaaaggtgttcttgcttcgtcgatcaatatggaatcgacctcatcaataattgc

SEQ ID NO: 3919 - DNA, 3609 bp, Artificial Sequence
  Description of Artificial Sequence: synthetic nucleic acid sequence
aaacctgcctcaaaggcgttctccatttcatttaatgtaatatgttgatttgaaatgtcattaatagctacagctttttgaacaaaattttctttcatttttgcttttagtcgttcatttttaaatttaaacatatcaaataaatcatcgatatctatatcttgtaaaattgaaccatgttgaagaatgacacctttttgtctggtttgagcgctacctgcaatttttctgccttctactacaagctcataccaactaggtgcatcaaaacatactgaacttcgtggttgctttaatttgtctcgttcttctttagaacgggggatagcgaaataagtttcaaaacctaaatttttaaaaccttctaataatccttgtgaaataattttataagcttcagttacagttgaaggcatatttggatgagactcaggaacaataacgctatatgttaattctttatcgtgtaacacgcctctaccacccgtttgacgtcttactaagccatagcccttttcttttactttatcaatatcaatttctttttggagacgctgaaagtagcctattgagagtgttgcaggattccaagtataaaatcttataactggatcgatttctccacgcgatacaaaatttagtaacgcttcgtccattgccatattataataaggatttttgcttccagtatttataaaattccatatttcagtcataatcatacccctatcgaaatattaaaattaaaactattatgtatctctttgtatatttagattatgtgatataaacataatctaactcgaaaaaatattttgataaattgtactaacagtcttataattataatatcggtaaattagggaggatgcaagatgagtatctctttgtacattgcaattggtattattgttattatcattgcatatatgattatccaacaaattcttaataagcgagctgtaaatgaattagaccaaaatgaattccataaaggtttaagaaaagctcaagttattgatgtgagggaaaaagtggattatgattatggacatattaatggtgcacgtaatattcctatcacagtatttaagcaacgatatcaaggactaagaaatgaccaacctatttatttatgtgatgctaatggtatagcaagttatcgtgctgcacgtatattaagaaaaaatggatataaaaatatttacatgcttaaaggcggttacaaaaaatggacaggtaaaataaaatctaaaaagtaattttacgaaatgatgtctttaagttattaaactctttgaaaggattatgttaatagatgctttcaaagagtttttttagatgatgatatataaacctttcaaagaagaagctgggacataaagttccaagataagttaataaagacaatttctattgaaaaaatatagaaattgtctttttataatttttttgattatttttagctcgttgaactgttacttttcttatattaagtgccattagtacaaattctagttctcttttggctttatttatctctcgaacggacattcgagtgaaactcaaaatagacttcacaaatccaaaaaagcttccagaccaaattttctttgactgtagatggtttttgctttttgttctgaaagttttattaatttgggttttataaaatatttccatttaaaattcttcattattttttaaacatttcaatgtaaaattacatatcaacaaaaatattttggcgagactcttgagagaacaggatagctgaagactacaggctgaagctacctcctaagaatgcgagtcaacaatacgaagtattgtaaataaagaagccagtaaatgaatttatgaaaaactcatttactggctatttagctagtaattatgtccctgctttttctttatttatataactttcatattgaacgactcgtcatcaaaagttaccgtttcagcctgtattttggattcgcgcacctttcacagaaatatcgtaaaaacactacgtattaacatataatcttatttttaaatgttttaaaaaagatattttttatttagtaaaagattagtataagttaacttttgattattgttacttttagaagttttagctagtatatagatttctaattagcgatttaattatcttcagaatcaatatttgtgtgttctttatacttttcgtccttaagttcttcaaatttaagaattggttttcgtgctgcagtggtctcatctaatcgatcaattatagtcgtatgtggtgcttctaaaactttatctggatcattttttgtttcgtcagcgatttgaatcatcgcatcaataaagtaatcaagtgtttctttagattcagtttctgttggctcaatcatcattccttcttcgacattgagaggaaaatatattgtaggtggatgcacaccaaaatctaacagtcgcttagccatatctaatgttctgacaccatattgtttttgtaaagttccacttaatacaaattcatgtttacaatattgattgaacggaatttcaaagtgatttttaaggcgagattttatataattcgcattaagaacggcagcttcagatacttcttttaaaccattggctcccattgatctgatataagtatatgctcttaaataaatgccgaaatttccataaaacggttttactcgtccaattgaatttggaatatcattatcatatttatacctatcgttatcttttataaccataggcttaggtagataactggctaatttctctactactccaactggtcctgatcctggtccaccaccgccatgaggaccagtgaatgttttgtgcaaattaagatgtaccgcatcaaagcccatatcaccaggacgtactttatctaaaatagcatttaaatttgctccatcgtaatataataaacctcctgcttcatgaacgattttccctatttcaataatatcctgttcaaatatacctaatgtatttggattagttaacatgattgcagctgtattatcgtttactactctttttaaatcttctatgtcaacttccccacgttgattagattttacagttactgatttaaatccagcaaatgaggcagaagcaggattagtaccatgtgctgaatcaggcactattacttcatcacgatggctttgtccatttttttcatgataagctttgaaaatcattaaagcagtccactcaccatgtgcacctgcagcaggttgtagggtaacttcatccataccagtaatttccttcaattcttcttgtaaactatatataatttcaagagaaccttgaacgtgttcttcttcttgtaaaggatgagattcactaaaaccagaaatacgcgctaccttttcattgattttaggattatatttcatcgtacaagaacctaatgggtaaaatccagtatctaccccgaaatttttatttgatagttcggtataatgtctaactaaatctaattctgaaacctcgggaaattcagccttatgtttacgaatatacttatcatctaagagtgaagcaatactgatattctcaatgtcattttgtggtaatgaatacgca

SEQ ID NO: 3920 - DNA, 3356 bp, Artificial Sequence
  Description of Artificial Sequence: synthetic nucleic acid sequence
acatttgaaattactcaagataattgtaacgaatcagttaatgaaccctacattttagttactggcactattggatttggagaggtgccgcagccggttcaatcttttttaaatgtaaatcatactcagttacaagctgttgctgcgagtggaaatcgaaattggggacaaaatttcgctaaagctggccatacaatttctgaggaatataaagttccattaatgatgaagtttgaagtacaagggacaaataaagacattattgaatttaaggataaggtgggcaatttcaatgaaaaccatggaagaaaagaaatacaatcatattgaattaaataatgaagtgaccaagagaaaagacaatggtttctttgatttagagaaagatcaagaagcattgaaagtgtatcttgaagaaatccatgataaaatgatttcttttgatgatgaaatcgaaagacttcattatcttgttgataataatttttattttaatgttttcgaaaaatatagcgaagcagaattaattgaaattactgaatacgcaaaatcaattcacttccaatttgctagttatatgtcggcaagtaagttttataaggattacgctttaaaaacgaatgataaaactaagtttcttgaggattataatcagcacgtcgcaatcgttgcactttatttagcgaatggtaatgttaaacaagcaaaacaatttatttctgcaatggtggaacaacgttatcaaccggcgacaccaacattcttgaatgcaggtagagcaagacgtggagaacttgtttcatgtttcttattagaagtagacgatagcttaaattctatcaatttcattgattcaactgcaaaacaacttagtaaaattggtggtggtgtggccattaatttatcgaaacttcgtgcacgtggagaagcaattaaaggaattaaaggtgtagctaaaggtgttttacctgttgctaaggcacttgaaggtggatttagttatgcagatcaattaggacaacgtcctggcgctggggcagtgtacttaaatattttccattacgatgttgaagagtttttagatactaagaaagtgaatgcagatgaagatttacgtttatctactatttcgactggtcttattgtaccttctaaattctttgatttggctaaagagggtaaagatttctatatgtttgcacctcatacagttaaacaagaatacggtgtgactttagatgatattgatttagaaaagtattacgacgatatggttgcaaaccctaatatcgataaaaagaaaaaagacgcacgtgaaatgttaaatatgattgcacaaacacaattacagtctggttatccatatcttatgtttaaagataatgcaaacaaagtacatgcgaattcaaatattgggcaaattaaaatgagtaatttatgtactgaaattttccaattacaagagacatcagtaattaacgactatggaattgaagatgaaattaaaagagatatttcatgtaacttaggctcattgaatatagtgaatgttatggaatcaggtaaattcagagattctgtgttcacaggtatggatgctcttacagttgtaagtgatgaagcaaatattcaaaatgcaccaggtgtaaaaaaagcgaatagtgaactacattctgttggactaggagtaatgaacttacatggttatctagctaaaaataaaattggctatgaatctgaagaagcaaaagactttgctaatatattctttatgattatgaactattattccatcgaacgttcaatggaaattgcaaaagagcgtggagaaaagtatcaagactttgagcaatcagactatgcaaatggtaaatattttgaattctatacatctcaagaatttgaaccaaaatttgaaaaggttcgccaactttttgatggtatcgatatacctacttcaaatgattggaaagaattgcaaaataaagtagaacaatatggactttatcacgcttatagattagctattgctccgactcaaagtatttcttatgttcaaaatgcgacaagttctgttatgcctattgttgaccaaattgaacgtcgtacgtatggaaatgcggaaacattttatccaatgccatttttatcaccagaaacaatgtggtactacaaatcagcatttaatactgaccaaatgaaacttattgacttagtagctacaattcaaactcacgtagaccaaggtatttcaacgatactttatgttaattcagaaatttcaacacgtgaactttcaagattatatgtatatgcacaccataaaggccttaaatctttatactatacacgtaataaattattaagtgtggaagaatgtacaagttgtgcgatttaattgattaagttgtaaagattttagagtagagtgatgaattgatgtatttctttaaattatagatttacattggttcaaaactctttattttatacataaatatgacaggaggattttaatgaaggcggtaaattggaacacccaagaagatatgactaatatgttctggcgtcaaaatatctcacaaatgtgggtggaaacagaatttaaagtatcaaaagatatagcaagttggaaaacattaacagattctgagaaaaatacttttaaaaaagcgcttgcaggtttaacaggtttagatacacatcaagctgatgatggtatgccattaatcatgcttcatactactgatttaagaaagaaagctgtttattcatttatggctatgatggaacaaatccatgcgaaaagttattctcatatcttcactacattattaccatctagtgaaaccaactatttattggatacttgggttattgaagagccacatttaaaatataaatcagataaaattgtagaaaattaccacaaactttggggtaaagaagcatcgatttacgatcaatatattgctcgtgtttctagtgtattcttagaaacatttctattctattctggcttctattatccattatatctcgcaggacaaggaaaaatgactacgtcaggtgaaattatacgtaagatacttttagatgaatctatacatggagtgttcacaggtttagatgcacaaagtctacgtaatgagttatctgaaagtgagaaacaaaaagctgatcaagaaatgtacaaattattaaatgaactttatgataatgaagtttcatatacacatttattatatgatgatattggtcttgctgaagatgtattaaattatgttcgatataatggaaataaagcattatcgaatttaggttttgaaccatatttcgaagagagagagtttaac

SEQ ID NO: 3921 - DNA, 3828 bp, Artificial Sequence
  Description of Artificial Sequence: synthetic nucleic acid sequence
tataactcaattgtagctggcgtatctagttcatcatcattcattaatttaattgaacgaggtataactttgagtacacataattcaggatcttcttttgaattgaaaaatgttttgtcttgagtttcccataaccaatcaataactttttgatttttgacaacttctatagtggcatctatttcaacaaagctattgtttgttgtttcgttatagcctaataaaatatgagcatcaggattattttctatttcttcgacttttagtgaattgatattcgtttttgtatataagtttaagtcatcgttgtaaaagaccatatatctgctattaggtttattatgatgtgctgttgataggacaccaatttttgaagaatttaatactttttctattgcttttgtcacttgttgtttattcaaaattatcatctccttattattgtatatatccttatcacacataatttaaacgaaacaaccttatgatgatttttaagaaggtttaaaacaaatatatttgacttcatcgtgttttaaggtgacttggaaaggaagatgatggtcatgttgtatagctaattctgtttttggttgatttgatttatcaagttcatcaagaatactacgttcaatataaaattgttgtttagtttgtggtagaaggttttgaattgcgccatgctcatgatttaacgttttaataataattaatgagttggttgataatgtatttttaaaaacgtagcgctgttgactatcagatagataacgatcatttattttattaaataataaaaagtgatagttaccatctttgcgactcattaaaaaattgttagctatctctaaaggttcatttaaaaatggttcgattaatttatagaggtgcatgagaggtaggggactaccataacgattaaataaggcaataaaaggactctcatcttctatcagttgataacttacaccacccccgtaacgcattaatgcgactaaatgacaaacaaggtcagataattgaagtggataagtaccattgtttgtatatttaaaacactttaaagataaattattgtaaacaaatttagttgaaggtataccggaatctaatataaattgtttataattttcaaagtgtgtggacgaatgtaagtacgatttacgtttggtaattaatgagtttttggtttctagattttcaatgtctataaaatagtaatcgaaatttaatcgcttcatcatatcataagttcgatcaatagaagaattttggtgtagtaatccttcaacagttatactataacggatagctttatttttatttttaatttttaaatggcataaatgtatatcgttcactgacatattcttagtttcaaagactaacataaatttaaccatttttttgttcattttataatcttggtggctattaagaaataataaaattatttctttgatagattcaaattcatttgtagatgttaatctcatggctaaacctatatttttttcgaataatttttcaaagcatcgatttaataaattaaagttcacctctcgcgtcgaaatatcagtgatatcattgataaaaattacagcttgtggcagggaggtaaaatcaatgttgtaatattcattaaaaacaaattgaaataattcgttgaaattttgaaaacgtataaacgctttagagtttttagtctgatcttgaggataaaattcattgatatctctttcagtcgtttcagtagccaaatgatcactaaactcaaattgattaattaaatcaatatattgtgaaaagtcagtatcactaaaacttatcgaaggtaaggagtctaacttagagataatcgttcggtattgttttgggctacaacctaaataatttttaaattgatttgtaaaattggtatgactactaaatccagattgttctgaaatagcgttaattgagtcctcagatgaaagtagcctttttatagagtcaatcacttttaagcttgtaaaataatctttaaaattcatattaagatatcttgcaaataggttagaacaataagattcagatatattacaatgttgagctacttctcgtagtgaaagtgactgtgatacttttgaatgaataaatgttaatccttcagtaaacactgaatgattaactgcaatttgaggaatatattttttcttatatcgaatgactgcttcttttagtagcgtttgtattattttagagatggattgctcatcttgattttctccttttattaaatgttgaatagcttgtaaaataattgttttaacaaaactgcttgattgtaataaatgtctgtcaaaataacatttaaaaaatttattatctttactataaaaataaataactggaatagagagtaatacgagatttgaagcactattaataaaatagatgtcagattgattaatgatagctatatgattacctaaatcttttgtttcaccattaatagtgatttttaagtcatttgtaagtgaaaacatcagaataattctattaatattgcgttcagggggagaatgatattctttatatatatttaaaaaacatgtcattgtatattacattagctccttgaatgaattgaataactaaatttaaatgtgaccgtgtatatctatttcgctcaattatttagttgttttgatagaataataaatgtaattataagcgattgataaagaaatagtaatagtaaaaaataaaatttttcttggctaaatacagaaaattgttagaaattataagttttgcgcaatataaaagttgatttaggaatatagggtcattattttggaaaatttagatagagtcaaaaagagaattttactacataattaatgttagatttcgtttccttttaaaaatctaaaagagcaatttagaggtttaggagaagttcgaatgaattataaaacgaagtcactgtaactaaatgtacgctgctcatttcaacgttaattgaaagaacaataaaagagatatcgaccataacaagactcaacatgtttgatgtgtcattattcagcacttattatcaattgagcaaaaatgtttcatacctatgtaatctcttaaaacttttccaattacatcaatgaattcaacagcaagaaaacacaagcactatgatccgaaaataactccattaaaattctattttttgattattaatttttaaattaagatgaataaacattagcatatgggtagttttgatgaaagttaaacattttatttcaacatcaagaatcaacatctatgcacgttttaaatgtaccataagtttatgttcaatattgaagtagcaacaattagaattttgaattaaaatgactctcccccaaagtaacatttaatttaaattttaagcattgtcatggtgctcgccgtaaagttttagatttcattaagtattcatatcgcttttaattcttttcaacaaatagtttaaagactctcaatcatacttataaactataaatgtgagtggtttgatgagtagaattttcatatagatgtcatcatctataggcgtacattttcgcaagattttctgtataaaggatatgtacagattttaaactgcctgcaaagtatcaaaccactgtgccggcagttttttattttaaaaccaaaattgacatataaataaagatctgttttacgtattcgtgcttgcctgacgaaatataattgttaaatgattttgtcacttcattttgtaatattgagtatggtactttgttgtaagtactcgacagcatatttatctgctaaatt

SEQ ID NO: 3922 - DNA, 3210 bp, Artificial Sequence
  Description of Artificial Sequence: synthetic nucleic acid sequence
tagactataatattgccgaagttgaattaagaatcttatcagtttattgaataaggtaataatgattaatagaatcagggttactaatacacatatgtattcttagtttgcttgactacaaaatagaacttaataaacataggctggggcattgttttgatatgttcacttcaaagtagatatgacattaatcaagctttggagttcgtattcttaataagtgtctcagcttattttgtttgcttaaattttgaattaaccaattaaatgagtatttaatagacagtatgcttacaaatatgctagtgtgatttgacgatttatatttaaactttgattttaaatttctatattagttaaaggtatcgcgttgcgttattttttaaaaacgtgtttgattgcgagaaaaaaatgattgcaacgtgttaaaataaaattattgttaattgaaatgtttatatacattttataatataaatgattgtctatagaaaaaggctgttgccagtcgaatcaaagtgaagtgttgtgaaaaattgagttaacacgcattacttcatgagtatataagtataaatttagcgatataaatgataagataaattgttgtaagccaaacagtttttagttaaaggagcgacgcgtgcaatgggatttttatcgaaaattgttgacggcaataaaaaagaaattaaaagattaggtaagttagcagataaagtacttgctttagaggaagatactgcgatattaaccgatgaagaaatacgtgaaaaaacaaaatcttttcaaaaagagttagcagaaattgaagatgtaaaaaaacaaaatgattatttagataaaattttacctgaagcttatgcacttgtacgtgaggggtcaaagagagtatttaatatgattccttataaagtacaagtaatgggtggtattgctatacataaaggtgatattgcagaaatgagaacaggtgaagggaaaacattgactgcaaccatgccgacgtatttgaatgctttagctggtagaggtgtacatgttattacagtcaatgaatatctatcaagttcacaaagtgaagaaatggctgaactatataactatcttggcttaactgtaggtttgaacttaaatagtaagtcaactgaagaaaaacgtgaggcttacgcacaagatatcacttatagtacgaataatgaacttgggtttgattatcttagagataatatggtgaactatgctgaagagagagtaatgcgtcctctacattttgcaattattgatgaggtcgattccatattgatcgacgaagcaagaacacctttaattatttctggtgaagcggaaaaatctacttctttatatactcaagcaaatgtttttgcaaaaatgcttaaagcggaagatgattataattatgatgaaaaaaccaaagctgtacatcttacagaacaaggtgcagataaagctgaacgtatgttcaaagtagataatctttatgatgttcaaaatgtggaagtgattagtcatattaatacagctttaagagctcatgttactttgcaacgcgatgttgattacatggtcgttgacggtgaagtattaattgttgaccaatttactggacgtacaatgcctggacgtcgtttttctgaaggtttacaccaagcaattgaggctaaagaaggtgtagcaattcaaaatgagtctaaaacgatggcatccattactttccaaaactatttcagaatgtataataagttagcggggatgactggtacagcgaaaaccgaagaggaagaatttcgtaatatctataatatgacagttacccaaattccaacaaacaaacctgttcaacgtaaagataattcagacttaatttatataatcctcccttgttgttgtttgtgatacgcttacataactatttctaacatacacataggtacatgtaaatggagttgagaaattttaacaaattctttaaaaacaaaataaaattgagttcgatgaattcgaaatattgtgacttcttataatttgatttattgcaatagatgaatattgaaaattaaatgttaataaaattgtgcatttattcacaatatattcacatcaaattgcgcaaattatgataatttaaatatataatcttaagaaatattgaggagtggttttgttgagtaactcaaaaaaagtagccgttgtcacaggtgcagcacaaggtattggcttgaaaattgctgagcgtctatttgaagacggatatagcatcgcgcttgtagactttaatgaagaggtagctaaagagtcagctgaaaaattatcaaaagaagggcaagaggcagttgcttttaaagcagacgtttcaaatcgcgatcaagtatttagtgtgttaaatcaagtcgttgaacactttggcgatttaaatgtcctagttaataatgctggtcttggaccaatgacaccaattgaatcagtaacacctgaacaatttaatcaagttgtaggtgttaacgtaggtggtgtattctggggtatccaagctgcaattgaacaatttgataaattaggacatggcggtaaaattatcaatgccacatctcaagcaggtgttgaaggtaatgctggcttatctctatatagcagtactaagtttgctgttagaggattgactcaagtagcagcacgtgatttagctgagaaaaatattacagtcaacgcattcgcacctggtattgttgaaacaccaatgatgaaaggtatcgctgaaaagcttgctgaggaaaataaccaaccaatggaatggggttggaaacaatttacagatcaaattgccttaaaacgcttatctaaacctgaagatgtagctaatgtagtaagcttcttagcaggtagcgattcagattatattactggccaaacaatcatcgttgacggtggtatgagattccactaagataaatatcaatgagatataaaaaagttgagtaaagttaattctagagattttaaaatttctagaattaactttttaattatcaaacattaacattcttctattctgtaaaaataacttaagctatttaaggtattaaggtatgttaactgcttagtaaatggtcaatatttataattatcaattaaatttaaaattgatggcgtgatatattgtggcatatcttttacaaaaggtatgcgctt

SEQ ID NO: 3923 - DNA, 3313 bp, Artificial Sequence
  Description of Artificial Sequence: synthetic nucleic acid sequence
ctatgtgctgttctactggagtatgtggtccagaaccggatgaaacactaataaaagcgaaccaaatcaatgaatatttaaagcaaaatcaaatagaagttcaacgttataatatgaataataatccgaatgaattcattaaaaatcaagaagttattcgtttaattcaagaaaaaggtgatgaagttttaccaatcacttttatagaaggcggtatagctaaaacgggcgcttatattacccaagaagaagccgatgaaattattacagttaatcaaatgagaaatggaggatgctgtggtggagatggatgctgttaaatacttaaataaattgaatttagataacattgagttaacaaaatatttgttttttactggtaaaggcggcgtaggtaaaacgacgatatcaagttttattgctttaaacttagcagagaatggaaagaaagtagctttagtaagtactgatccagctagtaatttacaagatgtatttcaaatggaattatctaataaattaactaaatatcaacctatacctaatctctctatagccaattttgacccgattgttgctgcagacgattataaagcacaatctatagaaccttatgagggtattctaccagaagatgtgctttctgaaatgaaagaacagttaagtggttcatgtacagttgaagtagcagcatttaatgaatttacaaattttttatccgataaaactttagaacaagaatttgatttcattatatttgatacagctcccacaggtcacaccttgagaatgcttgaattaccttctgcatggacagattatttaaatacaacgagtaatgacgcttcttgcttaggtcaattatcaggtttaaatgaaaatagagttaaatataattcagcacttgaaaaactacgtaaccaagatgatacgaccatgatgttagttgcgagacctactcactcttctatatatgaaattcaaagagcgcaacaagaattacaaaaactgtcaatttctaaattcaaagtaatcattaacaactatatagaagaaagtcacggtttaatttcgagtcagatgaaatcagaacaagataaaaacattaatcattttactgaatggttaaataacaatcatgcttattacgttccatataaaaatcagaaagaagaaggtatagaaagtttaactaatctattaaatgatgataacttaattgaaaatgatgactttattgttgaagatcatccgcaattcaataaattaatcgatgaaattgaaaatagtaaagttcaatatttatttacaatgggaaaaggtggcgttggtaaaacgacagtagcaacgcaattagctacaacgttatctaataaaggatatcgtgttcttttagcaactactgaccctactaaagaaattaatgttgaaactacaagtaatttaaatactgcttatattgatgaagaacaagcattagaaaagtataaaaaagaagtactagccacagtgaatgatgatacaccacaagacgatattgattatattatggaagatttaaaatcaccttgtacagaagaaatagcatttttcaaagcctttagtgacattatggagaatcaagacgacatggattacgtcattgtagatacagctcctacaggccataccttgctgttacttgattctagtgaaaatcatcatagagaattaaagaaaaaatcaactcaaactaccagtaatgttgaaacattattacccaaaattcaaaataaaaatttaacacagatgataattgtaacattagcagaaaaaacaccttatttagaatctaaacgtttagtagaagatttaaatagagctaatataggccataattggtgggttgttaatcaatcgttagttacgctaaatcaacgtgatgacctttttagtaacaaaaaagaagatgaatcattttggataaacaagattaaaaatgaaagtcttgataattactttgtcataccttatcgagtattagaatattgatattattgattataatgagaactatatgataaatagagtctactttaaaccagttaataatttaggagttaagcaaatatgtaatttatcaaatgacaataaaaattattaacaatataaaagattctaagtagaaagggagaaaaaaattgaattatagtgaaatatcgcaatacttgaaagtgatggctgatagtagccgtcttgaaatattagatttgttatcttgtggtgaattatgcgcttgtgatttattacagcatttttctttttctcaacccacattaagtcatcatatgaaagtattaaaagacaataatttaattacatctagaaaggatggtaataaaaatttatataaattgaatcatgatgtattagatgacattacatcacgactcactctattgagttccagtactgtcccatgtatatgtgaaactgtagagaaaggtgaatgttaacaatgacaatattagcaatcacaatttttatattaacgttaatttttgttatatggcaacctaaaggtctagatattggtattactgcattaattggtgctgtaattgctataatcactggcgttgtaagcttttcagatgtactagaagttactggaattgtttggaatgcgaccttaacttttgttgcagttattctcatttcactcatattagatgaaattgggttctttgaatggtctgctatacatatggtgagagcatcaaagggtaatggcttgaaaatgtttgtttacattatgttgttaggcgctattgtagcagctttctttgcgaatgatggagctgcattaattctcactccaatcgtgctcgctatggtaagaaatcttgggtttaatcaaaaagtcatttttccttttatcattgcaagtggatttattgcagatactacatctctcccattaattgtaagtaatttagtcaatattgtttctgctgactacttccatattggatttattgaatatgtaagtcgtatgattattccaaatatattctctttaatagcaagtattgttgtattatggttatatttcagaaaagttattcctaaccattttgaaattaaaaatcttaaaacacctaatcaagccattaaagatccaaaattatttaagttttcgtggattgttttgtcaatcttactcattggttatataattagtgaatttattcaaattccagtatcgttaattgcttgtttgattgcatttatatttactgtattggcctataaatcgagagtagtaaacacg

SEQ ID NO: 3924 - DNA, 3032 bp, Artificial Sequence
  Description of Artificial Sequence: synthetic nucleic acid sequence
gctggaacagtttgtataatatttgcaattgtaattaccggccacgataaacgtttatacttggctatgaaaataccaataggaattccaattatacatgcaaacaacacaccatataccgacattaatagatgtttgaagaacagttctagaagaaaggcccagttcagtgagtaatattcgatgattgaatgtaacaaattacctttcattacttatgaccacctttcttttcttcaaagtaatgatgtttctttaaatattcttcagctatcactgcaggttccttaccttttccatccgcttcataatttaacttctgcatttcttctgttgagattttaccttctaatttttttagtgccttatcgatttctggattatcctttattaattgttcatttgcaagtggactaccgtcataaggcgggaagaatttgcgatcatcttccaatattttcaaatcataagctgcaatacgtccatctgttgaatacccaactgctacatctaatttattattttttaatgcatcatatactaaaccaatttgcattggacgtgcactatcaaatttaaatccataatctttaacaaaagctggatatccatcacctgcacggttcatccattgggtatccattccaagacgtagttcatctttatatttctctaaatctgatactttttctaagtgatactttttagccgtttcttttgtcaccatgaatgcgtatgtattcgcaaacccaagtgaatgataatacttttcatcatatttctttttaaataagcgttgtgtttcagacatggccttatcaggatctttagtaggtttagctgctaatacactcgtcaattcagtacctgtgtaacgtaccgctgacatatttgcatcaccacgttgtaacgcattatgttgaataatgctagaacctaggttcccaatcaacgtcggtttgatttttccatcagtttcatgttcaattaataatttttccatatgacctataatcttagtttcacttgtttcagtcgttgtgattttcacatcatcttttgcatttccatcacctaaacctggtaaactgcatccagataacacgatgagagacaatgcaatcagaatcagtgtatagttaagatacttcttcaatgtcaattcctcccatttatctagatacttttaatcctttaggtacaacccatttttcaactaatgaaagtataaagtcaataactaatgctaataaagtaacaacaatcgctgcactaataatcataggtggttgatagagatttaatccattaaatacaagatccccaagtccacctgcacctacataacttgcgagtgttgcccaactaatgacgtatacacttgatagacgaataccactaataataagtggtaaagctaaaggcatttctacatctttcattaattgaaatttagtcattcccatactttgaccagcttgaatgacatttttatcgatatttttaacacctaatactgtattatttaaaattggtaataatacatagataaataatgcaacaatagctggtgtttttcctaccccaaatattggaatcatgatagctagcacagccaaagtaggaatggtttgaagcacgccagcaactgttaataccacattagctgtgcgttgcgtttttgataataaaatacctaaagggacagctactacaatcgctaacaataatgcaaacatagaaatataaaaatgttctactgcttttgataaaagttgactaccatattcttgtaagaatgctttcattattaatcctcacctctatgttgagcatcatgataatcattcacatcttcatttatatttgttcgtgtatcagtttgattttgtggtaaatcgtgattattctcatctaagctttcatttgggatctcataactatcagaatcttcttcgccccaaattgagtcatacacaatatcgactaagtttgcacgtgtaattaaaccaatgagatgttcatcattatcgaccacagggacatttctaacattacgttttagaatagtacgcactgagtcttgtaactttgaattgatatgtactttgtagacatccctttgcatggtatcaattaattctttacgcgcacgtaatccttgattgatatcttcaatatctaaaaatcctaataatttattttgattattgactacaaaaatagtgtctactcgacgtgttctcataatatttactgcatcattcaatgaatcatctgctttaacagtgacgggtttgatcatagcactttccacagatttcatattaggacgatcctgaatcaagcgattttgcccaataaaatctctaacaaagtcatttgcaggatatcgtaaaatattgtcaggtgtatcgtattgaacgacttttcccttagacataatacatattttgtctgctaatttaatagcctcatccatatcatgagtgacaaaaataaatgtttttcctaatttttgttgtaattcctttactaaatcttgtaatgtatcgcgtgtaataggatctaatgcaccgaaaggttcatccattaatataatatcttgttcagctgctaaagcgcgcacaacaccaattcgttgttgttgccctcctgacaattcagctggataacgatccaaatattcttcaggtaaatctaccagtttaataagttctttagctttttcatctttcttctctttagaccattttaaaagtttaggtactaaaacaatattttctcgaatagtcatatgtggcatcaaaccaatttgttgaatgacataaccgatacttctccgcaattcaacaggattcatattacggacatcttttccattcatcataatctgtccatctgtcgcctcaatcatacgattaatcatgcgtagtgcagttgttttaccactaccactcgtcccaataaaagcgataaattcaccagattgaatatccaaagaaatattatctaccgcttttttattccct

SEQ ID NO: 3925 - DNA, 2943 bp, Artificial Sequence
  Description of Artificial Sequence: synthetic nucleic acid sequence
gctaattttttaatattccttataatctttattaagttgacgaatcaagcgtttgaattctgcttcagatttaaattcaaacgtgattttcccgacatttttagatgtcgaaatatctactttcgcaccatattgcttttttaaaaatctttcctgctgttgaatcattttcggtttacttcccttggtctctctgtccagtttcattgagatgtctttactgactaaaccattgacgtactcctctaaataccttacactccaagactcctgagtggcttgttttgccgtcttttttattttactggcgtctttcaaagttaataacgtacgcccatgagcacttgataacgctccttgttgaaccatttgagcaacatttttaggtaactgtaataacctaagcatattggcaatataaggacgtgacttacctaatcgtctcgcaacctcttgttgtgtaatattcaaatctgtcatcatttttttataactttctgcttcttcaatggcatttaaatcttctctctgtaaattttcaataattgccaattccatcatatcttcatcagatagttctttaataatagctggcacttctgttaatcccgccaactgagatgctctaaatcgtcgctcacccacaacaatatagtaaccttgaacagtttgacgtaatacaataggctgtaatataccatgttgttgaattgatgaagctaaatcattgagtcgttcttcttcaaacgtcttacgtggctgataaggattaggtctaattaattctagtgcaataaattgcacactatcatcattattcattttcaatctctgatcatctgtatatgccatctcttttccacatctttctatcttaatttaagtatctctaatgaataatcaatcctcattgattcattacttattttaaaaaagttcaatccaataatacaagactttcaaattaatactaatggcttaatatgaagcttattacgtcacatattttcagatgtatttctgataataaattaattgttaaatcaaaatcttcagaaaaatcattgacaaataaattcaaactatgtaatctatgtattaacaatttaaaaaacattttacacactgtaaaaaggaaagtaaaacttacactgcttatacagagagtcttcacacgctgagagaaggcattgaaagaaagtttgaaaatggccttggagtgttgatgccaatatgaggtatcaacgggttcgcccgttatagcgatacagtattaacattgatgttaaatggcgtactggaaattttatacgtcacaatttatcgttaatactcatttattcacatatggattaaatgagtttttgttttatttaatgatgttacgataaaaagattgtgtatcagctattttcagtatactgttttaacactatggcgtactgattgaggttactttagcaataaagtagcaaacaaaggtggtaccgcgaagtttaagctttcgtcctttacatccgaatcattcgggtctaaaggacggaagcttttttatttttactgaataggaggagctagctatgaaggatacagatttagctcaaattgctttaacacaagatcacactggcgcaattgccaatccaatatatttatctactgcatatcagcatcctcacctaggtgaatcaacaggctatgattatacacgaactaaaaatccaacaagaacagcctttgaagaagcttttgcacaacttgaaaaaggcattgcttcatttgctacttccagtggtatggcggcgattcagttaatatgtaatatattcaaaccaggtgatgaaattctcgttgcatttgacctatatggtggaacatttcggttattcgatttttacgaaaaacaatatggtttgaagtttaaatatgtagactttttaaattatgaagaagtggaaaaaaacatcactccacaaactagagcattatttattgaaccaatctcaaatccacaaatgattgaaattgatgtagaaccatattatatccttagcaaaaaacatcaactattaacaattatcgacaacacttttttaacaccttatctttcgacaccactcgaagaaggtgcagatatcgttctgcattcagcaacaaaatatattggcggacataacgatgtgttagctggagttgtaactgttaaggatgctcaattagctgaacaattgaatcaattccataatatgattggagcaactctatcacctcttgatagttatcttttacaaagaggtctaaagacattacatcttcgcatagagcgttcccaagaaaatgctcaaaaacttgcacaacgatgtcgccagtcagattcaattgatgaagttttatatagtggacgaacaggcatgcttagtttaagactgaaccaagcatatagcgtcgctaaatttttagaaaatttagaaatttgtatatttgcagaaagcttaggtggtacagaaacatttatcaccttcccttatacacaaacacacgttgatatgccagatgaggaaaaagacaaacgtggaattgatgaatatctcatcagattgtccgtaggtatagaagactataacgatatagaagctgacataattcaagcattagagaattctaaagtaggagtgatttcatgagtttatctaaagaaacagaagtaatattcgatgtgcgtagaggtaaagactacgactcagctaacccgccactttacgattcatctacattccatcaaaaagtgttaggcggtgagactcaatatgattatgcacgaagtggtaaccctaaccgaactttacttgaagagaaacttgcacgtttagaaggtggtaaatatggatttgcttatgcttcaggcattgctgcaatttcagccgttttactcacattaaacgc

SEQ ID NO: 3926 - DNA, 3927 bp, Artificial Sequence
  Description of Artificial Sequence: synthetic nucleic acid sequence
catacttggcatttaattgtaaacgttgaataacaatgtcgtccatattttgcttactaagttgtaacggaatttcataaagagaatctgcatctctacattctataacactttcctttttgatatcacaaaatagggcgattttgtctttcaaatcttgtgtcatttcgtattctgtacgtactactattaaatcaggttgaatacctagacctcgtaattctttaacactgtgctgtgtaggttttgttttcatttccccagcagctttaatatatggtagcaaagtacaatgtacatacattacattttcacgacctaagtcgcttctaatttgacgaatggcttccaagaaaggtaaagactctatatcacctgttgttccaccaatttcagtaattacaacatccgcattagtactctcaccagctaatagcaatctttctttaatttcgtttgtaatatggggaataacttgtacagtaccacccaagtaatcaccacggcgttcttttttcaacacatgtgaatatacttttccggcagtaacatttgaatatttatttaaattaatatctataaaacgttcataatgtcctaagtctaaatcagtctcagcaccatcgtctgtaacgaacacttcaccatgttgatacggactcattgtgcctgggtctacatttaaatatggatcgaatttttgtattgtaactttaagtcctctatctttaagtaatcttcctagagaagcggctgttattccttttcctaatgatgacacaaccccgcctgttacaaaaataaactttgtcattgtctgacctcctgtaaaatttagtaaactatttaatgattgataaaatctattaaaaactgtgagtaacctatgtatttaacaataataatgaaataaatttggtatattactcaacaatttgattcacttttacatttcattatgaatattaaaaataaaaaaatcgctccctctcacagcaattgtaaggggagcgtatctatttaatacacgtgtcctaattaaaggagcccaaataaaatactaccaccttttaaataaaaataaaagtcccactttaatgtttctgttataaagcgagacatatttttaaattaaaatatagttacttgattaatcattaaagtcttcggcgtcttcaaaggcttcttcttcaccttcagcaatatcttcgtcttcgtcttcatcaataacgatatctgcttcattcatttcaacatcatcttcatcattatctgactcgtctaatgtttcttgatcatctgtttgagcaggaatatcgtcatcttcatcagcgtcgtcatcacctaataatttaaggttttgatcttcttcatcttcgtcatctagaatatcgaatttttgaattgttggtgcgattttttcctcaatatcatctacagagtaccaatcacgtagaccccaaagattttctcctacatttaaaaaacgaccatcagtgtttaaatcggtatagaattgtacgattcgattttcaatatcttcatactcatatccgcctaaagatttaaattcatcaataatatcatataaattcatcgttgtttgtttatcatttaataaagtataggccatatcgatgaatgatttctcatcaaccatttcttttgtgtaatcttgaattttcatataaaaatacttcctttcaaaggattttctttaaattaacgtcaaataatcatttgttaatagtaacaaaaataaattataaatgacaagttgtgatttagcaatcactgttaataattaatatatttttcaaaacgtgtataatcctcagtttcctctattgctacaaaattactattcaagcacaatggttttaattcattacgttcgccatataaagtaattgataaaacttcaatgtcttcaaactgtttacgtatatacgttggtaattggcgtaaagcactttctgcaattccctcattcctatttttcttattaacttcgattgcagaaatattcattttattatcattttgttctagtgcaataaagcctacctttacatcatctttaagcaaattaatcacgtgaatatcatcattatatgtgacttccccctcttttagccttaaagaagatacatgttttgaatctaaatctaaataataaagtctttctttcccaataggtccttcttcttttgtagctgtatgcataaaacctgcacgttcataaacgttccaagcactttggttttcagcgtctactactaagtataaatgtgtaaaatcaggaaataatgcttgaacatactctggtaaaaacatcatcatttttgtcccatatccatggccttgaaacttttcattaactgacaatgaacgtacataaacaacattgtttggtgtatcataaccttcatgttgataataacgatgcaaaacgaagaaccccactacttttccttctttatttaaagctacattagcaattcgattttcatcttttaatgcatcatctaaaacagtttgaggcaatgaagaatatatttgttgtcgttcacttaattcaaattggttaagtgcatctctatatttttcttcaaatacttgaactgtaatatcatcaaaatccttttttataaacattgctttacccctatctattaattaccacttatattatatatgaattgcataattatgactatccgactagttatgtataacattttcccttgctcaacatcattttaccctaattcaactcattacaacctcattttatcaatatctatgtcatcactataatgactaccctatgtttattattaactgtattattaacataagtgtaccttaataagagctttctataaatattcacttgtttttcagttattttactatactataatgagtgacaataattgttatggagtgatagacatatgaagattggaattgatgccggagggactttaattaaaattgtacaagagcatgacaatcgtagatattacagaactgaattaacaactaatatccaaaaagtcatagattggcttaacaatgaagaaatcgaaacattaaagcttacaggtggaaatgctggagtaatagcagatcaaattcatcattcccctgaaatatttgtagagttcgatgcatcatcaaaaggtttagaaattttattggatgaacaaggtcatcaaattgaacattacatttttgctaatgtaggtacaggtacttctttccactattttgatggaaaagaccagcaacgtgttggaggtgtaggtaccggaggcgggatgatacaaggtttaggctatttattgtccaatataacagattataaagaattaacgaatttagctcaaaatggagatcgtgatgccattgatttaaaagtaaaacatatttataaagatactgaaccaccaattcctggagatttaacagcagcaaattttggaaatgtattacatcacttagataatcagtttacatcagctaacaaacttgcctctgcaattggcgtcgttggtgaagttataacaactatggctattacattagcacgtgaatataagactaagcacgttgtatatatcggttcatcatttaataacaatcaattactacgtgaagttgttgaaaattacactgttctaagaggatttaaaccgtactatattgagaatggtgctttttcaggcgctttaggagcactttacctctaatagaaaaatggctggaagcaaattggtatggattgttacttcccttaccatctaacttactttatacgttgaattttttcagtttttagcttcaaacatctttttaatatcaaatttataatgttcgtttataaaaaagcaccccaaaagttaaattaaaatctaactt

SEQ ID NO: 3927 - DNA, 3314 bp, Artificial Sequence
  Description of Artificial Sequence: synthetic nucleic acid sequence
taggtgaaggtgtagacgaatagttagccaaacattcaaattcaatgtattaaagagatttatgcgtctatttctatgtatcaaaagagccgtagataaactttgttctacggctttttatcataagaaataatttttttataggtgataaagtaattagttttgacgtcatattattttgcataacgtgaatctaaaattttgtatatgagtagaatttcatatatgagtgtacttttcatttgattttggtcaaactcatccatctgtttaacagaagactttagtgttgcaatagattttttttgacgtgcaaagcttcctttttgaatgatgtcattaatactattactaatattaatcaatgctatcttctcattagcatcaaaagcaatagacgtatgtttgggtaaataaataatgttagataaatgtgaaataaataaacggttgttataagcgcgatttgtaaggcgatttaataatttccaattatcttcatttttatgataatgaagttcatctctttggtaactcattaatgtttcaactttttgagcaataatatttaattttgataattctttactagtcttttccgagctgaattttcctaataataactcattacagcgttcataaaataaacgatacatttttttctcactaagggctaattgctcttcaagttgatgataatacttaggtggtaagatgataaaattgactaatccagctgtaacaagtcctataagagctgtaagtaaccgtgaaaagaaattgaacacatatgcttcatgtatacctggaatcattgcaacggaagttaatactgcgacagttgttcctacctgtaaattaagtttagtgcatatcagaatggtaaatgtagcacttaaagcataacttaacggtgattgatcaccgaagacatatgtaaagacaacagcaaataacgcaccgataactgttgctggcagccttttataccccttttttaatgatgctttagcagtaggttcaattgtaacaattgcagtaagtatggcaaaaattggagtgaggtttaacaacatacaaaataaagacgtaaaaaaagtagccaaaccagttttaatagttcgcgctccaattatatgtctataccatttatcattcatatcatactgactcctcttaagaaaaggaaattcgaaaagactttactttagacaaattctctttctttgaaaattaatttaattattacgaatcgttatacattcatatttagtatatcaaaaaatttttgctataataagatgtaatataatttataaaggaacgggataaaatgattgttaaaactgatgaagaattacaagcgttaaaagaaataggttacatttgtgcaaaagtcagagatactatgaaagaagctactaaacctggagtgactacccgtgaattagatcatattgccaaagatttatttgaagagcatggggcgatatcagcgcctattcacgatgaaaacttcccaggtcaaacttgcattagtgttaacgaagaggtcgcgcatggaatccctggtaaacgagtaattcgtgaaggtgacctagttaatattgatgtatcagctttaaaaaatgggtactatgctgacactggaatttcatttgttgtagggaaatcagatcaaccacttaaacaaaaggtttgtgacgtagccacaatggcttttgaaaatgctatgaaaaaggtgaaaccaggtacaaaattaagtaatattggaaaagctgttcatgcaactgcacgccaaaatgacttgactgtgattaaaaatttaactggacatggtgttggacaatcacttcatgaggcacctaatcatgtcatgaattattttgatcctaaagataaaacattattaaaagaagggcaagtcattgcagtagaaccattcatatcaacacatgctacatttgtaactgaaggtaaaaatgaatgggcttttgaaactaaagataaaagttatgtcgctcaaattgaacacacggttatagttacaaaagatggtccgttacttacaactaagattgatgattaattaaatattagtaattcaaattagaaattaagattatgatttacttttttcatatctcgtcagactaaagtatgaagcatatatggttccgaagcctatttcattaggtttcggaattgttttataataaagcttaatcagtgacgaggtgatatcattgaatattttagatttatatttacaacaatttataaaacgaattactaaaaaaagtatcaatgactataaaatgtcattagataagcaaattaaaaatattgatacttatattaattatttaagagaaaaaagattacaattaaagaagttaattgacaccctcacgctctcattagaaaataaatatatagatttagtaaacaatcaagcaatctattgtgctgaggaaatacatgataatgatattgatatgattaaatcacaattaaatgatgctgagtcttattatgcgagaattgaagcggatataaatttacaatctagaatgaaaataactactgaagaagcattccactttatatatcatatgagtgctgtagcatagaaaggtggcgaaatatgacacgcaaatatatatcaactgaaatgttgattatttttactgctttaatgattattgctaatttttactatatattttttgaaaaaattggctttttactagtactcctattaggatgtgtacttgtatatgtagggtatgtgtattttcataaagtaagaggactactatctttttggataggaaccttattaattgcttttacacttttgtctaataagtacacgataattattctatttatatttttaatagtagtcatcatacgttatttggtttataagtttagacctttaaaagtgattgctacagatgaagaaatcacatcacccatttttattaagcaaaaatggtttggtgaacaacatacaccagtgtatgtatataaatgggaagacgtacagattcaacacggtataggagacatacacattgatatgacaaaagcggcaaatattaaggaaacaaataccatagttgtgcgtcatattttaggtaaagtacaagtagttgtacctcttaattataatataaatttacatgcgactctcttctacggcactgcttatgtgaacgataaatcttataagattgagaataaccatgttcaaattgaagaaaaaacgaaagatgataattatactgttaatgtttacgtttcat

SEQ ID NO: 3928 - DNA, 3332 bp, Artificial Sequence
  Description of Artificial Sequence: synthetic nucleic acid sequence
ataaacatagtatgatgatagcaaaaagctgacgcctgctaaaaagttagctactggtccaacaggatcccctatattgaatagaaaatttaaaatatttttgatgagtgcaacgataatcccagcaataggacttaagaggaatgttgctaataacgtcggtacatcactaaaatcgagagttagatacggtggtataaatggcaatggaaacttgatgaaagttaacacaaacgctaccgcacttaacatactaattgtaatcaaacgtttgttttgttgcatatataattttctccttccattcatcttacttagaaaaggaggaaatttgaacaacaaaaaacctccatcttctcccatccagactatactgtcggcttcagactctcactgaatcaagacaaagcaaaaattaatacgttgtcgtcgcaggcttagattactgccggttgggaattacaccctaccccgaagatgaatatatcaattttattttaaatttatattacatgattagttttaaaaactcaatatttctgcttacggttaatataatgttttgacattaataacaaaatatgaaatcaatatataacatgaatttaagttttaacacataaaatatttacaaataaataaataggctttattgattctgaaattatgtctttaaacttgtagaagttattcaaataaaatgataattaaatttatgttcaatttagttatctactgattatatacaaaaaaacgcctgagacatcactctgagtcgcaggcgtttttcatatattatttttgatgtattgcgttataatttctctgttttcaaaagaatcattgaaactgacaatttatgatacttttcagtttctaactaatttgttttgatttaggtagtctaataataaatgaagtacctttgcctaattcgctctcaacatcaatacgtcccccgtgttcttcaataatcattttacaaatgaaaagtcctaatccggtgccttgcttacctctttttcgagcagcgtccactttataaaaacggtcaaatacttgtttcagatgttccggtgctataccagtgcctgtatcagttattgttaaaatattgaaatctgaatcttcatcaatagaaatctttatagaatcaccagcttgtgtatatcttgttgcgttatcaattaaattagttaacacttggtccattctatccatatcatagttccataattgttcgtcattattagaatcaaacgtcattgttaaacctaattcttcactttgcatgcgatatttagactccattttatcaagaaggtgttgaataggttgtaattccttctcaactgataatccttcagcatccatacgagctacatttagtaattcattgactaaacgattaagtcgcttagattcatctaaaacgattgctaatgagtcacgtatttcatctggttcggtaactataccgtctactatggactcagtgtaaccctgtaataaagagattggcgtacgtaattcatgtgatacatttgctataaaatcttttttcatttgatcaagattatgttcatttgtcatatcacggatgaccatgacaataccacttctaccatttgtttgaattctatctatataactggagataaatacatagtaccttgtattaatttctaattctaaatactcattctgttgtgattcaaatgttgcttcaatttgctgttcaatagattcttttgaaaaatcatcaatgtgacgcataatatcatcagccatcttgttcgacaatatgatttcacgttgattattaatgcctagaacgccttctaccatagagtttaataatgtatctcttatattcttagatgaagaaattgctttgatatgttcttgaatttctacgttcatgttgttaaatgcacgtgataaatcacctatttcatctttagtagcgacagttgaaatttgactataatccccttcagaaactttttgtgcttgtgtttttaattgacgtaagggtttcgttattctattagataaaaagaatgcaaatattgtgcttgctatagtaaatataatagcagttattaatataataattgtaatagcattatttgtatcttcgatagatttcaaatctttatatataaaaacaccactataatgactttgagcacctttttgagctttcattgggtatcctagcaaaagataagattgagaattacctttattttttattgtaatattttgagtttcatactcaccttctttaaacacttttttaaatttagtactcttttttatttcattaaacatttgttttttagtgtctttatacgatgagtctggtttctcgctcatgtctttcataataatgaggccacccggtccatcaccatcaatgagtgtttggctattttacagcaggtttagctatagaacaacttgaaaaatcaggtatgtctattgaaggtaaagaagtgcttgtacgaggtgccactggaggcgtcggaacgatttcattactcatgttaaataacttagggtatgatgttattgcaagtacgggtagagatgacgccgaagaaaaacttaaaaagcttggtgctaaagaagtaattggccgtttaccagaagataatagtaaaccattagagaagagaacatggcaggcagccattgatccagttggtggtgaaaacttaccgtacatcgtcaaacgattggataacaacggaagtgttgcattaattggcatgactggtggtaacaattttgaaacaaccgtctttcctttcattttaagaggagcaagtataattggtatcgattcagtatttactccaattaaactaagaaaacgtgtttggagaagacttgcaaaagacttaaaaccacaacaattacatgacatcaaacatgttatttcattcgatgaaatcccaaaagccatcgatcaagtcatcaatcataataatactggacgtattgtcattgatttcaatgtttaaataactaaaaaacgtcattggatgcaaaagcaaatgcattttatgacgtttttactttaatatttgatatacataccttttgaataaggctcagtacttttaaacccaaacttctcgtataattgatctgccggataatctgctatcaagctcacatatgtaccttcttcagcaacactctcaatatacttcattatttcatgcataattgtcattccatgacccaaaccttgatatatatctttcacagcaatatcgacgatttggaaaactgtaccaccatccccaatcactcgcccc

SEQ ID NO: 3929 - DNA, 4045 bp, Artificial Sequence
  Description of Artificial Sequence: synthetic nucleic acid sequence
tatcggattcaagttggtccacttcgccttctttcagtgaagcttcggttagttcctctaattgaaatttcattaagtctaatcgttgtaataaagcctggtccgcggattctaattcctctaattctttacgtttatttttatattggttataagaaagttgatattgattaagtaaatctgaatactgattgtctgcataatcatctaatagttgaagatgatatttttgcttaagtaaagattgcgtttcatgttgaccatgaatatcaagcagttcttgcatcacttttcttaagtcctgtagagtgacagtttggttattaatacgacaaatactcttaccagaactgaaaatttctcttttaactaataaaaaatcttcatcaacatctatagctaatgattctagtatattaattgcgtctttactctcgtctatatcaaagataccttcgataattgctttcttttcaccatgtctgacgtaatcagaagaagctctcataccgattaactgtccaatggcatcaataatgatagattttcctgagccagtttcaccactcataactgttagaccgtcagaaaagtttatatcaagttcgtcaataatggcaaattgttttattgataaggtttgtaacataaattcatcgcatccttataataaattgaaaattcgagttttgatttcttcactcgcttcttcgtctcgacaaataagtaagcatgtatcatcaccacaaattgtaccaagtacctcatcccaatcaatttgatcaagtatagcaccaatggattgagcattaccaggaagcgttttaagaactagtagattaccagtaccctcaatgtttacaaatgaatccattaaatatctacccaacttctctaatggatgatatctacgatcatttggtaaactataaacatattgccctgtaggtgcaggaactttaattaattgcaattctttaatatctcgtgaaacagtagcttgtgtaacatttaaatcatactcattcaaacgtttaactagttcatcttgtgtttctatttgttcatttgaaattatctctcttatttttatatgtctcactgacttttttggcacaattaacacctcaaattacgaatatttatacattgattttaacacatggagttctgaactactactaaacactattttgaaattgtaaagttaaaatatctaacgagcactatatcagtatttattacaaaatcattttcctaattaataatactaaaataagtgtttagaaataaaaatgtgaataattcttgtatataaattgaagaattaaaaaagattgcctcatagataagctatgaagacaacctatagatataaatgcgttataacgttaaaatagacattctaaatatagtatatttttttataaattaatggtctctgttatagaataaatctacaatatcacttaattcagaagtatcatattgatcagaaatttgatttaagcagttcatagcaagatattgatgattgtttaacttttcttctgctccttcttttccaagtaaagaaacataagtacttttatgatttactatatcactgcctacttttttgccaagttttgattcatcaccatacacatccagtaaatcatctttaatttgaaacatcattcctaaatgatgactaaattcatctaaattcttagcaatattttgttctacttgagcaatgtctaccgcagccataactgaaaaatttagtaaagcgcctgtcttagtttcatgaattgattctaaagtttctaaacgaattgacttcccttcactttccatatcaagcgcttggccacccaccattcccaaatgtccacttgcttttgaaagtctttttataatacttactttcacactatcttcaatggtagtatcattagaaactaattcaaaagcttttgttaataatgcatcaccagcaagaatggctttccattcaccataaactttatgatttgttaattttcctctacggtaatcgtcattatccattgctggtaaatcatcatgaattaaagaataagtatgaatcatttccaatgctaaagcactatttagtccttgttgataatctttgttaagcatttttagtgttaataataatatgactggtctgattcttttaccaccagcatttaatgaatatttcatactttcttctaaattagtttttaatggtgatgattgtattgacttattcagtgatgtattaattatatttattaatttattcatctgtagtttcttcatttcctttatcaccaacttcttcttgcattaattcattcacttttttctctgcttcttttaaagttgaatcacaattagcagatagtttcataccacgttggtataaatcgagggattcttctaaagaaactgcttcattatccaatttttgaacgatattttcaagttctttcatcatttcttcgaaactttgcttttctttactcatcattacaccttactttcttaaccgttgcatcgacacttccgtctttcattgttaaagatatttggtcgttttcattcaatttatgtgtgcttgtaaccacttcattgtctttattgacaattgcgtaccctctaagcatcgtattggtggggcttaaattattaagactttctaatttgttttttagcactgtttttaaattagtaatgttattggacattattttggacaatctagaatgcaattgataaatagattgcttttcctgagtaatctgctgatttaaatttttaaaattaaaactttgttgaagtaacttgaggtgatgttttgacttttcaactttagtatttaatagatgatttaattgtctttctaattcatctcgtttttgaatttgttgatcgtacaataaactcggttgcttaaatttgtaatatgatgatatgtgattaagttgtttcttctgatgttcgatatattgttttatatatcttgataatgtatattcatactgtttaatttgttgtaataactcatattgatcaggtgttgctataacagcagcttgagtaggtgtcgcagctctaacatctgctacaaaatcgctcaatgtaaaatcagtctcatgacctacagctgatataataggtgtttgacaattaaagatggttttaacaacatcttcttcattaaagttccacaaatcttcaattgaaccaccaccacgtccaactattattgtatcaacatctaatgaatcagcatattgaatcttttctattatatcttgtctagcttgcgtgccttgaacaagggtactgatttgaatttgttcgaccaaagggtagcgattgttaatcgtactatgtatgtctctaatggctgcacctgtgctcgctgttaaaaccgctattttctttggatactttggtatgagttttttgttactttgatcaaaatagccttcttttttcaatttcttttttagtagttcaagcttttggtataaattaccaataccatcgagttgcatcttattaacatatatttgataatttcctcgtctttcataaacagaaacgcgagcttcaattaaaacctcatcaccttctttaggctcaaagcctaacttagaagcatttcctttaaacatcattccactgatgacactttctttgtccttgacattaaaatataaatgtccgcttgaatgctttttaaagttagataattctcctttaataagaactgactgtagatgaggatcttggtcaaatttatattttatatatttagttagtgcagaaacacttaaatattcagtcatagttatcactcattttaatcatttatattacttaaaacaccattaacaaatttataatgatcatcatcactaaactgttttgtgagttctacagcttcattaacaactacttttttaggtgtgtcgctgtgcaatatttcaaaagttgccattcttaaaataatacgatctgatttcagtaaacgatcgataga

SEQ ID NO: 3930 - DNA, 3511 bp, Artificial Sequence
  Description of Artificial Sequence: synthetic nucleic acid sequence
gtactctattgcttcggttgcttgatttggcaaatgtgctaaagtaagtcgttgtttttttgtgaataatggatcatgtttaactaaacgttgccaggcatgatagaatcctttttctctttttggcatagtccaacttgattgaaagtcatcaacatataatttagaccacttaatcatatgagcatttaaaatatcaataagtcgtgtaccttcctttgtgaaaacactagcactttgcgctatcacatcttcttttttcttataatccttaaaattagtttgtacccatttttccagtttctcgttatcttttgtattaaagtaaccttcttcaatcgtttttaaatttttcgctctttgaatatatgtgttgatatcactgtcagatagtgacctattattataatgcgcacgattttcatccaaccgttcttcaaatacttttaaatctatttctttattactaatcgctctgtgaatagtagacgcattaggataaatgtcaacatccctcacactttttaaccaacgtgccacttgatcaaacgaagcatcttctagcccctcccacggattacgggcagcaaatgttgaaatcggtgataaaggtgtaattacacgattaataaactcaagtgcatcttctacttcatgagcgtcttgttgcacaccataaggtaatttcactgctataaatttacagttacgtccctcttctttcaattcatttactgctaattgtgctaacttacctgttagagtagagtcttgaccacctgatattccaagaacaagagtttgtataaatgaatgtgattttacatacgctttaataaattgcttaatttcctggatttcctctacactgtcaatttgtttttttactttcatttcattaaccacaacatcttgcaatctactcattttcatcctccatctctttaacgtgttcagcaacttcaaaaatacgcttatgcttattttcccaacatttagtgcttaaatctactggataatcttgcgggttaagatatcgtttattttcttcccataaaatacttaaattatttttaagatagtcctgagcttcatattcatctggaagatggtatacaagtttgccattttcaaatatagattgatgtagattaaccgctttaaatgatttaataaacttcattttgtaagtgtgaacaggatggaacattttcaatggagattcgtcattaggattttcaccttctagcgtaatatagtcgccctcagccttgcctgttttattattaataatacgataaacattttttttgcctggtgtagtaactttctcagcattatttgataatttaatgcgatcactcattgtgccatcatctgtttcaatagaaaccaatttataaactgcacctaaggctggttgatcatatcctgtaatcagttttgtacctactccccatccgtcaactttagcgccttgtgcttttaaacttgtaatagtctgctcatccaaatcatttgatgcgataattttagcttctgtaaaaccagcctcatctaacattctacgagcttctttagataggtacgcaatatcaccagaatctaatctgatacctataaaattaatagtatctcctaactcttttgcaaccttaattgcggttggtactcctgattttaaagtatgaaaagtatcaactaagaacacacaatttttatgtcgctcagcatactttttgaatgctatatactcatcaccatatgtttgtactagtgcgtgtgcatgtgtgccagatacaggtatattaaaaagttttcctgctctaacattacttgtagaatcaaaccctccaataaaggctgctctagcgccccacagtgcagcatcgatctcttgagctcttcttgtaccaaattccatcaaagtgtcatgagttgctatttgacgaattcggctggctttagttgcaattaatgtttggaaattaatgatatttaacaaaatagtttcaataagttgcgcttggattaaaggtgcttcaactcttaataatggctcattaccaaaacaaatttcaccttcttgcatagatttaatattccctgtaaatttcaaatcttttaggtaatttagaaaatcttcttcataacctatcgattttaaatatgtgatatcttcatttgtaaacccaaagttttcgatgaaattcacaacgcgtttcaatccgttgaataccgcatatccactattaaatggcatttttcgaaaatacaaatcaaacactgctattctttcatggataccatcattccagtagctttcagccatattaatttgatataaatcattgtgtaacattaagctatcgtcgttatattggtacactttaacctctccaatcgacttaaatatttacaattattttatcataattcatatatagtaggtacttgcatgtttgatttacatttatttcctaataaattctaatatagtgtcgacaaatttatgacaattacctatattattcaagaaacagtatatgctcacgtataatgacgattgaggtgttttaaatgctaatagataaagcaagatcatttattcagaccatgtatagcgaattaaaatataatactaatgaaattgaaaatagaatgaaagagattgagcaagaaattaacttgactggtagttacacacatacttatgaagaattatcttacggtgcaaaaatggcatggagaaactcaaatcgttgtattggtagactgttttggaattctttaaatgttaaagatgcccgagatgtatgtgacgaaaaagaatttataaaatttatacatacacatattaaagaagctactaacggcggaaaaatcaaaccatatattacaatttttagtcctgaagatacacctaaaatttataataatcagttgattcgttatgctggttatgaaaatgttggcgatccatctgaaaaaaaggttactcgtttagctgaacatctaggttggaaaggtaaaggttcaaattttgatattttacctctgatttatcaattgcctaacgacactataaaaatacacgaacttccaaatgatattgtaaaagaagtttctatacatcatgaacactatcccaagctttcaaaattaggtttaaaatggtatgcggtacctattatttcaaatatggatttaaaaatcggtggtattacttaccctacagcaccttttaatggatggtatatggtaaccgaaattgctgtacgtaatttcacagacacctatcgttataatcttttagaaaaagttgcagaagcttttgaatttgatacacttaaaaataattcatttaataaagatcgagcactcgtagagttaaatcatgctgtgtatcattcatttaaagctgatggtgtttctattgttgaccacttaactgcagcgaagcaatttgaaatgtttgaacgaaatgaacatcaacaaaacagaaatgtta

SEQ ID NO: 3931 - DNA, 3784 bp, Artificial Sequence
  Description of Artificial Sequence: synthetic nucleic acid sequence
ttgcttatcaccatagacttttgacaactgtcttacctctaatatcgacaaataatcactcctgtcatacttcaaccaaattatctttttacgaagacaaacttaatgtagactatcatatcttctttaatttacatcttttattatatcgattatttattacaattgtgataatagtaagtaacaaaacgcacgtttaaaatgacaatcttgtcactttagacatgcgctcaatgatttcattttgttgtgggaaaatgaaataaaacgttgttcctttccccactattgaatcaactttaacttcaatcccaagttgttctttcacgctttgtacaaggtataatcccataccagaagacgcagtatcgttgcggtctgttgtagaagtaaatcctctatcaaatatacgtggtaaatctcttttactaattccacgaccgtagtctttaatttttaaaacaacgtgtccttctatgttataaccacttaaatttattgtagaattatcactatatttcaaagagttagatagaacttgcctaatcatcatacggcaccatttaacatctgtataaaccttttgttcgtctttaaaatctaattcaaaacctatcccttttgcctgactgatatgtcgagtaacttgtatttcatctataaccattctctttaatgaaatataatcaaaatacatatcacgatgatgtgtttcaagccttgttaaatataattgcttatctaacatctcattaatacgagaccattcaaataataacgctcgcttacgctgatcatcattctcttgatctatcaataatttcatagccgtaacaggtgtttttatatcatgaacaaactctgtaattgtttgttcatgatttttaatttgtaattgttgttcgactactttctctttttgagcggctatatgacgatacagataatctatgacttgttgttgaaatggggtttctgccaaatctttatgcttaatttcttcaatttctttatcttcataaaaatgtttagatagacggacttctttaacaaacgtaaataataagaaaagtatactcaatcctacgtttaatatcactatataaaatacactttcaactgaaatctcataatctatgtaggcaacacctaataaaataatgttgagaaataatatccacaatatccaattaatacgagattttataaaaaaccaaaaccatcgaaaattattcatgagctaagtatcctttaccaactttggtttcaattgcactatccatgtcaatttctgataatttttttcttaatctattaacattaactgttaaagtattatcactaacaaaagcttcatcatcccacaaagcagtaatgagagtgtctcgtgtcacgatttgattacgtttattgattaacatctctaaaataatcatctctgttttagacaaaaagatagttttatcatctttttgaatactatcttttgataaatccacagtagcgtcttgccaacttaacgttctcttttcttcaactccaaattcataaacgcgtctataaatagcttgtagcttagcaattaagacgtttgtataaaatggtttttgcatataatcatctgcaccaagttccatactcatcacttgatccattggattatctcttgatgataaaaataaaataggaacgttcgactgttgtctcatttttcgacaccaataaaacccatcgtatttcggtaattgaacatccaaaataactatttctggattaaatgtttcaaatgtctccatcacatgactaaaatcttcgacaccaacgacattaaaatcccattgttctaattccttttttaattcttgaaaaagcgtattatcgtcttcgactaataatatttgcataacgaatcacctaatatattatttagtatatttaatcttctcacctgattgaatgcgaccttgataatgcttaattctacaatcaatttcaaaacctctcataagaagtccttgaatcggtgcttgtatgaaatagtaaattggccaaaataatctagggatataatcgtataaatgaaccataattaaacgtgttcctttaagaagtctaaattctaattttgcttgcttctttgatttaggtttcatcaatttaccatcaacaagatgtaatgtaattatatcttctgttgtattaaccattttgaaaatagctaaaggtcttttaatgttcctattgtaaatgatgtagtgatgatcttgtttttgagtatgtacaaaagttccttttgtctcatctaaccacctactaaaatagtctacaagttgattgagcgtccatttctttggtaaaatcatcttcatcgctgttcgaacatcatcatatttagctgtttgtaattctacgttaatatgaggacgtttcacttcaacatccgtacaatcaactggtacgccataagcgcctaaacgttcaatagcttcattatcatgacggctccccggaatatacacaatctttttcagcttatttattgatgcagctctaccaaagttatctgccgctataaagtttaaatctcgtgctgttgcatgtgttaatttagcagaatgtttagttggatctaaataatataccgcaatgtctatacctttcatagcttcaactacatctttatgattatatatatcgcgttttaaccatgtgattttgttcgtagatcctttgtcaggtttgggatatttagataaagcaaataattgagcatcatgttcaatgactcgacttaaatatctaccaatatagccggtgccacctgctaacaatactttaggcttcataaatatcaactcctaaactttcttttagataatttcatatcaagcgtaattatgtaaagtgtactataataaggaagacaattgatttaacaaaacaggagtgttgatatgacacatctcattcgtgaaattagtattaaagacgttgaaaactttatcagcctattaagccaaatatatgatgaatcagaatttacattctacaatccaggtgaatattcaccaacgatatcttccgcaagtcaacacttagaaaaatacatcacctcacctaccaaagcaatatatgtcgctgaaagtgatgagcaacttgttggatacgtatttgttaatactgaaacttatgaacgtacacagcacgaagctgtggtgtaccttggtgttagagaatattaccaacatcaaggtattggacaagcacttatcaatagaattgaagcatgggctttaaatcatcatattcgacgtattgaagctacggttgttactgaaaacattaacgcaatagaattgtttaaaggcatgggctttcaaatcgaaggtgaacttaaagataagctttttataaaccaaaaatattataacgaatatgtaatggctaaaatattaaattaactaagtatgtcactataaattttaccacatatttaaaatattaaataatatcatcatacgtctctcatattgaggcgtatttaaattatctttactacttataagtttaagattatttattctttacttattatgaatctactgcatcatcacttcgtatatctttgaattattcttaaattactttaattttaaaatcaaatttatactgtttaattataaaaacgcaccccaaaagctaaaatttagtctagcttttggggtgcacaatattgtcttgagcattttaatatgctttcagtcgatgactggattaaaaatgt

SEQ ID NO: 3932 - DNA, 2918 bp, Artificial Sequence
  Description of Artificial Sequence: synthetic nucleic acid sequence
ggtgtcaagtggattactgacaaatcacaagttgaaggtgaggaggctaaagcatactggctatgttgggtgacgaccgaacgtagtgaagaagggccatattatgcgggtgtgactgcatgctatttattagttaacaaaagtattagacgtggttataagagcatgccagaacatgttaatatgatggataagtctatgaaacatcaatttatcatcgaccaaatcggtgatgataacaaacaaattttaaaagaatttctacaaaatcataacgttgaaatgtggaataattctagtgaagaactatatcgagcatttgaatagaataaaaggataggtgactgttttatgtagaatgactgtccctatccttttttgatgtgcaaaatttaaatgaataaaactaatttattgaagtatatttcctatatgatatgtttgatagagttgttgtaatacctcgttatgaattacttgaaacggttgttttgtagttttagctattttcttcaaatcttcatactcgggtttcattttcataatttttccattttgtaggccaaatttaatggaaacagtgccgtgttgtgtagaaagaattttgaatgcgcggttcaaggtctttctattaacagaagtacttctgacgcctaaagaacttgtttcttgtaagataagttgttcgaaatatgtcttatcatgtaatttacatattaacgttaactgcgtgcttgggcgactttttttcataaatataggcgtatagtaagcatctaaagcaccttgctctaacgcattattcataaaataacctaatgcttcaggtgtcatatcatctatttgacactctattacttggacgctatcttgttgctcgaattcagattcaaattgaataacccttaatatattagggaaatcaaaatccttactgccggcgccatagcctatatgttgtattgttgctgaaggaaatggcccaaacgatgaaacaagtcccttagcaaatgcagcaccagtaggggttgtgagttcactttgaacatcaaaatgtgcgattggtatacctttaagaatttcagcagtagctggtgcagggattggataaatgccatgagcaatattgattttaccatgacctgttggaatagctgaacagtataatgtgttaatccctagttgttctagtgcaatacacccaccaataatatctataatagagtccattgcccccacttcatgaaagtgaacttcttcaaacgacatgccatgaattttagcttctgcttgaccaatgatttcaaaaattttcttactgcgatatttaaccctttccggaagtgtactgtcatctatcattttaaatatatcattaacgtgacgatgatgatttgcttctttaacatcaatgtttaatgtcattgcatgaataccttgttttactcttttttgaaaatgtagcttaaattgatctaaaggtaatttttttagttctgattcaatgtcttcagggtttgctcctaaatcaactaaagcagaaagtagcatatctccggcaatacctgcgtggcaatctaaatataatgcttttgtcataaagatacctcactctctttattttctagcatatgaataatctgtgcagcgttgtaaccgccaccaaatccattattgatatttaatacgctggttccgggtgcgcaactatttatcattgataatagggtggtaaccccattcaagtttgctccataacctacactcgttggtactgcatatacagggtggttgactaatcctccaacaacacttgctaaagcgccttccattccagctataacgatagaaactttccctctgcgtatatcatgaatgttggataataagcgatgaatacctgaaaccccgacatcataaaatcgttttacacttactcccatgatttcagcggttaatgcagcttcttctgcaataggtaaatcagaagttccagcacaaagtacagaaacatagtatttagattgtggtatatcttttagtggagtgctaattaactgtgcagtttgatgatattccaagtttggataatgttgtaaaatgtattttgctttcatttcatcaacacgtgtcactagaataacttcattatgaaatatcaaactagagatgattttagtgatttgttcttttgtttttccttgcccaaagataacttcgggaaatccttgacgctgtgctctatgtaagtcaattttagcaaagcccaattcgtcataatgactgagttgggctttagcatcattaatagatagttgatttgattttacagctttgagcacctcttctatagaattataactatggctcataggtactcacatccttatttaaaacttgtagatttggtatcaatgatttcattcatactacctgtacgatagccttctaaatccattgttacatagtcaaatcctaattctttcaaatgtaatatgatactgtctttcaatttaagaagattatttaattgatcttctgttacttcaatgcgtgctatgttgtgatgatagcgtactcgtacgtggttaatacctaggcttaaaatgaatttttctgcttcgttgaccttgttaacttttgtaaaacttaattcctcaccataaggtattcttgatgctagactacataaggctggtttattccatacaggcaagtcatgttgatgacttaattctctaacttcagatttatatagttttgcttcttgtaaaacgctacgaacaccaaagtcgtctcttgcttttaatccgggacgaaaatcatctaagtcatccataatcataccatctagcacataattaaatcctagtttattcttaatattctcaagttgactatacatcaagcgcttgcta

SEQ ID NO: 3933 - DNA, 3756 bp, Artificial Sequence
  Description of Artificial Sequence: synthetic nucleic acid sequence
tggcatcgccacaccaatcctctttaattataagcaccttataataattcgattctcttaattgatttaaacgtgcatcattaagtggtaggtggaagaaattataaatggataataaattgtctttactttcttgtattttattaatgaattcattgagtgtttgacttttattaaaataagtttctaaatttcttatataaaacccctcccttgaataatttaaaatgttatatcaattttttgagtttaaagaaattaaaataacttaatatatgtatattaaataatgtgactatcttgttagatgaaactacattgtgcatatgctatattaattagaacaagagtgaaagtggtgactcaggtgcgaattcaaagtagatggttaatattcgctatttttttaactggagctatttctttattgataggtttgacttattacaaaagtataaaatctgtggatttatctggttacagtgtgaatcaaattagtttaaatcatggttttaatcaaaaaggatttgtggttaataagaaaattaaattagatagatataccttttacaatgataaaaatcataaagattttacagtaaaagtaaaaaataaaacgcataaggttaaaggcatggttttagtcaaagatgataaagttgaaacaaattttggtattaaaatgggtgactcaattgataaagtcatcaataaattgggagaaaactacaagattaataaagtagggaaaaattatcactcaatgacttatgtagaccgttttaataaattaaaattaaacattttatataaagataacattgttaaaagaattgagttctttagtaaataataatcaaaaagtattagatattttttagttcagattgagagcgtgcgtaaatatggataaaataaccttcttaaatgaattagaattagctttagatgatttacctagagaagaaaaagatagtattatgcacaagtatgaaaacttgttctatgaagaagaattgaaagggattagtgaatcacaaattataaaaaagttaaatgatccttatcatatttccaaagaagtaaaagctagaagtgctattcattatgctagttacaaaccaaccttagcaaacatagtaagagcaatactagcatcgttaagtcttggtattttgtcgttatttattattttaataccggttgttatcattgcattacttattctattctgtttccttatttctatttgttttatctttgcaccatttgttttattattttattcagtattacatggtttcgaaaatgctataagcaatgtgtttttttcaatttcttttacaggtttaggaattatgtttattgttattactttgaaaattggtgaaataattcataaacttattttgaaatatcttctttggtatataaaaactgttaaaggaagcgttaaagaatgaaaaagctttttattagtggtttaatcatatttattattttctttgctagtggtgctatgacttggtttactatagataaaaataaatacgataatcgacattataccaaaacaataaatagcaaaattgaacatttatctataagtacagtaacaaccaatgttaatgtaatttctggaaaaaaattagctgtttattttactggagataataaaataaatgttacaaaaaataataaaaggttaagtattaaagaaaaacgtgcagtagatagaggatatggattaaattttaatccatttcactcaaacaatagaaagttaacaattgttgtaccagaaaaagaccttaaatctcttaatattcaatcgttattgggagaaattgatttaaatcaagtgaatttgaaacatgtttcattggaaacagatagaattatacaacttaaacgatctgaactcaatcaggtaaacatcgaatcttctaaagcaaatttttatattacagactgtttaatcagggaaggtcgtatgaagcttgataagggtataactcatgttaaaaatagtacattaagtgatactgttttcttggttaatagaggagatatttctatgacggacatgaaatctaacaatgatataaaagcttctacacaaagaggtaatattaattatcattttggcgaaaaacctaaaaacactttgcttaaacttcatcctggtcatggaaataaagaaattaaaaatcgatatttcgataaaggaaaagtgggaaatagcgataatatattggaattttacactgtagatggcgatattaaaattgaataaataatataaattattcgaccctttgatttatcaagatagggtcgaatttttaattagtatgtggcaaaagttaatggtgtatctatttcgccttcaaagtaatttatattcaatttctttccttttaaccaattagaaaaattgattgaggttggatgactgttttgacctaatgccatccatgatattaatgaattaggttcatatagtgaagtatgaattgtaccagaccaacttttaaataggttgctatagatttcgtattgcgggtcgttaaataatttgaatgcgatatctttgtttgtagaaggagttgttttatttattacacgatttaagcgttctttagattctcttgtatagtttctattttcatgggtaagcaattcaaaatgatttgtgcatatatgttcataccttacatctattgatcgaggtgtaacttcgacaatggcataattcgaatgtctatccattagtatataactgaatgaactacgatgcggtacttcctttaaaaatttgattgcttcagttacatttttgcaattttcaagtattagccgaccaaccatgtaacatacaaatccatttgcaggctttttacgatgcataaaattatatgccataactaaaccatactcgttcataccatccattctaccagtcactcttgaagtcggtcctatttgagataatcccccgtcattaggttgaaataataagtatctaccatcatatgttgcaggatgataatcataatttcggactaaaaaatcacgacctttatatactgtgcaaccactgtcctttaaatcagtaaatcgataatggccaaaatttaaaatcatttgttttgtaggtagattcaatacatcttgcataccaattatttcttcccaaatctgtggcgaatagatttgaaatatatcataggtttccttgacatcaatatcaaaacgtggaattctctttcgccattctttatttcgattttttaataaaggagtggtttgtaaccaaagagcagtctttactcctaaatcatagtgagaaccacgatgagtcattatatcagaacgtactttttgcattttataatctctccttatatttttacttcaatgtaatataaaagtaacttattattaattgaacttgatttgcgtaaatcatacaatctaaattaagataatgacattatctcaataggagtgatcattctgaatattgataattacaaagtaatcactgataaattaaaatcttggttgctaagttaatctgtgtgtgtaccatgattaaagaaatcatttaattgtttcattttaagcatctttagttgatatattatcataatttatattcatatttagaataattacctgtaaaaagggtatatatttaatgataaagttaagtatgttatcattatgaaatgtagctatgcatattaatta

SEQ ID NO: 3934 - DNA, 3830 bp, Artificial Sequence
  Description of Artificial Sequence: synthetic nucleic acid sequence
tatacgctttcaaaaaaatttttaaaggattatccatcgaaaatttaatagaatttgattaaattgttgttaattcttttgaaaaatcattaaaacagcgcatggttagtgcattatgacaatttatttaaaactatatttacatttattgaaaatatttttaattataatttaactgtcgatttcaaaccctaaatcttcaatcatgcgataatcttcctcattcggttgaccgcctgtaattaagtaatctcctacaaaaattgaattagccgctttcaatgcgagtggttgtaatgaacgtagatttacctcccgtccacctgcaattcgaatttcttttgttggattgattaacctaaacatcgctataattcttaaacatttcattggtgacaataaatctaatccaccaaatttagttcctttaataggatgtaaaaaattaataggaatgctatcagcatcgatggctcttaaagcaaatgccatatcaataatgtcctcattcgactctcccataccacatatcacacctgaacaaggagaaatattattatctttcatcatttcaaccgtattcactctatcctcatatgtatgtgtagttactacttcatcgtgataacgctcactcgtatttaaattatgattataacgatcgacaccagcagcctttaattttttagcctgttcttctttcgttaatcctaagcacgcacaaatctttagttgtgggtgtatctttttaatatcttctactgtttcgcaaatatgatcgacttctctgttactaggacctctaccactcataacaatacagtatgtaccgatttgattttcagttgccacttgagcgccttctttaatttggtcctgttcaacaagtgcataacgttgcttttctttcatttttacagattgcccacagtacccacaattttctgcacagataccacttttagcatttaatatcatattaagcttaacttttttaccatagtaatgttttctcactgtgtaggcttcatttaataaatcaaatgtatcaatttcagcattttcgaaaatagatattgcttcatcttttgttaatgactcttgatttaacacacgttgagctaggtttaatgtcataatctttaactcctttttcttaaaaattagcattttcaaatcattcgattgcacattgtaaacttttcgatattataagtttacattaatctagatacgattgaaaatatttataaaaaaaaggatggaacaacgcgtacattgtttcatcctcgcaatggtataacacggaattaaagtactccatgtaaatataactttattaattattaaagtgtctgcacacaatacaataattatgtgtaaaactttcttttactaatagaaatttagtatttaatgtcaggaattattttacttcacccgttttaggattaaattgtttaattgatgactttcgtagttcatccttttcattcttacttatttcgtattgattatgataaagtgtcgattcccaacttccatacattggatttgggaaaataatatactttttgccaaaatcttttgcatgcttctgtacgagtttctcacgttctttagcagtagattttttaggatctgtaaaatctaacaaattgtcaccaaataacatcactaacttatgatttttttcgacttgttgacgtcgcgatgctttacttttatcgtttttcccttttagtaaaatatgattatctttcgcttgcggtagtccaatattttttaaattttcctttgtagctttaaaatctttttccttatcacggtccgaaatatagtaaatatcgataccttttttgtcagcatattttaagaatgatttggcgccataaacaggttttgccttcgctgcagcaacccattcatgccatccttctggaaaagacgtatcgtgcatagaagcatatccttgatatggtgaattatcaagaactgtttcatctaagtctaaagctatagcaagttttttcttacctttatcctttttaatatgttcatctaactgatattttgcagtattgtatccctgtagataaagtgccttcgcttcggcagaattttgataccatgagacagccattacattttgttcaccaaggttggggtcattttgatgttgtgtcgtttgattatggttatctttagtatgagattcacatgcatatgtatgaattggtgctgaaattgtaactgtcgatgctaatgtagctattgcaatgtactttgataatttattcattgattcacctcattaaaataattgaaaattacaaattttagtatatagtaattttattacaaaatgaatcataaattttttcaaaaaattacatatcaattaaaatatcaaaactcatcgtaaaattgcatatgcgtcttctcacatttataatattccattctatcttttaatgttccagtatgtaattcaattttatgcccatccagatctgtaaaatatatcgattttttgtctttaatgtctcttggtcgcccttttaaaatatttacttgattctctttaagccattgaatccactgttgaaaatcttcttcatctatggagaaagcaacgtgcgtataggaatgacttatttcattccttggtatatttttttctagattcagtgcaatccaagtatgaccaatagttaaatatgctgtcgttctatctgatactaataagtcaccatgtaaaatatctttataaaattgtatagaggtatttaaatcactcactgaaaaacaaatatgattaacatttgttatttccatttatacactccttgtattagtgacattaacatttaatctcatgcgtaaaaaacctgtaaccaaacgaatgatcacaggatgttctgatatatgattgaataattaatttaaatagtgatccacgtgttcaagtctatagtgtgaatctttcgctttctcatcttcaaattcctttttagttaatggagataaatgttcaatcttgtaatgtaattttttcgcaaacgcttcaacttcatcttgattatcagctgttacgaacatcgttaatacattatcatcaacaatatctttatggtgttgataattcaacttatacactttcatcttactgttcctcctattatactaatatgccctttttactttgaatgaccttcaatttaattagaataatccactgttagcttaaatttcatgtaagttgtggtttattgtaagagatgtttctaaatataataaagaacaagtaattaatcaatataattttacaagtattttgagaattcactaataatataaagaagttaatacggtttattcaactaacatacctcttacattttgattctaatctaccttcattatttaaaatgtgttaaattcactttaattgaattttctaaattctttaaagttggttttaacttaaacataaaccttttttgacaaatttcacactattcaaattcaatgttaataaaaagttcattgatttattaataaaaaattacaatttttgagttaagttgaaaactacaaggaaacgcttacaataaaattgtaattcattcacaaggagttgttattgatgaaaaatttacgtaacagaagctttttaactttattagacttttcacgacaagaggtagaatttttattaacactctccgaagatttgaagcgtgccaaatatatcggcactgaaaagcctatgctaaaaaataaaaatatcgcgcttctttttgaaaaagattccactagaacacgtt

SEQ ID NO: 3935 - DNA, 3431 bp, Artificial Sequence
  Description of Artificial Sequence: synthetic nucleic acid sequence
ttctattatttttagttcacaacatttatcaacaaatatattttcatatgcaatttattttctaatgggttgtgtattataccttgcctataacagaagacgtaatatcaaagatagtatgatggttcacatgttgaataattctgtttcaacattaccggtatttgttggttatttatggctatattttagatagtaaacataacaataaagacctgattaaaagtagatttatcttttaatcaggtcaattttatatgttaaattgtgatatcattctctatgattaatttaatcgctttatgatctgttgcatttctaaataaatcataggcactttcgatttcactcagtttactataatgtgtcacgagttgttctggttgtattattttgctttttaacgcttcaagtaattcttcagttgtatttcctgaaactaaaccagtagttacgttaatatttttaatccataatttatctatatcaagttgtacaggtaacccatgcacaccaacattagcaatcgtaccatcgacaccaattaaattttgacataaatcaaaggtttgtggaattccgacagcttcaatagcaacatcaacaccacgtggatttaacgattttacctttttaattgcggtttcagtctctttagagttaattaaatgcgtagcacctagttctttagcggtttctaatctattatcatctaaatcaatcataataatttttgaaggtgaatagaattgtgctgtaagtaatgctgctaaacctacaggaccagcacctacaatggctactgtacagccaggtttaactttaccttttaaaacaccaatttcataacctgttggaagtatatctgataacattacaagggcgtcttcttttaaatttgaaggggcgtgatataaagaattatctgcaaaaggaactttaacatattctgcttgagtaccattcactaaatgtcctaatatccatcctcctccgttttcacaatgtgcatagataccttttttgcaatagtagcatttgccacatgatgaaatgcaagagataatcactttatctccaactttgaagttgttaacgttgtcaccaatttcttcaatgattccaataccttcgtgacctagtgtcgtatgtgatttaacttcaggtgtatctccttttatgatatgaagatctgtaccacatattgtcgtcttaactatgcgaataatagcgtcagtactgctcgtaatagttggcttctctttatccgtaagttgtgcatgaccaggttttaagtattcataagctttcatatcaatacctccatttattatgtgaaatttttcacaataattataccacgtttgttgaatggatatatataatttttgtgaaaaaatacattttactcagtgtgttcagttttttatgaaattaaatagagtatttaaattagtgaagtgcgatacattgttcatttacacttaaatcatttatgattgagttaagtctttgaaagatagtaggtgtatatcatgtatgagaatatacaaaatattgaagatttttaccgatttataaatgcacacgctttagctgttgttcatattatgagagataattgtacagtatgtcatgcagtattaccccaaattcaagatttactaaaggactatccgaaagcacaattaggtgtgattaatcaatctaatgttgaagctattgccggagaactttctatttttacagtacctgttgatttaatttttttgaaagggaaagaaatgcatagacaagcacgttttatcgatatgcaatcgtttgaaaaacaattgtatataatgcaaaatgccatcgattaagctattctaaaataataattgaaaatcaaatagcaaatttaaaaatgcctgggaaattaattcggtagatttcacaggcatttatttttttgtatttttaatcattgggctgtatcttcattcgtgttatgattaatctcgtatattttaaattaaacagtcaatagatgaaggaggccaaaatgaagaagcaacagaataaagtccatatgattaatatatctttatgccttatagggacattacttattgcaatcgcagtaaatagttttgttataccgggcaatttaggtgagggtggttctataggcctttcattaattctgaattatactctaggtatttcacccgcactcagttccttcatcattaacgcaatattaattattgtaggttggaaatttctcagtagaacgacagcgatttacactgctataacaatcaccgcaagttcaatttttcttgatttaactcacacattcggattaggtattcatgataattttattaattcaatttttgcaggtttaatgttgggaatcggttctgggttagtaattactgctcatagtacattgggtggtacatctgtcattgcacgtatcatttcaaaatatagtgagatgaagacgtcacaagcactacttatattagatgcaatcatcgtgttatcatttatcgttgttttacctataacgaatgtattatatactattgtgatgctatttattgttgaaaaatcaatgtcttttgttgttgaaggatttaatcctaaaaaagctgtgacagttatttcaaaatataataaagaaatcagtgctgatatatatgaaatgactggaagaggggcaaccttattaagtggtaaaggtgcttaccaaaaaagtgatacagaagttctatatgccgtggtatcccaaaatcaagttggagcaataaaaaagattgttaatcaatatgatgaaaatgcctttttagtgattcatgatgtgcgtgatgtcttaggtaatggatttattaatattaaataagatttaataaattgagccaattactcaatgtttagacgctgatggtttaaaatggttatagattgaggaggttggcacattcatgtttaaaaagattgctactataataggttcgacattatttggtacagttttattcgcaaaagtgaaagaaaagcgtagttataaaagttttttacaagagaaaatgattagaatatcaggaatgaaaaagacatttgaaagtatagatgacgcgaaaaaagctttgaatgagactaaatatcaaactgcaggtaaatataatggaacaacatatgaatttaagcataaagttcaaataagagattattatggttctttagtctatgttgttaatgatcatggtcttccagatcaacgcacggtcttatatgtacatggaggcgcatggttccaagatcctttggaaaatcattttgaatatttagacttactcgttgatgcgctcgatgctagggtgattatgcccgtatatcctaaaataccacacagagattatcgtacgacatttgaatta

SEQ ID NO: 3936 - DNA, 3609 bp, Artificial Sequence
  Description of Artificial Sequence: synthetic nucleic acid sequence
tcagtattcagatttacttaatcaatatcaactttcttataaccaatataaaaataaacgtaaagaattagaggaattagaatccgcggaccaggctttattacaacgattagacttaatgaaatttcaattagaggaactaaccgaagcttcactgaaagaaggcgaagtggaccaacttgaatccgatattaaaagaattcaaaactccgaaaaattaaatctagctttaaacaatgcacatcaagttctaactgatgaaagtgcaatacccgataggttgtacgaattaagcaactacttgcaaacgattaatgatatcgttccagaaaaattcgtaagattaaaagaggacattgatcaattttactatatgctagaagatgcaaagcatgaaatttacgacgaaatggctaacactgaattcgatgagcaagttttaaatgagtatgaatccagaatgaatttacttaataatttaaaacgtaaatatggtaaggatattactgaacttattgcttatcagagtaaacttgcaaatgaaattgataaaatagaaaactatgaacaaagtacatcacaattaagggaagaaattaaaacgctttataacgaagtgatagatataggaaaaaaactttctcaagaacgtaggcgtgtagcgagagagttaagggaccatattgtttctgaaatacaaaatttacaaatgaaagatgctaaccttgaaatttcgtttaaaccattagatgaacctacaattgaaggtattgaatttgtggaatttttaattagtccaaatcgtggtgaaccacttaaaagtcttaataaaatcgcttcaggtggtgaactttcaagaattatgcttgctctaaaaagtatatttgttaaatcacgcggccaaaccgcgattctttttgatgaagttgactcgggtgtatctggtcaagcagcacaaaaaatggctgaaaaaatgcgagatattgctcaatatatacaagttatttgtatttcacacttacctcaggtagcttcaatgagtgaccatcatcttctaataagcaaggcatccaatgccgatagaactacaactcaagtcaaagaattgaaagatgaaaacaaaatagatgaaatagcacgtatgatttcaggagcaagtgtgactgagctcacgagagaaaatgcaaaagaaatgattaagcaaaatcacaatatttaattatgattaccaaattcaaacataatgattttggttttgattaaatttacaaatgatgtaaaatagttaagtattattttaaattgaagaaaacaagattgtaattagaaatatcaataatgttggtacaactatttccatttcttgtttattctttttatctaatgaaaagcgtgaacattaaataaaccattagaggactaaaatacagaatttatatttgtatttttagtcttctataaatttaaggagttagaccatgtcagaaaaacaatacgatttagtcgtgttaggtggtggtacggcaggatatgtagccgccatcagagcttctcaattaggaaaaaaagtagcgatagtagaaaaatcactcttaggtggtacgtgtttacataaaggatgtatacctactaaagcacttttaaaatcggctgaagtcaatcatactattaaaaacgcgcatacatttggaattgatgtcaatcattttaaaattaatttccctaaaattttagaacgtaaagatgctattgttaagcaattgcatgaaggcgtcaatcaactgatgaaacatcatcatatagatatttataacggtattggacgaattatgggaacatctatattttctcctcaaagcggtacaatttctgtggaatatgaagacggcgaatcagatatactccctaataaaaatgtgcttatagctactgggtcatcaccacagtctcttccgttcattaaatttgaccataaacaaatactatcgagtgatgatatcctaaggttaaatacactaccacaaagattagcaatcataggtggaggtgttattggtttagaatttgcatctctgatgaatgatttaggtgctgatgtagtagtaatcgaagcgaatgacagagttcttcctaccgagagcacacaagttgcgtcattgctaaaagaagaattaactaatcgaggcgttacattctacgaaaatattcaattgaccaaagatcattttaaccaaactgataagggtgtaactattaatatttcagatgagcccgtccaattcgataaagtacttgttgcaattggtagaaagcctaatacaaatgatattggtttaaataacactcaaattaagacttctgatgctggtcatattataacaaatggttatcagcaaactgaagataaacatatatacgcagcaggagattgtatagggcaattacaattggcacacgtcggttcaaaagaagctatagttgcagttgaacatatgtttgattgttctcctatacctatcaattatgacctgataccaaaatgtgtttatacaaacccagaaattgcttcaattggtaaaaatttagaacaagcaaaaaaagcaggcatcaaagcaaaaagtatcaaagttccttttaaagctataggaaaggcaataattgaggatgtaacccaatcaaaaggattttgcgagatggtagttaacaaagatgacgatgaaatcataggtcttaatatgatagggccacatgttacagaattaataaatgaaatttcattgttacaatttatgaatggctcatctttagaacttggtttaacaacacatgcacatccttcattatccgaggtagtcatggaattaggtttaaaagctaatggtcaagcaattcatgtatagttggaggtaaaaaaatgatagattacaagtcagcaggccttacagaagaagacctcaaaaaaatatataaatggatggacttaggaagaaaaacagacgaaaggctatggttactcaatcgtgcaggtaaaattccatttgttgtcagtggtcaagggcaggaagcaactcaaattggtatggcatatgcaatgcaaaaaggtgatatctcatcaccttattatcgtgatttagcatttgtcacttatatgggaatttctccattggatactatgttatcagcttttggaaaacgtgatgacattaactcaggaggtaaacaaatgccttctcattttagtcacaaagaaaaaggcattttatctcaaagttctccagtagccactcaaataccacattctgtcggtgctgcattagcacttaaaatggataacaagccaaatattgctaccgcaacagttggagaaggcagttcaaatcaaggtgactttcacgaaggtatgaactttgctgcagttcacaaattacctttcgtctgtgtaataattaacaataaatatgcgatatctgtaccagattcactacaatatgctgctgaaaagttatcagatcgtgcattaggttacggtatgcatggaatacaggtagatggaaatgacccaattgcagtatacaaagcgatgaaagaagcaagagaacgagcgctagc

SEQ ID NO: 3937 - DNA, 3704 bp, Artificial Sequence
  Description of Artificial Sequence: synthetic nucleic acid sequence
aagtatgagtaaccaatgaataagttacaattgtgtacacaacaattttttaaagttaagtctttatataccgtaacagatgattgaattcaatatgattgctattataatctatttctggttagaatttaagattatattttgaatcaaactattttaatattggtagaatggatcatcttccattgcacctgctttttcatcatcaataccatgtttataatagtcaacatattgaggttcaagcggttttctaccacgaataatgtccgctgctttctcagctaacatcaatacaggtgcatgaatattaccatttgttgttctaggcattgctgaagcatcaacgacacgtaaattttccataccatgtactttcatagttaatggatcgactactgccattgggtcagatgcaggtcccattttcgcgctacaagatggatgtaatgcagtttctccatctttacgtacccaatctagaatttcttcatccgtttgaacttgtggtcctggtgaaatttcgccaccattaaatgggtccatagctttttgttttaggatatttcttgctactctaattgcttcaacccattctctttcgtcttctttcgtagataagtaattaaacacgatacttggtttttcaaatggatccttagatttgattttcaaactacctcttgagttggagtacattggtccaacatgtacttggtaaccatgtgctactggtgctttttgaccatcatatcttacagcaattggtaagaaatggaacatgaggtttggataatcaacatcatcatttgatcttacaaagccaccaccttcaaagtggttagacgccgctgcacctttacgtgcaaaaatccattgtaaaccgatgaacggcatacgtttgacatcaaggctaggttgtagtgaaaccggttgtttacatttatgttgaatatatacttctaagtgatcttcgaagttctcaccaacacctggtaaatgcatacgtggctctataccttttgattttaagaattctgagtcaccaatacctgataattgtaatagttgtggtgtattgaaagcaccgccagataaaataacttcgtttgcatgaacagtatgttctttaccatttttcttgaaagtcacgcctgttacttttttactattattttcatcaaaaattaattttgtaacgaatgcacgtgtttcaacatctaagtttctacgtcttaatgctgggcgtagatacgctcttgaagcagacatacgacgtccatgatgtacttggctatcaaatggtccaaaaccttcttgtctgtatccattaacgtctgcagttttatgatagcccgcttcaacacctgcattaaagaatgatttaaataatggattagtagctggtccacgttttaatttgattggaccatcatggcctctaactttatcgtatggcgctgcaccatatgttgtttctaactttttgaagtatggtagacaatgtgcaaagtcccatgtgtccattccttcaggttctgcccatccttcatagtccattgggttacctcgttgataaatcataccgttaatagaacttgagccacctaatactttacctctcgcatgatctactctacgtcccatatgtggttcttcgtcagtttgatattcccagtcataaaaacgattacctgatgggaacatcaatgctgctggcatttgaataaataaatcccagaaatagtcactacgtccagcttctaataccaaaacatttttatctttatcctctgaaaggcgtgcaccaagaactgaacctgcactaccgccaccaatgatgacataatcgtatgaatcgcgttttcttctcatcgttaaagacctccaaaaattgatttgttttctttgtttgttaacatctctttcttaaaaggtttcatttattgaagtgagcactataccttagttagtactcacttcatgtagcattttgtatttataagtcatttactgtatataagcaatgtattattatttactgaaccaatccactggttctggattagtatttgtaagaatgtgtttacttactaaatattcctctaatccttctttacctaattctctaccgatacctgattgtttgtaaccgccccatggcgcttgtgcaaagtatggatggaaatcgttaatccaaaccgtaccaagtttcaatttatttgcaacacgttgtgctttaccaatatctttagtaaatatagcacctgctaaaccgtaaattgaatcatttgctaagcgaatagcttcttcttcgtcagcaaatccttctacagtcacaactggtccaaagacttcctcttgaacaatacgcattgatgtatcacaatctgtaattacagtaggttcaaagaataatccggcttgtaagtcttcacgttcagggcgtttaccaccaattgcaattgttgctccatcttttttcgcaacttccatataaccttcaattttatcgcggtgtgctgttgagataactggtcccatttcagtatcttgatcaaaaccgttacctaatttgattttgcttacacgatcgataagagctttttcgaatttatctttaatatcattgtgaactaagattcttgaaccagcagagcacacttgaccagcgtggaaatatccaccattaagtgcttggtctacagctaattcaaaatcagcgtcatcaaaaataatattaggatttttgccgcctaattctaatgcaacgtcagtcacgtgattagctgcttgtttcatgatgtgttttcctgtttcaataccacctgtaaatgaaactaaatcgacttcttcatgacctgacatcacgtcgcccacttctgatccagcaccaagtactaaattaattgttcctttagggaaaccaacttcctccatcaattcaaatacacgaattgttgttaacggagtaatttcacttggtttcataactaatgagcaacctgttgctaaagctggcgcaattttccaagatgcttgaagtaatggatagttccaaggtgtaatttgagtaacaacacctacaggttctttaactactttactttcagcattaggaataggtgaattgataatttcaccgccatctttatcagctaaaccagcaaaatacataaacacattatgaatatcatccatatcagcataggattcttctaaagttttaccagtgtctaatgtttctaatttagctaactcttctctattttctttaattttatcagcaacggctctcacttttttacctctgacttcacttgtttcaagtgaccattcaccgtcttcgaaagatcttctagcagctaaaattgctctttcaacatcttctttagttccttcagctacagtgaagattgtttcttgattgtaaggatttataatatctcttgtgtttttatttgaactttcaacccattctccatcaatatattgacgatttgataatttatctacaagttccatcaaacgacctccgttaagtttgttaaatttttatttaacgaattttacagagttatgttatcataattgatgaaaaagtgtcaatttctttaaaaatgtttgtattttacaatcgaacttatctatgtttaagaaataatttttgttcagaaaattacttttctttttttcataaaagg

SEQ ID NO: 3938 - DNA, 3939 bp, Artificial Sequence
  Description of Artificial Sequence: synthetic nucleic acid sequence
gatgctgaaaacaaagatgaattattaagatttgctatcaaacaagttgacaaagcatctcaaagtaatttaatccattctaataaagctgaccgtattaaatctaaacttatgtcagctaataaataatgattattaaaacagagcttaggacaaaacgaattgtcctaggctcttttttattactttacaaccaatatttctattgtcgataggatttattttatatctcctacctcaaattttttatagagatagtatgaataattctaaaatgagttgtttatccatataagatgattttagtttgtagtcagtctctgcacaagcgtttatgatgttaaacaaactttctagtttataatgtcgggattgattgagtgctagttttactctataagggtgtgcatttacagtctttgcaatttgttgcccactatagcctttttgactaagaattttacattgataatataatctataattactagtaattaatgccagtaattttataggttcttctttcataatgattaaatcattgactaattgtatagctttattcttattacctttttgaatgtattcagttagtagaaatacattttgttctaaacttctattaataattaaatcgatatcttctttattaattataggtctctcacctatgaataaaattaatttttctaattcttgagaaacaatattatagttaacaccagttaattcaataaataattcaagagcatcttgcttaatatctttataattattgtttagtgtatttttaatccaatgctttaattccttttcagacatttgttcaattttcttaagttgtgcatttttcttcaacgttttcgtgagttttttgcgctcatctagtttaggctgatacacttcaaagataatgagattttcaccatcatatttttctaaaaattttataagctcgtcagaattgtgatttaaatctttagaaaatttttcccctgtaaaaacatacgagttctttacaacaattgcttttttatttgagaaaaaaggcatagtaagtgtctcttcaataatcggagttaggtcactctcatacaagttgtattttacataattaaagtcatctatctcttgtcctagataatcatttacaatttcttttgttttcttttcgactaattctggtacttcaccgtagacagtgaagatattgctgctcatacgtacaccttcctctatatatcatactcatgaattatatcactttacgatacactttctctagctaaactcttttgatttaaattatcacggtagactatgtaaacttcttcatctaaatttatagttaattccccgttgtcttgagtatcaaaaactttactaccataatattttaatctttgaataacatccaaattaggtaaatgatacttattatttttaccactagatataagactgattttaggttctatatctttaataaataatttcgaactacttgtcctacttccatgatgaccaacttttagaatatctatttttggtaaattatatctcttcattagaatgtcttcattattaacagttgcatctcccatcagtagaatattaatgccgttatattcaattaatgtaacaatggaatgttcatttttatcatcacttaatggtataaaactatttaaaaagcttatcttactattatcaatatctatttttttaacttgatttacatccaagatatttatctttttttccttgcattttgtcgtaacctctttaagtaattctaatgggaaactttcaatatttaaaacgagattattcacattaatattatttaaaaaatatattaattcacccatatgatcggcatgaggatgtgtaattactaaataatttatagtggtaataccctttttcttaatacttggtaaaattttatatttggcaatattattatgtttaaaacttacattttcatttcttttacctcctgtatcaatcaaaacacttttatttgactttgttttgaataaaatgctatctccttgacccacatcaaaaagtgttaactcggcataatgtggtctaattaaatgtgtaaaaatgattaaaacaattaaaaaacttagtacggatgtaacaaaccctctatagacaagtatgtaaagaaaaattaacgttagtataatcaaaataagtaaactatattggtttaatttaggaatgtaccactttaaatgatttaaatttaaaaataattgaactagccagtcatgaattttaaaaagcatatttatataagtatttaataggaagctatgttgaaaaaagtgaattaaaataaagtagataatgaccgaaggaaataatataaaagaatagaatggaacaaatataaaattagatagcaaacctatccattgaaattgattaaaatgataggtattaattacaattgaacctaattgagccaaaaaactaataataaacaaacatttaagtggttttaaagcacttatatatggttttgccaatataataaataaacttatcaaaaaagagaactgaaaaccaatgtgatttataaattgaggatttaagagaatcattaacacaaatataaatgaaagcacatgtatagaacttttcctaaaatggattggcaacataagtataatgattgcaattgaaatggcacgcatggcactaggtacaaatccagtataaatagcgtagattaataatagtaaaatagttacacctttaatgagaactagaggtatatttaaacgtactaacagttgataaacgaggacaataattgtaccaacatgtgtaccacttatagctagtaaatggtaaatacctatatctttgatgttagatttgtaatattcatcaattagagaggtatcacctgttatcaacgctaatattctttcaggatgcgtgaccccagatttatgaattattttggtgatataattttgatgatgatatataggagtgaaaatattgttttcttggcaagacttaaattgaactgttgaaatattcaacaaggacaactctttttcgaatttaaattctcctttaactcgacaacttttatgagttaaatcttgcttgaaatttgactttaatattttgtaaaagaataatacaattcatcattttatggtcaatgtaatctaaaccgtgttggtcgacctgcagtaattgtaatgctcgtttagtcgtttcaatatatatctgatcgtcttcatttacttgttggaagtctcttacacgttttagtaacctattcgctatcctaggtgtacctctagaacgacgagctaattctaaggcgctttccttatcgatgtccgttcctaagacctctgcagttcgcgtgattatttcctttaaatcattttcattataatactctaatctaagatgcacaccaaaacgatctcttaatggccccgttaaactaccggctcttgtcgttgctccaactaatgtaaatggcggcaaatctattcgaatacttcttgcttcatcgcctttaccgatgatgatgtctaagaaaaaatcttccatagcaggatacagaacttcttcaacaacactacttaatctatgaatttcatcgataaataacacatcacctggctgtaacccagataatatcgctgctaagtcacctggtctttctaaagatggtcctgagatggtacgaatatttacctccatctcattagcaatgatatttgatagcgtcgttttacctagtcctggaggaccaaataacaagacatgatcgagtggctcttgtctaagtttggcagccttgataaagacttctaaattactttttatagaggattgacctatatactgctttaattgtgttggtcttagtgataattccaagtcagt

SEQ ID NO: 3939 - DNA, 3118 bp, Artificial Sequence
  Description of Artificial Sequence: synthetic nucleic acid sequence
gggattgggatacagtcattataaagattcaaaatcgaacactgatgtagcttcaaaagagactcagacttccaataaaaacactcatgaagatacaacttcacaaggtaaaatgcaaaatcaagttaatagccaaacaaacgaagtatcaaatgggacatcaactaaaacacttagtgaaaaagcaaagcagttaagagaagcttttaacgtcaatgatgaggaagctcaaattttagcagatgaaatcgatagagcagatgtaaataaagatggcacgattacaacggatgaaatgacgcctactttagatcgttttacaaaagaagggaaattccaaccatctgctggtggtacaactagcgaaacacctcaccctaaatatacagcagaagatgctagacatatgtctgatgatgaatttctagacgcgtatacagaaggcatgtcagatgatgaagctgctactattcacgaaagtgctcaagaatctaacgagtatatgaaatttttaagaggacaagttgaagcacgtgcaaaaggacagggcggtaattattaaccaaactgattaaaataagtaaataattaaactcagtgatacctgggtagggaataagaaaaatgtgttgtcttattccctatttttgattgttatagaaagtgtatatatttcaattttaatgactaaatcaattcgaaaagcagatatatcgaaaattcattaaatatgtagaagatgttcgattaataaagaagaattagcttatttatgatctcaacttatacttttgccacctctcctatttcaataattccatattttaaacattatcagattctataaattcgcgtacatgtgtataaatacctttgtaataaggatattttgtatttttaaatttacgcttcatttcctcatcttgactgttagacataatcattgcgtgatctaaataacttaaaaacgcttcatcattaccactatcaccaaagccaataatcaattcttttggaacaccatatttattcatcaaaaattttgtggcatataattttcctgcatttcttggagtaaaattaatatcataagcattttcaggatcacctgctaaaggattacaacgattaaatgtcatcgtatagtcccttatcttagaatactgagtgaggtcttctaaaattgttttatctaaatgcgtgtcacccgaagaatagagatagaaattgtacaatgtttcattgtctcgaaaagttctttgtggtataaacgctactttatgtttagaagaaacatgttttaatatatctaatatatcttccaataagaaacgttctgtcaacacttcgtttttatattcatcagattcaatatattcacagttattccatgtaaacattttagaacttaaatctgaaaaaatatgttgaggtttatatgacataccaacgttactcattttttgaagtacgctttctatagtacttcctgttaaaatagccgtaatgacattgtttttagtagttatattctgtaataaaccttccatttctcttaaataaggcatattcgcttgatgcgtatgatgtttgtagtaagtttcatcaaagtcgaataatattaagcgttttgtcatcttcattcctccagtatcattttttaaatgataaataataattacgctctaaaaaatgataaaaaaccacgaaaacaggataaaattacttgttttatttgtagaatttttgattgaaatcttctgtgttggtagtaggacttaaaacctccttatgtatgtctcaaggttatatatataatatcaataaaataactttgtcatctatctataaacaatttcatacatgctgacgttataacaactttattcaacaatgtttttcaaatcactatcactcatgacttatcataataaaaataaagcatccttcactttgcgatgagggatgctttatgaattttcacatacaaaatgaatctacagactattcttttttattcaattctttatcaagttttacaagtgttggtttcggaatatgaatgccttcttcactaaagtattgtatgacctctttacgaagtaaacgttgtcctggaaaatgcattccaggcttaacatgtgctaaaagtttaatcaccatttcattgccatcaacactatctaaaccaagtaaatctggtgcggatacaaatatgtcatatttattctttaatgtaggtaaaaatgttaataatttctcttctatcactttataattctcatttggagaaatcggtatcatcacaataggtgaaacatctgtagcagaataattaactatttcactaatcataccattaggtaatgtataaatttctccagtatctgattgtatacgcgttgatcttaaaccaatcgttttaaccgtaccttcagcaattgttaccccagatgcattaatttgaacataatcactcacatcaaactgtccttcaaatatgataaagaaaccagtaataatgtcttttacaattgtttgtgctccgaaaccaacggcaacaccaacaactccagctcctgctaaaattgctgatacactaataccgaaacgtgaaagtattgacgtaaggacaataaaccatacgacataacttattaaattttgaatcaatgtggatagtgtttcacttctcttaattttatgacggttctttttcttttcattaacgttgaaaaatttagtaactaactttcttgatatcgcaattacaatcatacccatcaagatataagcaagtataattaaaagattaaccaaaagattttgatagaactctattttcatcattggctcaaatagtttatataatgtgtccttaaactgactcataataacaacatgacctcctattgttaaaacaattaatattttcaatgtataaatctttatagataatgagcagtaagtcatttctaaatataacacttataaataaacatagcacccttcactttttgatgaaggatgctttatgaatttctatataaaaaatcatcttaagagtactgattttttagtcacttccaggtgtaatcataaaaccatccatcgaata

SEQ ID NO: 3940 - DNA, 3204 bp, Artificial Sequence
  Description of Artificial Sequence: synthetic nucleic acid sequence
taaacaattaaataatacaatgaaagcacttagagattctattgctgataataatgaaattttacaaagtagtaagtacttcaatgaagattctgaacaacaaaatgcttataatcaagccgtaaataaagctaaaaatataattaatgatcaaccaacaccagtaatggcaaatgatgagattcaaagtgtcctaaatgaagttaaacaaactaaagataatttacatggtgatcaaaaacttgctaacgacaagacagatgcccaagcaacattaaatgcgttaaattacttaaatcaagcgcaaagaggtaatcttgaaactaaagttcaaaactctaattctagaccagaagtacaaaaagtagttcaattagcaaatcaacttaatgatgcgatgaaaaaattagatgatgctttaactggtaatgacgcaataaaacaaacgagtaattatattaatgaagatacttctcaacaagttaactttgatgagtatacagatagaggtaaaaacatagttgctgaacaaacaaatccaaatatgtctccaactaatattaacactattgctgataaaattactgaagctaaaaatgatttacatggcgtacaaaaactagaacaagctcaacaacagtccatcaatactattaatcaaatgactggtctaaaccaagctcaaaaagaacaattaaatcaagaaattcaacaaactcaaacccgttctgaagtacatcaagtaattaataaagcacaagctttaaatgattcaatgaatactttacgtcaaagtattactgatgaacatgaagttaaacaaacaagtaactacatcaatgaaactgttggtaatcaaactgcatataacaatgccgttgatcgtgtaaaacaaataatcaatcaaacatctaatccaactatgaatcctttagaggtggaacgtgcaacatcaaatgtaaaaacttctaaagatgcacttcatggtgaacgtgaattgaatgacaataaaaattcaaaaacttttgcagtcaatcacttagataacctcaatcaagctcaaaaagaagcattaactcatgaaattgaacaagcaactatagtttcacaagtaaataatatctataacaaagcgaaagctttaaataatgatatgaaaaaacttaaagatatcgttgctcaacaagataatgtgagacaatcaaacaattatataaacgaggatagtacacctcaaaatatgtacaacgatacaattaatcatgcacaatcaatcattgatcaagtagcaaaccctacgatgtctcatgacgaaatagagaatgcaatcaataacataaagcatgccatcaatgcactcgatggagaacataaattacaacaagcaaaagaaaatgcaaacttattgattaatagtttaaacgatttaaatgcaccacaaagagatgccataaatagattggttaatgaagctcaaacaagagaaaaagtagctgaacaacttcaaagtgctcaagctttaaatgacgctatgaagcatttaagaaacagcattcaaaatcaatcatccgtaagacaagagagcaaatatattaatgcaagtgatgctaaaaaagagcaatataatcacgcagttagagaagtcgaaaatattatcaatgaacaacatccaacattggataaagaaataattaagcaactaacggatgctgtaaatcaagcgaataatgacttaaatggcgttgaattattagatgctgataagcaaaacgcacatcaatcgatacctacattgatgcacttaaatcaagcacaacaaaacgcattaaatgaaaaaattaataacgcagttaccagagctaaagttgcggctattattggccaagcaaaaatactcgatcatgctatggagaatttagaagaaagtatcaaagataaagagcaagtcaaacagtcaagtaactatattaatgaagaccctgatgttcaagaaacatacaataacgccgttgatcatgtgacagaaatacttaatcaaacagtaaatccaactttatctattgaagatatagagcatgctatcaacgaagttaatcaagcgaaaaaacaactcagaggtaaacaaaaactttatcaaactatcgatttagctgataaagaattaagtaaattggatgatttaacatcacaacaaagcagttcaatatctaatcaaatatatactgctaaaacgagaacagaagttgcccaagcaattgaaaaagcaaaatcattaaatcatgcaatgaaagcacttaacaaaatatataaaaatgcagataaagtgttagatagtagtcgattcattaacgaagatcaacctgaaaaagaggcgtatcaacaagctataaatcatgttgattcaatcattcatagacaaacaaatcctgaaatggatccaacagtaatcaatagcataactcatgaactcgaaacagctcaaaataacttacatggtgatcagaaacttgctcatgcaaaacaagatgccgctaatgtaattaatggtctaattcatcttaatgttgctcaacgcgaggtaatgataaatacgaatacaaatgctacaacacgcgaaaaagttgcaaagaacttagataatgctcaagctcttgataaagctatggaaacactacaacaagtagttgctcataaaaataatatattgaacgatagtaaatatttaaatgaagattcaaaatatcaacaacaatacgatcgagttattgctgatgccgaacaactacttaatcagacaacaaatccaacattagaaccttataaagtcgatattgttaaggataatgtcctagctaacgaaaaaatactatttggcgcagaaaaactatcatatgacaaatcaaatgcaaatgatgaaattaaacatatgaattatcttaataatgcacaaaagcaatctataaaagatatgatttctcacgcagcattaagaactgaagttaaacaacttctgcaacaagctaaaacccttgatgaagctatgaaatcacttgaagataaaactcaagtagtgattacagatactactttgcctaattacactgaagcttcagaggataaaaaggaaaaagtagaccaaactgtatcacatgctcaagcaatcattgataaaataaatggctcaaatgtaagtttagatcaagt

SEQ ID NO: 3941 - DNA, 3180 bp, Artificial Sequence
  Description of Artificial Sequence: synthetic nucleic acid sequence
tgttctacaaaatagtattgcaaatgaaacgattcaaattatcaacaaacctatcggagttactgctggtattgtgccatggaacgcaccgatacttgtccttatgcgaaaagtcattccagctatagtaactggttgttcagtagtgattaaacctagtgaagagacaacgttactcactcttcgattagctgaattattcagagcatcaactataccagcaggattgtttcaaattgttcctggcactggagaaacagtaggtacacaattagcttcgcataaagacattcaacttatttctttaactggaagtatgagagctggtaaatctgtttacgaaaatgctgctcaaactgtaaagaaagtaaatttagaattaggtggaaacgcaccagtcattgtcacatcaaatgccgatttagataaagcagttgactatatcgtgacagcccgtataaataatgcaggtcaagtttgtacgtgccctgaacgtatctttgtacatgaagatgttcacgatgactttttaaataaagtaacttccaaaatgaaaagcttaactgttggagatccatttgatgaaaacaccgattacggcgcaattattaaccaaaaacaacttgatagtattcatgaaaaggttcaagatgctattaaaaatggtgcaacattgatgactggtggacatcaattaaaacgccatggtttcttctacgcaccaacagtattagataacgttagaaaagacgataatgtgtttaaagatgaaatttttggtccagttcttgcgataacaacctaccgtgatattgaacaagtgattgaagacgctaatgatacaaacgctggcttatcttcttatatcttctctgaaaatttaacagaagtaatgacagcaaccgaacgtctaaaatttggtgaagtatatgcaaattgtgaggctgaagaagtggttaatggctatcacgcaggttggcgtgaatcaggcttaggtggcgctgacggtattcacggttttgaagaatactacaataccacagtaagttatattagatactaatgtaatcattatcatataactaatgggatgggtttaacgttttatttagaacgttagacccaccccgtttttaattattgagtgcgcgatttaatacgtaaatgttctttttcattaatgattggtatgaaattgaatcatcattttgctcctttttagtcaatacagctagattatgaaaacttaatggtttcgtatctgtttctttcttaataacatctgtaattttggaggtaatattttgttcatataaaacataaggcgcatgtgaatgctgtatatctttaacgatattcaaaatctctttttgactaggttcttcatcattcatacctttaacaccttgttgtttaaaaccataacgatgcgctaaatatccaagcgaatcgtgtgatatcacaactttatctcttttagaatgcttcgttattgattgtagttgttgatcaatatgcacaatatctttatttactattttataatttttattgtaataagcttgatgtttagggtctttctctattaatttctctttaatcatgaaagcgaatttttgatttagaacaggatctaaccaaacatgaggatcttgattcgattcttcatgatgtgaatgatgctcatgattttcatcatggtctttagagtgaataaaatcactttgtttgagtccttcggcaagcgctaatttcatgctattattggtcatcgaattcgtaatctttgcagcgacaggatctaattgatgacttgaatagacaaacagatcacttttggcaatatcaatcatatctttttgtgttggttcatatgagtgtaaatcagcaccagcaggatagattgattgcgcgtcaacatattttccaccaatctgttgtgtcaaactttgaaatgcatatacagtcgtgtatactttcattttattcttgtcattaatactttcgcgtttacgatgatcaaagctactgcatccgcttaacattaaaatgatgattgacactataattaatttcttcaatataagtgctccctactatgaccaatttatacgcttatcactatatccgttacattataaaaaagcaatagttatcaatataaatgtaaactgtaaactaattatgtttgaaaacgtcaaagcgtgataaatataactatatactattttaaaggagtgaacgtcgatggctgcagaaattaaacaaggcgatcataaattctatgtaggtgatgacgaaaataacccaaaagctgttattacatttaaagaggttgataacaatgaaatagacattgatcatactggagtttctgatgaactcggtggacaaggtctaggtaaaaaattagttaatcgtgttgttgaacatgcacgagaaaacaatctaaaaattatcgcttcttgtccattcgcaaaaaacgtattagaaaaagatgatcatgcacaagatgtttatttaggatagtttatgtgaatgtactaatatcaatttgagatatacgtcattcgcttatttcaccgaaaatttatagcagttgactaaatatgcaatacgtttatcaaatggccacacatatagtcaactatgtaagagtagaactaatttcaaaataatttagttctactcttttatttagattttatattagttcaatatattagctattttaatatcttttaagtatattaattatacttattttaaaattgaaaggaacacgaaactatgacaaattttcattctatagatgctacacaagtaacaaacgtcactttaaatgttaaagatttaaataaattaactgatttctattctaatgtattaggtttttctattcaaaaacaaacgaatcaacaaaccgtattcaacatcggaaatcttggttatactttaactttaaatgaacttaacaacggtcgacaaccggaatttagagaagcagggttattccatgttgcttatcttttaccgactcgtagcgatttagcagacttcctttatcatgctaacaatctcaacatcgcaatgggtggtggagatcaccttgtcagtgaagcgctatatttcactgatcctgaaggcaatggtattgaagtctatcatgatcgcccttca

SEQ ID NO: 3942 - DNA, 3864 bp, Artificial Sequence
  Description of Artificial Sequence: synthetic nucleic acid sequence
aaaagacaaacacgacgattttttgaacctcattaaaatgtaattatcgtcgtcttgaaaattctttgaacttaaattctgtggctaaatgttttgaaatagtatattgaaaacatctggtaacttttaaaaaacagtacttctgacagtagctgtaaaaggtgtaaaatgatcaccaaaaattccgtagttaaaagatggaaaagttttaaaagtaatagacttacttgaataacttatatctaatttcaaatccttttcaatgattaattgtcgttgaagacatttctcctacggtcattaattctttatttccaaaagcatttaaattttctgcacaatgagttacattgaaaatttattcatatatataaattacaaatacaacataaaagctaggacataatttctagcctcttttttattttaaatataaacatataacatgtcaccttatttaaacattatagacgtaactaagagagtcacaccagacagacaaattgaagttatacagatcacaatgaatggtttaagtgcttttgaaataacttcttttaaaacgatattcaatcctagagcaaccatcgccattaacatacataacgttgtaataacatttataatattcataagtaatgaaggaataggaacaaatgtattgatacaagccattataataaatccaattagaaagtaaggaatatcgattttttgttgtacttgacttgagtgtgacttataacgcatatacaaaatcaagacaatacttaatggaataagtaaaaacacacggcctaattttccaagtaaagcaaatgtcattgcctccgacccgccaatacctgctgctaaaacgacttgagcgatttcatgtagactgatacctgtccaagcaccataagttatagtaggtatgttaaaaatagcctcgatagctgtataaataagtgcaaatatagttccaactagtgcaataatacctacacttattgcaatgtctttttctttagattttaagattggtgctgtagctgcaatagctgcagctccacatactcctgtaccaataccaagtagtatagagatatctttatttcctttaataatttgattcaaaagtaaagttaaacttattgaaaagataattacgataatatcaataagtagtaatttccaacctttacctagaatatctcccatatttaattttaacccatataagataatcgcaaattttaataaacgtttcgatgcaaacgtaatacctgggcgaatatgctcaggataacctatgacttggcggtatatcatcgcaaaaatgatggcaatagctaacgccccaatcgtatgtaaaataggaaatttagctaatatataactgattattgcaatcgtaaatgtaaacataatacctttcataaatgaagcctgcgttattgatttcatatgtactttcacctcgatatgaaatcttagcacgttattgttatagcgttaaataaataataagtatagtatatatatcaaaaatgttatattagaattaaaggagaatgatgcatggatccgtataaggtattaattgaagtaatgaaaacagaaagttttactagagcagcagaaaatttatatacttcgcagccttctgtgagtcgtgatattaaacgtttagaattaaaatataatgttaaaatatttgaatttaaatctccatatttaaaactaactagagatggcgaaaagctattacaatacgcattgcaacgggaaagtattgaacaagaattatggcaaaacttaacatcggaatctgaaatcatctcaggcaccttaacaattggaagcagttatacatatggtgaatatttattatcagaacagcttaccagtcttatgcaacaataccctaagttacatattcatttacgtgttaataattcagattctgttataaatgatattaaacacaacagagtagatataggtattgtagaaaaggaaattcaagacaatgcaataaaatgtaaggaaataatggaagacgaaatggtgtatatttacaaaaaatcgattcaacctagaatggatatatgtttcgttagagaaaaagggtctggaacaaggttttatcaggaagtaggtctttctgagttgaaattaaatccatatttgatagaaattaacaatattaagattattaaacaaatggtagaggctggaaatgggtttgcaattatttcaaaatcagcacttcatccagaagattatgaaaaattaatgataacaactttaaatgtgaaacgtcactattaccttgctcaacatgttgataaatatataggtgaaaatattagagctgtcattgaaatgattatgaagtagagtatataaaaaatctgaggctaggaattatgtcccagcctcttcggtatctattagtcttggaatttaaattctaatggcggaggaagagggattcgaacccccgcggcccgttaaggccctgtcggttttcaagaccgatcccttcagccggacttgggtattcctccaattaacacaataacaataatataatgactttaattaaaagtcaatataattattcttgagtttacactagaacttctttacttaagtattgatcaacagaatgtgctacttcacgaccttcttttattgcccaaacaaccaaactctgacctcgtcttgcatctcctgcagcaaatattttagcgtgattagtttgataatttgtatcattagctacaattttattacgctcggtgtgtatatcaaacgcatgcggaacagtggtttcagtaccaacaaaccctatagataataagactaaatcagccggccaaaatcgttctggtccatcttccatcaccatgccatcaggcgtttcttttaatatttgtgtatataagcctttaacatttcctaactcgtcaacatcatagcgcattgtttgtacaccataggctcttggttcttgaccaaatttagcttcatattccttatgcgcataatccattttgaaaacaggcattgctaatggccaggaagtattactttcaaaagtaatctcttcaggctgtttcgtatatttattaaattgaacaatagatttacagttttcacgtaatgctgtcgctacacagtctgcaccagtatcaccagcacctataataattacattcttatctttagcagtaatgctcaaactttcaatctcaccatttagatactgtgtttgttcagtaagatagtccattgcaaaatgaataccagagcccattcgtccttccaatggtaaatctctcgcattttgagcacctgtgcataaaataatagcatcataattttcttcaagtgtttcacggctcacatcgacgccaatttcaacgcctgttttaaataaaaccccagcatctttcataagtgatacacgtcgacgtattacgtctttatctagtttcatatttggtataccatacattagcaagccgcctggttcatgcgccttttcataaacagtaactttatagcctttaaagtttaattcttcagctgctgtaagtcccgctggaccactacctacgatagcaactcgttggtctttatgatcttcaggatatgcgggatgaacccactcattctcatatgcttcatcaataattgtacgttcaatacctttaatcgccacggattctctattaattttcataacacatgattgctcacatggtgcaggacaaactcttcctgtaaattcaggaaaattattcgtctctctcaatctttcgtaagcagctttaaaatcttgatgatagactaagtcgttccactcaggta

SEQ ID NO: 3943 - DNA, 3446 bp, Artificial Sequence
  Description of Artificial Sequence: synthetic nucleic acid sequence
atcattgtagcgatacttatgtttaaaggaggagatacctctcacaaccttaatatgagaggcgcatttttacatgtacttggagacttgttcggctctgttggcgcaatcgttgcttctcttttaatttggggctttaattttacaatagcggatcctatagctagtattttagtttcgttaattattttaaaaagtgcttacggcatttctaaatcatcccttaacatattgatggaaggaacgcctaatgatataaatttaaatgctgtaattaaagcaattagtaaagatgaaagaattcaaaatgtacatgattgtcatgtatggaccatttcaaatgatatgaatgcattaagttgtcatgcagttgtaccagaatatttatcagttcaaacgtgtgaaacaatgttaaagtcaatcgaaagtgacctattgcaattaaatattcagcatatgacaatacaacttgaaacaccagaacacaaacacgatgaatcaacattgtgctcaggtatacatgaacactctcattagtgagtttatttctatcgatactttttaaatataaataaagatgtagattgaaggttctatttcattcaaagactcaacctaaaaatcttatcttaatttaaaagagagtttttgtgagtagaaccccatttcaatcattctatatattaagagcgtgggacatcagttatgttcccacgctctaaaaattttcaataggttttataaatttcagatgaatctatctcaatatttactttttcacatataaacatcttactttaaatgaaattcttaaatataaattctctagctggtacttgcttttcttcaaatcctgctaaaaattcttcattattgtacgctaatttcactctctctactgaaattcctttttcattaacggtaataataccatatacggtgtttgaaccattgttcaaacctactgatccaggattaaaatatactgttgatttatcatcaaacatatgcaacctatggttatgtccaaataaaattaaatcggcttctttgtctttaaataattcagaaatagcttgttcgtcatcttttgtaataggtgcaaaaggttgttcatcaataggagctgacattttatcattttcaatttcataatgaataaataaaatctttttcccttttatggtcatttcaatatatctaggcaattgattaatttcatcgtaataggactcatctaaatgtccttctatccattgatgatgctcataaaatttcccttttaaatcttcaggataaggtgttccattgacgagtgacataatagcttcatcatgattacctgcaatcatttccatatcatcccggtcaaatatagtatccagtactttatttgtctcatgtccaatccctatgttatcacctaggttataaattttttcgatatcatctctactatcaatatcatctaaaacagtttgaagcgcatcaaagtttccatgaatatcagtgataacagcaaatttcatgatattatctcccttcaatgttatcttattagcatattctaacattttgtgctctattatgttagatattaatttaaaatttattagaattttgatattgtatttatatgaaaaaaaaggagtgcttaaaatttgtttaattattataaatccggatttcaaaaagcaaaaccacataatctaaagttaatactactctcattaataacttttgtcatttgctatattacttctaatattgcattctcattagttatattaagagctcaaaggttaccaatgttagctcaactcggtgaatctactacaaaacctataatatctattatttttattttactcattttagctttattatttatttttgtaggttacccattgataactggtacagtatatgcaattcaaaaagctattaataaagagaaagttctttttagtgatttattttttgcttttaaaaaaggcaaatatgctaaatcagtaattttagctttaataactttagttttattcattgtaatcgtacttattctagtgctattaaataaattatatagtttagctcttagcccaatattaatcggcttacaacaatcaataagcggctacgacaatccaatgggaattttaattacaatacaaattgtgttgttactcataacaggtttcatctcatcaattttctattggtttgtaattatattcattattaattatactaccgcttatacagaagattcatctcgtaaagtaatgagtaatttaaaagaaggatttaaaggtattaaaaacggtaagaaaacttggtttaaatttttcattggcgtattacttattagtttacttgcaagtattattaacaaaccgctattattcggtgtacaatacttaacaagcagtatgtctcaaacggtggctcaaactattattataatagctagaatcgtatctatagtattacgcctatgtctttattacattttgatttttggaattattaattatttcgttagacgtggtgacaaaccagtcaaaagcaaaagacgtcataaaaataaagatattaacaaaggtaatgtaaacgacaaagtagatactaaattaaatgcttccaactccaaagatacagaagcagataaaatgaaagatcaacaaacacatatacaacaagacaaaactgatagtcaagaaaataacatatatgattccatcaaagaaaaagtaaatgaaaataaagaaaatgttacagaacaatctaaaaatctatttgataagaaatagttgattgtccttagattactttattaatttaaatttaaagtattttgcccaacatgaaattttattagtctttcatgttgggctttttatattgtaattgcatttttgtgaaaatcctctttaaatattttattaatgctcatgcatataatttaaataagcataatgaaccagttgataaatatataatttaaataggcaaatggacactctcatatttaatcatgaaagtgtccatttgcctatgtttactgatataaactatcgtgatcgaccgtttaacaacaagatactgacctgaaaactagttatctaataaatgactttttaagtaatgtgctgcaccatcttcttcgttcgtgtattcggtaatatcatctgtaagatttttaatttcttgtcttgcatttttcattgcaacagtgtgatggccaaaattaaacatagctctatcattatcactatcaccaataactaaagtttcttcttgcttaataccatagtgatcaatcatttccttgatacctgtacccttatctgtatgatatggcatcgtttcagcattataacgcgaagaattagatacggtaatacctaaatttgattggttttcaacaagctggttgcgaaaat

SEQ ID NO: 3944 - DNA, 3098 bp, Artificial Sequence
  Description of Artificial Sequence: synthetic nucleic acid sequence
tcaattgaatcacaaacatttacctaatcgagcacttgtcatacttacaatcattggcgtagttatcggatcaatgttcccgtttgctttcttagcacaattgatttccgcaggtacccttgttgcattcatgtttgtgtcactagcaatgtatcgattaagaaaacgtgaagggaaagatttacctaagccagagtttaaattacctttatatcctattttgcctgcaattacatttatattagtattgctagtattttggggattaagttttgaagctaagttgtatacactgatatggtttattgtaggtataattatttatttaatttatggaattagacattccaaaaagaatgatgaagaagcgtatcaagtacctagagaataaatgaagactcatagattaaattaaaatatagggagtaggacaacgaactcgttatgagttctgtcccactccctatattaatattgttatttagtgtcgaagaattgctattcatctacatgtttcttaccaaccttgaccactaatgtcatattgatttaattctcctctttccaacttttcaagcgcctgttctattgtatctaatgctttatcaagttgcttataggtaattacaagtggtggttgaaatcttaaaacattacccgcaactgctatgataatcacaccattttcaaagcagtaattacatatctttaatgctgcttcagaatctctagttttctcaattttatttgatactatgtctattccaatcgataatccaatacctcgaacatcacctacatattgataacgttctatccatgggtctattctttttctaacgtaactcccctttttccatgaagcgtttagtaaatcttcatcttcaatcatctttatcgttgctaaggctgcttcgcaacttacaggatttgcaccagttgtaaataaatgagcaggtgcttcaagactttccatgatttctttacgacctacaatcgcagacattggtaaacctccagctaatgactttccaaatgtcattaaatctggagtaaaataataatgatctacggaactccactttcctgtacgacctaatccttgttggatatcatcaactgcaataagaatattgtgagcgtggcaaagctcttgtaatgcttcaaaataacctggtacgggttcaagtaagccaccgtcaccttgaattgtttcaactacaatacatgcaacttcctccgcagggacgtattttgcaaacatttcttttaaaggagctaaatattcctcaaccgtgttaggcttagcttgctcaaacatccccctatacttatcgggaaaaggtatatggtaaaatccattaagtaatggcccgtaatgcttacgcatattcaaactaattgaagacatcgataatgaaccaaatgttgaaccatggtatgcattagtaaaacttatgatgtatggacgtcctgtatacgctcgtgcaaactttataatcccatcattagcatcagagccacttaatccgaaagtaactctcttctcataatttccaggagcaatgtcacataatttttttgataatcgcactaacggttcatgatacatatatgctggtgtataatgaatgaatttctcagtttggttcttaattgcttcgactactggcttcggagcgtgacccacattttgcgaacttgcacttgctaataaatcaatataagacttaccgtctacatcgattaacgtggctccataaccatgatcaataactagtggataatatttaatccgtccagaatgtgcaaaataacgttcatcttcaactatcaaatgattaaccttactcattgagttccctcccaatagtgactctttttaatatagctatctacatatgaagctataaaaactatcaactgctatcgttttaaaataaatcaatattaataggatagtaatcaatatactaataattttcagatttgtaaatattttctgataatttagaatacttacgttccgaatcttttgtgataaagaaatatatgtcattgaggcttagaatatatgtttaaagggaatttagaataaaatattttacggaggagattaatatgcattggttaaaaatattttatcatttattatgcgcaaccacgattagcgtgatattacttattataactatattaatggatgcgttactacaaaacacacacttaactcagttattactcaatattgattttttaatcaaccctgatgaagtgccaacaattattgaagtactgattcatttaagtattggaatattgatttatctcgcctttttaattatctatcattattcaaaatccttgtatcatctagcatacttacctttagtattgatatttactttgatgtatccacttctcgtttttcttgcgcaacgtccatttttttcctttagttggaacgaatttgcatggtggttagttgcacatctttttttcatcattttaatggcgacttgtctacctatcatttcgaaaaaaattttatgattttaaaactcatatctcaatgtcttttacacattataaaataaatattggcagtagaaacatcatagataattagactatgatatctctactgccttattagttattctggctctccatcttcatcatacttcgttacttctccatctttatcgataatataagatccttctaaatggccttctttatctgtaaatgagaacccccaactaccatcgctatctttttctggttctttgtaaatatatgtgtctgtatctaattgatgcccttcgtagtcttcaactatatcgataacattacttcgtgtcaccgttgcttcatcagaactacttgattgatcttcagattcagaagtatcatcttcatctgttaaattatcaccaactgaaaattcagtcctcatcatctgacttatcttattgatttcactttcactagcgttgtataacttaactgtacgagcatcatctataatgcgttgagattctcttttagagtaatcagcgtcacgccaactcccttggaaatgtgatggtacacta

SEQ ID NO: 3945 - DNA, 4627 bp, Artificial Sequence
  Description of Artificial Sequence: synthetic nucleic acid sequence
gctaaatatttctcaacagtaaaaaatggtaaatttataccaggtgaagtgaaagtttacgaagtgacggataccaatgcgatggtagatagcttcaatcctgatttaaatagttctaatgtaaaagatgtgacaagtcaatttacacctaaagtaagtgcagatggtactagagttgatatcaattttgctagaagtatggcaaatggtaaaaagtatattgtaactcaagcagtgagaccaacgggaactggaaatgtttataccgaatattggttaacaagagatggtactaccaatacaaatgatttttatcgtggaacgaagtctacaacggtgacttatctcaatggttcttcaacagcacagggggataatcctacatatagtctaggtgactatgtatggttagataaaaataaaaacggtgttcaagatgatgatgagaaaggtttagcactgagagatcccctcataatttccccaaagcgtaaccatgtgtgaataaattttgagctagtagggttgcagccacgagtaagtcttcccttgttattgtgtagccagaatgccgcaaaacttccatgcctaagcgaactgttgagagtacgtttcgatttctgactgtgttagcctggaagtgcttgtcccaaccttgtttctgagcatgaacgcccgcaagccaacatgttagttgaagcatcagggcgattagcagcatgatatcaaaacgctctgagctgctcgttcggctatggcgtaggcctagtccgtaggcaggacttttcaagtctcggaaggtttcttcaatctgcattcgcttcgaatagatattaacaagttgtttgggtgttcgaatttcaacaggtaagttagttgctagaacccatggctcctttgccgacgctgagtagattttaggtgacgggtggtgacaatgagtccgtgtcgagcgctgattttttcggcctttagagcgagatttatacaatagaatttggcatgagattggattgcttttagtcagcctcttatagcctaaagtctttgagtgactagatgacatatcatgtaagttgctgataggtttccagttttccgctcctaggtctgcatattgtacttttcctcttactcgacttaaccagtaccaacccagcttctcaacggatttataccatggcactttaaagccagcatcactgacaatgagcggtgtggtgttactcggtagaatgctcgcaaggtcggctagaaattggtcatgagctttctttgaacattgctctgaaagcgggaacgctttctcataaagagtaacagaacgaccgtgtagtgcgactgaagctcgcaataccataagtcgtttttgctcacgaatatcagaccagtcaacaagtacaatgggcatcgtattgcccgaacagataaagctagcatgccaacggtatacagcgagtcgctctttgtggaggtgacgattacctaacaatcggtcgattcgtttgatgttatgttttgttctcgctttggttggcaggttacggccaagttcggtaagagtgagagttttacagtcaagtaatgcgtggcaagccaacgttaagctgttgagtcgttttaagtgtaattcggggcagaattggtaaagagagtcgtgtaaaatatcgagttcgcacatcttgttgtctgattattgatttttcgcgaaaccatttgatcatatgacaagatgtgtatccaccttaacttaatgatttttaccaaaatcattaggggattcatcagggtttagcaggtgtttatgttactcttaaagacagtaacaatagagaattacaacgtgtaactactgatcaatctggacattatcaatttgataatttacaaaatggaacgtacacagtcgagtttgcgattcctgataattatacgccatctcccgcaaataattctacaaatgatgcaatagattcagatggtgaacgtgatggtacacgtaaagtagttgttgccaaaggaacaattaataatgctgataatatgactgtagatactggcttttatttaactcctaaatacaatgtcggagattatgtatgggaagatacaaataaagatggtatccaagatgacaatgaaaagggaatttcaaatgtcaaagtgacgttaaaaaataaaaatggagataccattgggacaacgacaacagattcaaatggtaaatatgaattcacaggtttagagaacggggattacacaatagaatttgagacgccggaaggctacacaccgactaaacaaaactcgggaagtgacgaaggtaaagattcaaatggtacgaaaacaacagtcacagtcaaagatgcagataataaaacaatagactcaggtttctacaagccaatatataacttaggtgactatgtatgggaagatacaaataaagatggtattcaagacgacagtgaaaaagggatttctggtgttaaagtgacgttaaaagataaaaatggaaatgccattgggacaacgacaacagacgcaagtggtcattatcaatttaaaggattagaaaatggaagctacacagttgagtttgagacaccatcaggttatacaccgacaaaagcgaattcaggtcaagatataactgtagattccaacggtataacaacaacaggtatcattaacggagctgataatctcacaattgatagtggtttctacaaaacaccaaaatatagtgtcggagattatgtatgggaagatacaaataaagatggtatccaagatgacaatgaaaaaggaatttctggtgttaaagtaacgttaaaggatgaaaaaggaaatataattagcactacaacaactgatgaaaatgggaagtatcaatttgataatttagatagtggtaattacattattcattttgagaaaccggaaggcatgactcaaactacagcaaattctggaaatgatgatgaaaaagatgctgatggggaagatgttcgtgtaacgattactgatcatgatgactttagtatagataatggttattttgacgatgattcagacagtgactcagacgcagatagtgattcagactccgacagtgactcggacgcagacagcgattctgacgcagacagtaactcagattcagatagtgattctgactcagacagcgactcggattctgatagtgattcggattccgattcagacagtgactcagacgcagatagtgattctgacgcagacagtgactcagattcagatagtgattctgactcagacagcgactcggattctgatagtgattcggattccgattcagacagtgactcagacgcagatagtgattcggacgcagacagtgactcagacgcagatagtgattcggatgcagatagcgactcggattcagatagtgattcggatgcagacagcgactcggattcagatagtgattcggatgcagacagcgactcggattctgacagtgattcggacgcagacagtgactcagattcagacagtgattcggacgcagacagcgactcggattctgatagtgattcggacgcagacagtgactcagattcagacagtgactcggattcagacagcgattcggattccgattcagacagtgactcggattcagacagtgactcagactccgacagtgattccgattcagatagcgactcagacgcagatagtgattccgattcagatagcgactccgacgcagatagtgattcggacgcagacagtgactcagattcatacagtgactcagattcagacagtgattcggacgcagacagtgactccgactccgacagcgattcagactcagatagtgactcagacgcagacagtgactcggactcagatagtgattcagatgcagaaagcgattcagactcagatagcgactccgattcagacagcgactccgactcagacagtgattccgattcagacagcgattcggactcagatagtgactcagacgcagatagtgattccgattcagatagcgactccgattctgatagtgactccgattcagatagcgactccgattcagatagtgattcggacgcagacagtgactcgtactcagatagtgactccgattcagacagtgattcggattccgatagcgattcggattccgatagtgactcggattcagacagtgattcggactcagacagcgactccgattcagatagtgattccgactcagacagcgattcggattccgatagtgactcggattcagacagtgattcggactcagacagcgattccgattccgatagtgactcggattcagacagtgattcgggctcagacagcgattccgattcagacagtgactcggactcagatagtgactccgattcagacagcgactcggattctgataaaaatgcaaaagataaattacctgatacaggagcaaatgaagatcatgattctaaaggcacattacttggaactttatttgcaggtttaggagcattattattaggaagacgtcgtaaaaaagataataaagaaaaatagcgctattgattcattcataagttatttcaagccaggtcta

SEQ ID NO: 3946 - DNA, 3416 bp, Artificial Sequence
  Description of Artificial Sequence: synthetic nucleic acid sequence
gaacccaacaatactgaaatacttgcaataattaataacagtgaaatggctatttcgtcattaaataccggagaaaagcgtgtaagaataacgccaccagcattaacaataccagcgtgcataatagctgaaactggcgtaggcgcagctacagattcaataagccagccttgaaatggaaattgtgccgccggaataatcacagctaaaacaataagtaaattgatacagagacgcattccataattgattgcattatcatctgacatattcgaataaatataccaatctcctgtagcgatatacaataaaatgacagcaatcaataacgacaaccatgccaatataaatgaccaagctgaaattcttgctgcttccctaggcaccttccataatttgttaactttaatgagccgtgttaacacaaataatgttgcaccccaaaacatggtcattaaccttaagtctccacttaaccatgccaatgaagcaaatgcagtaattaatgtaaaaaacggaaaatatttacggtaatgcatgtcgccaattaaataacgcatagaaaacttttgaatgaactaagaaacttcgtccgccgtgtttgtaattgtacaggtgaatggacgatggagaatttcattgaaattgaaattgagaaaatccgtcaacaagtaggtaatcgtaaagtattatgtgcaatgagtggtggagtagattcatccgtagttgctgtacttttacataaggcaatcggcgaccaattaacatgtatttttgtggaccatggtctattacgtaaaggtgaaggtgacatggtcatggagcaattcggtgaaggttttgatatgaatattattcgtgttaatgctcaagaacgcttcatgagtaaactaaaaggtgtgtctgatccagaacgtaaacgtaaaatcattggtaatgagtttgtatatgtctttgatgacgaagctgcgaaattaacagatgtagatttcttagctcaaggtacgttatatacggatgtgattgaatcaggtactaagacagctcaaacaattaaatctcaccataatgtaggtggattacctgaagacatggaatttgaacttattgaaccaatcaatacattattcaaagatgaagtgcgcgcattaggaatagaattaggtatacctgaacacttagtttggagacagccgttcccaggacctggattaggtatccgtgtacttggagaaattactgaagataagcttgaaattgttcgtgaatcagatgcgattttacgtgaagtgattcgtgaggaaggtcttgaaagagatatctggcaatactttacagtacttccaggtattcaatcggtcggtgtcatgggagactaccgtacgtatgatcatactgtaggtattcgtgcggtaacatccatcgatggcatgactagtgactttgctagaattgattgggaagtcttacaaaagatttcaagtcgaattgtcaatgaggtggaccacgttaatcgcgttgtctatgacattacctctaagccaccaagtacaattgagtgggaataaaatagcatagaataatgaaaccccttaggcataggcttgagggggttgtttttgtattttataagttggaaaaagggcaaaaaaagggcgacgtgttaaaacttaagagatttaggcataaaaaaagaggcaacctctcggtcaacctcttaaaacggaaagaatagaaaattctttcataaaaaacaagagtatagaaataactcttggagggatgtccctctttccttatttattatattaattgttttgaacataatagtcaatcattttgttaagtgatagaaagaaaaatgaaagagaaggaacatttcgataatgatgaaaatatctatttttacgttgtttaaaagttaataaatcattttttcgattatcttttatacctttactacaatatttagaatgtaaaactaataatgcaagaatatcaattattgctaatactttaaggtttttatcagacagtctttgttttctacctatcttttttaattctctttcaacggtaaagtttttgcgtggatttaaatttaataaaattggttggctatgagcacatttattcctaatgtttttagcaaatttaataaatttaccagccttacgtaactcagagtcatttgttctttcagaataaaattctacaaatgctgaaaattggccaaaagtcattaattctaagcatacccatattggaggatcatcataatatttttgaaaactcggtataactgtaccatctcttttaatcacgctagaaaagattttttctaaatctccattatgattgtttataaaatcttgaacaattgtatatccgtcttcgtttacatcatcagtaatctttttaagaatatctgtttttagtgaatgttctatatccaaacacataggtaataaagtatatcttaatcgcatatctaaagtagcaaaatcagaaagtgcagaaaactcaaaattataatttccactactatccttttttatatttttacgaaaagatatcaatttaaaaaaataagtgttattttttaatatttctttagcttcttcttctgttatttcattgaatagaattcctaatgatttcaactttttaatttgttcctcataatctaattttggtttacgagtactactcatatttaattaatacctactttctctaacttactcatcatatctttatccatttgttcagtaacatgactgtatatctgtagggtagtcttatgatctgtatggcctacacgatccataattgcacgcagtgatatacctaattgcgataataatgatatgtgactatgacgcatagtatggctggttatatgctttttaatacctacattctttgcagcaatttgtatgtttctgttgattgatgtaagtgatatagggtttcctttatgattagtaaatataaaatctctatctacatacatatttttccactgaaatgctttcttattctctaacataactttacgtaaaatatcacaacttcgagtagtcagagagatagttcgataagataaagctgtttttgtagtatctttaaaaccgaggttgttaccctctttacgccaatgtatagtgccatcaatgataagttttttgtttttgaaatcaatgttttctggttgtattgctaaaagttctcctatacgcataccatttaatgcttgaatttcaatgatataagcagtaaataaatatataactagcacgcttattatttgctatatgttttaactcttcagcgataagatgaacttcattcatttctaaatagttctcacgttttgctttaacttcttctattgtagtcgcttttttaggtac

SEQ ID NO: 3947 - DNA, 3268 bp, Artificial Sequence
  Description of Artificial Sequence: synthetic nucleic acid sequence
tacacagatgttcgtagcaactatgggaggaaccggtgcaacattagttgttccatttatgtttatgtggttaacaaaatcaaaaagaaataaagcgataggtagagcatcagtcgtacctacattctttggtgtcaatgaacccatactttttggtgcaccactagtactaaatccggtattctttataccttttatttttgcacctatagtaaatatatggatttttaaattttttgttgatgttttaaatatgaatagttttagtatctttttaccttggactactcctggtccactcggtattgttatggggactggatttgcattttggtcatttgtgttagcaatattacttattgttgttgatgtgattatttactatccattcttaaaagtatacgatgaacaagtgcttgaagaagaattaggaaataaagaagcaaataatgaattaaaagaaaaagtatcagcaaactttgatacgaaaaaagccgatgctattttagcaactgcaggggcaagtgaagcggatactgatgatacatcttcagttgatgaaacaacttctacatcctctacagatactattagtgaacaaacaaatgttttagttttatgtgcaggtggaggtacaagtggtttactagctaatgctttaaataaagctgctgaagagtatgaagtaccagtaaaagcagcagcaggtggttatggtgcacatatggatattatgaaagattatcaattaattatcttagcaccacaagttgcttcgaattttgaagatattaaacaagatactgatcgcttaggaattaaattagccaaaactgaaggcgctcaatatatcaagttaacaagagacggtgaggcggctttagaatttgtaaaacaacaatttaacaattaaaaaggagttttatatatgactaagaaattacctgatgactttatttttggtggagcaaccgctgcttatcaagcagaaggagctactcagactgatggtaaagggcgtgtcgcttgggacacgtatttagaggagaattattggtacacagctgaaccagcaagtgatttttataacagatatcctgttgacttggaattaagtgaacgctttggtgtaaatggtatacgtatctcaattgcttggtctcgtatttttcctaaaggttacggtgaagtgaatcaaaaaggtgtcgagtattatcataatcttttcaaagaatgtcataaacgtcatgttgaaccttttgtaacattacatcactttgacacaccagaggtacttcacaaagatggagacttcttaaatcgtaaaacaatagactattttgtagattatgctgaattttgttttaaagaatttccagaagttaagtattggacaacattcaatgaaattgggccgattggtgatggtcaatatttagttggtaaattccctccaggtatcaaatatgactttgaaaaagtattccaatctcatcataatatgatggttgcacacgcacgtgctgttaaactttttaaagatgaaaattataagggagaaataggtgttgtccatgcattacctacaaaatatccatatgatccatctaatcctgaagatgtgagagcagccgaacttgaagacattattcataataaatttattttagatgcaacataccttggtaagtactcacgtgaaacgatggaaggagtacaacacatcttatctgtgaatggtggtcaattagagatttctgatgaagactacaaaattttagatgaagctaaggatttaaacgatttcttaggtattaattattatatgagtgactggatgcgtggttttgaaggcgaatctgaaataacacataatgccactggtgataaaggtggatctaagtatcaacttaaaggtgtaggacaacgtgaatttgatgttgatgttcctagaaccgattgggattggatgatttatccacaaggtttatatgaccaaattatgcgtgtagtaaaagattatccgaattatcataagatttatattactgaaaatggattaggatataaagatgtattcgacgaaaaagaaaaaacagtacatgacgatgcacgaattgactatattaaacagcatctaagtgtgatagcagatgcgattgcagatggtgccaatgttaagggatacttcttatggtctcttatggatgtattttcatggtcaaatggttatgaaaaaagatacggtttattctacgttgattttgaaacacaagaaagattccctaagaaaagtgcatattggtacaaagaacttgcagaaagtaaagaaattaaataaaagctaaatattaactagtaaataagtcatctaactaagagcacttattaaagtatttaaaacaaaaacgattatttccaatgaaaatgatttggaaataatcgttttttaatacgtatattcattttcaagtaaagtagtttaaaatgaagttatgtctaattgtgatatatcttatcgaaccaagattattttaaagtaatcccataaatcaaataatttattactaataatagtataattaataaataaacatgaagagggctaatgatgaagtcaaaattcacaattctattatttacaatcttttctacaacagtattagttttggttattatttataacaaaactcaatcccaatcatacatttcgactcactattctaataataaaataaaaacaacagcaacactttttttacatggttatggtggtagcgaacgctcagaaacgtttatggtcaaacaagcgttaaataaaaatgtaaccaatgaggtgataaccgctagagtgagtagtgaaggaaaagtatattttgataaaaaattaagtgaagatgcagcaaaccctattgtcaaagtagaatttaaagataataaaaatggaaattttaaagaaaatgcttattggattaaagaagttctatcacaactaaaaagtcaatttggaattcaacaatttaattttgtaggacattcaatggggaacatgtcatttgctttttacatgaaaaattatggggacgatcgacatttgccacaacttaaaaaggaagttaatatagcgggagtttataacgggattttgaatatgaatgagaacgtgaatgaaattatcgttgataaacaggggaaaccaagtagaatgaatgccgcatatcggcaattgttatcactgcataagatttattgtggtaaggaaatagaa

SEQ ID NO: 3948 - DNA, 2973 bp, Artificial Sequence
  Description of Artificial Sequence: synthetic nucleic acid sequence
ttaatgaaattgatcaaaatacaatgagtttagttgttaatgaacctgttggggttgttggtgcagtagtagcatggaatttcccaattttattagcttcatggaaattaggaccggctttagcagcaggtaacacagtagtaattcaaccatcatcatctacgcctttatcattaattgaacttgctaaaattttccaagaagttcttcctaaaggagtagttaatgtcttaactggtaaagggtctgaatcaggagacgctattttccatcatgaaggtgtagataagttatcatttacaggttctactgacgtgggttacggtgtagcacaagcaggtgctgaacgtatcgttcctacaacattagaactaggtggtaaaagtgctaatattatctttgatgatgctaatttagagcaagtgattgaaggtgttcaacttggtatattatttaaccaaggtgaagtatgtagtgcaggttcaagattattagtacaatcatctatttacgatgaattgttgccaaaattgaaagaagcatttgaaaatattaaagttggcgatccatttgatgaagatactaaaatgagtgcgcaaactggaccagaacaattagataaaattgaaagttatataaaaattgctgaagaagatgacaaagcgaacatcttaactggtggtcatcgaatcacagataacggcttagacaaaggttacttctttgagcctacaattattgagattaacgataacaagcatcaacttgctcaagaagaaatcttcggtccagttgtagtagttgaaaaattcgatgatgagcaagaagctatcgaaattgcaaatgattctgagtatggtttagctggaggtatcttcactacagatattcatcgtgcattaaatgtagctaaagctatgagaacaggtcgtatttggattaatacttataatcaaattcctgctggtgcgccattcggaggatataaaaaatcaggtattgggcgcgaagtatataaagatgctatcaaaaactatcaacaagttaaaaatatctttattgatacaagcaaccaaactaaaggtttatattaataaaacgagacactttacaggatgcatgcgtatgcgtgcgtcctgttttttgttgaaattttacttcaattaaaagccgaaaatatttttgattattacactaaaatttatttatctggtgaaaaataataaattaatattcgcatttatattttgtatggtacaatcattttaaatatgaaaatgttgtgagagattttatgaatctagaaaaaagttatattgaacaacaagtaacaaatcgtggaaaatctactgctgtatcttaagtactttggttctttttaggaggatttggagcacacagaatttaacatggtaaagtaggaagtggagttggattattagtcttaacattattaactgtttggtttacttttggaattcctactttaatttgggctattattgatgcttttttaattccaaactgggttaaagaagatgaagatagaatacgtcagcaagctttaagcgaaataaaattaatgaaaaataaataaaattataaaaacctgagacattgagtgcaacgcaaagttagattaaattctaacattgtgaggtatagtacacatcaatcttgtctcaggttttcttaatatatagacaaaccattagaaaatacacctgccatatatcaaacactttcaccccccataaagacgaagtacatgttgaaattcaacggacaaggcaagttggggttcggggccccgacaaagagaatttcaccgagaaattctacgggcaaggcaagttgtcggtaacttggataacttattcaaaataaggtgtgtattcaactacgataagttatcatccttattttgtttcgttaccatgaattgtaatgtcaaagccttcaggtgaggtaacatgagtagtatttgcattaggttgatatatgtcaaagtgacataaaccataagtttgttcattttgagttctaatcttatttgactgccaagtatttgtagctatatgatgatgatacttttgagtggacataaatagtgcttgtgggaaattagatatatgttcgaaccctaacttttcaacataaaattcataagcagattctaaattgtgtgttttgagatgtaaatgcccgatttttccttcttccggccaactttgccaaccttcatttgaccgttgagtcattaaatcattgacatcaacttccaatgtatccattttgacaaaaccgtctcgccacaaccagtcttctgaagggcgatcatgatagacttcaataccattgccttcaggatcagtgaaatatagcgcttcactgacaaggtgatctccaccacccattgcgatgttgagattgttagcatgataaaggaagtctgctaaatcgctacgagtcggtaaaagataagcaacatggaataaccctgcttctctaaattccggttgtcgaccgttgttaagttcatttaaagttaaagtataaccaagatttccgatgttgaatacggtttgttgattcgtttgtttttgaatagaaaaacctaatacattagaatagaaatcagttaatttatttaaatctttaacatttaaagtgacgtttgttacttgtgtagcatctatagaatgaaaatttgtcatagtttcgtgttcctttcaattttaaaataagtataattaatatacttaaaagatattaaaatagctaatatattgaactaatataaaatctaaataaaagagtagaactaaattattttgaaattagttctactcttacatagttgactatatgtgtggccatttgataaacgtattgcatatttagtcaactgctataaattttcggtgaaataagcgaatgacgtatatctcaaattgatattagtacattcac

SEQ ID NO: 3949 - DNA, 4179 bp, Artificial Sequence
  Description of Artificial Sequence: synthetic nucleic acid sequence
cagatacacattcgtatatctctgtgcgtctaactcctgacgtaacactgtattgttacctattgctatgagtagaagtatgccgagtataatggttaatgctatccacatcacttatgttcccccttactctttatacatatacatactagatacataactggaataatcactatccaccaagtcatttaaatacctctttccataattcatttaaatgaacgtgatccttctcgtcgaagtccttaggtacttccacctcatcgtttgcagttaacttgtaataaacttctctgccaatccatttacctaactcatacatagcgatagtaaaccatatctttaatatgcgtttaatcattccgttcactccttaaagtgtttatctaagtctttagtaatatgtctatttcttttatagaattcttcacgttgttctttcattctattttcaaattctttttctttctctatccattctctatttcgtatttctctgaattctttcagtcttttcttatctttagtaaataaaattatcatgcaaacatgagcaactacattaacaagtgctacaacaatcaaacacatcatggctatccaaacaaagttaattgaatctagtgtcacttccctagcacctcatatgtcttttcaaaaatttctggtttaactggataaaattctccgtttacacccttaacgatataatcgccaacatcggctatcatttccccttctaaagtatttataagtaaataacctttagtatttttgtacttaaccttagacctcgcccataacaatatttctaatacactatctttgtctgtaaattgtataaactcaatttctacaggtttctttctagcttttttaacgctcattcccactcactccttacctagtactcttttaatctctgctactatatctttattctcctgtgcttccatatgcacctctgtcgctttcattttcaaaccaatcaacctgtttgggtgtaggatatacaactggcgctacaactaattgcgctaatctttctcctttttctactgtgatatcttcattacctatgttatctgtgatgatacctatttctttgtggtatgtttggtctattgttcctagtgctacacgcaatttagttttaagtgatttaccagatctaggtcttacttgcgcctcatacccataaggcagattaatcgctatatctgttttaactactttagttgcgtgtgcaggaatgttaatcgtttctgatacgtataagtccaatccactatctgtagaatttgctctcttcggcatagtcgcgttttctgataataatttaatttctaatgtatttgtcatttattgttcctccttaaaatcttctattgtttcttttatattatctatgaaatcgtctatactttttcttatatctttaccactgcaattgttaggatctttcatagtttcgtgtcgcaaatttaccaatctcactaaaaccataccaaacatttcgtttaaactatctattttacttgctgccttcgcgtctttattcacttctctatgaaacccaacatcttctaacaaatcttcgtcgtttatctctatctttaaatttaatttcaaaacattacactccaatattttttatagtcatttatttattactcccagtatttgattaaaatatgtgagtaatgatcgtcataaacttccgcccaattaacttgataaccaactacttcatattctttaatttcatttattcttacaaattcgtttaccacctcatgtatttttgttgatgaacgttcaaattctttaatcttccacatcactaccacgctccaaatcacttaataaattttgaaactcgtgtgttccgtcgagttcgtccatgcgtttaagaagttctcctaattgaaataatgaactttcatcttctttaccatcagccatttttgtcatatgaagtattatcggatattgaaaaagcatttcttctttcaactctagccatgcatgtttataatctttatccttcatggttggcctccttatatttatcgatgacttgagatatataaactgcaaaatcttctgccgaacaatcttcctctgttatctccaatatctcatcaaacgcctctgcctttcttttcgtttctgccatatcattgatgagttcatcacgttgtttcttgtaagcgtcacgttctttctttaattgttgaatatcatcagtccatttttgtacttgtgatccatgtacaacgaatttcggatcttctgccatttactcgtcctccagtaaattttcatcttcaaacacattacctacaacactacattctttaaaaaatattgttttttcagatgttggcaaatcataataatatttatattctttagcaatcgtactgtcctttaccataaagttttccaaaaaaatacctttaaccttatctataattacctgtgctctatttattgtttcaactatagcttcatcatcgaatggataacaaaaagattcatcctcaaattcgatgatgtccccctcgtatatctctacaccgttcttatcttttaagcctgttgattgcattaatacataatctctaactaaatcctttgtaattccgtatatcgaaccgtcattaactttaacccattcatcttcgatataaatcgtttctacgttccacattttattttctgttttatcccacgctctaaatttaatcaatgatttccccgtccttccaaattaaagtcattgtatttccttctcttatccaaaattcttcgctaagatcactttttacttttgaaataggtacatttttatgctttaaataattgtttaattttgtgtgttcataaaaacatttaattactgtatcctctgtgatctcttccagtgcgacttcttcttcaacttctaatgtgaacgcttcttctttttcattgtaagtaatataattttctgtttttaacttcggtttaagtaagttgttgtatccaccttctgtttctatataaagagtaaactctgtttcttcaagatctaatagatactttataaattctttaggttttaacgttactttcttttttatttttaccattcatcatgcactccttatttattggtttggtaatccataactcattaactcgttatataatatgtcatctcgtaattcatctattaaattacttacctctttatgtgtcatagcttttatttctttacgactataatcaataagtgaagtttgtttttgcagacccctaacatattccacttgtttatctgttgccattccttacacactccctgttctttttaatatcgttctcactaactttcatcgtcactctgttttctgctaccttaaccacaaagccgttgatacctaacttgcgtaattcctgttgtatctgggtaggtgtcttgcctcgtgtgttatatctgtatcgttggttgattgtgtcggatagtatcatgcatttaccttctcgtactcatcagcccacatgtacatcaacccgtcactcacatatctacggttgcactttctagcaatgttgcgtctgtcgatgaataatacttttccagcttctactgtacttgcgaattcttctacaattttgttgtcgctatccactaggtatactggtttggatacacctttatttctgcgatacaatctatatttctgtaatgtagattggaataagttatctgaaataaagttgttgtatctactatctttcggatatgcgtgcaatccgtttttcaagttaccgataaacgtttcatacacaatatctgctgcacgatacttcttattcttataaataactgtgaaaatacccttacaaccattcgcaaacttgtattttccatcaggtcttttcattctgcctaagttgcttacgtataagtcatacttctcgctgtacttccaaatttcatcttttgctacaactctttcgttaaactcttgtttcttattcactctcggcattgtgtccgtaaagaagcacttcaatttatcgttatatgtgccacgttccttttggtaccacaatgtattgagaggaatgcctgtaatgttgtgcaaatgagataagtctgtcttagtcactgtgtggctaaatggc

SEQ ID NO: 3950 - DNA, 2119 bp, Artificial Sequence
  Description of Artificial Sequence: synthetic nucleic acid sequence
tcacatttatttaattataactatgtttaaaattcttagctatagtatggttcggacctgttgttgcagtatacatatcataagaaattgttacgcctgtacctttttagctgctgtgtaaaaatagctaccttttaattcatttttcaatccaaaatcaaaggctttataaatagccgaggatgctttaacataaccatttttactaagtttactagcagcagatactaatttgtttcctgaatgaactcctttagaaaatttaactacttttttagaaaaatggtgtttataatgaccaacatatacatatttttgacctttgtaagttatagttgttttatattttgttttagcactcgcagtattaccttgattaattgaagaaaaagataatccggttaaaactaataaacttgcaataaaaactgaaagtaactttatcatataaattaagttataactactttaatttaaaaaattaacactatatattttttaaaattcagttaataaagatccatctttattaactgaattttagtagcctatttttattaaacattaagtatagaaaatagtatttaccagttctatttttcaatttctatctcttttacaatctttaatatcggcatgattagtaatgataaaataaaggctgattctaaaatcagaaaaatatttatttctttaaaaaatattaaatctatcacatatccaaaaatacaaaatatgataaagaggcaaataaaatgaacaattgatttcaatgctaatactcctttttgctttctaagctattttaaactttatacaggcttttcatttaatatcatataggtattttagtattatttcatattaaagacgcgcatttgcttttaaaatggcatatataagcctccaaattacaagatagaaaacgaatcctaaaaaagcattaaacaaattgaaagaacactaaaaagcaagcgactatcaattatcgtagtcgcttgcttttttatttcagatcatatttttcttcaaaatgcatttttcttaaatattctttgtacttttttttactatcaaaatctttatcatattcatctttcaaaacagcatgtccatatactttattgttttcatcaatagagtatgtatacgtattataaggctcatctttaaaagtgacttgtaaatcattatccccagtattgaacgtaaatatatttttttcttctttaactttatcttcccaacctttttgtttgaaaatatggtgaactttttgtcttagtttagcttcttcatgtttttgaacattagcataatgatgcactatactaaaaattaatgttaaaacaataagaagaacgataaaaataatacctataattttgtattttctttgcatattggtctccttaattaattttatttatttaattaatattttgtaaaattaaatacaataatacatatttatgatatgtttttaaatgtaataaagtcaaataaaaggaggaaatttatgaaaaagttaatgatgagcttattatgttgcacaatatgtggaacagttttaactacaggaagtgtaaatgcacaaggtgatagctcaactaactctgagtcgttaaaggaacttcaaaatgaaggtattgtgtctaaatcaattactgaacaacaatggcaacaaatgaaagctcaagagcgtaaagatgaagcagaatttgagaaaacagctgaagtacaatggcagaaacaacaaaaacaagatcgaatagatcgagaaaatcgttcaagaaaaaagaaatttcatttgaaaaaaggtgattttttcatcacaaataacgtaagttcaaaagggtttacaggtcatgctgcaatatatactggaaaaggaaaagttaaagaagcgcctggatatggacaacctgtgagggtaaaaagttttagtgattggaaaaagagtactttgaaaaaaagaaaaggaagtcccaaacatcgttatatcaaggtttatcgagcaccaaaaaaatatagaggtaaagctggaaactatgcgaaatctcattttaacggtgtaccttacagtataacgacgaatccatattctaaaagcgttaca

SEQ ID NO: 3951 - DNA, 3450 bp, Artificial Sequence
  Description of Artificial Sequence: synthetic nucleic acid sequence
tggtgcccgttggcgatggtcttaatggaacaattattgaaaataagttaaaaaaagaaggcaaaacttcattattaaataatatattaggtgataatggttggacgttatgtatcgttgaaaataatggggaacgcacttttttaacgatacctggagttgaaatgacttggaaaaagaattggtttaaagaaattgatcttaataagtatgattatatttatgtgtcaggttattcttttgaacctccttcagacgaagttttattagaagaatttagtcgtttaaacgagaaaactacaattatttttgacccctcaccaaggattaataaaatgaactgtgagagtataaggaagttgcttgaaataaacacaatagtacatgccaacgaaggtgaaatattacaattgagtagtgagaatcatgtgaaagatgcggcattagaagtaagtaaacagactaatcaacctgtgatagttacattaggcaacaaaggtactcttatagcaaataagtgtaaagttaagattttagagggggaaaaggttcctgtaactgatactataggcgctggtgattcacacacagcagcttttatagcaggtttgctagataaccaaagtattgaaaaagcttgtatatggggaaacgaagtagcatctaaaattgtgcaagatgtttgaaattttactatgaatcacatctgcaccagctttgtacaacgcattaattgtacgattgatactcttagtgttacctggaataggcgaagaactaaatactacagtgtcttccggtataatttttatttgcttatgtgtaccatttgcaattcttgataatgcagccataggttcaccttgagaaccagtacaaagaatgagtaactcgtgtttaggtacactatttattttattaggttctataaacgtttctggtggcgctttgatatatcctagttccataccaattttgatattgttttccattgaacgtccaaatgtaacgattttacgattatatttaattgctgcttcaactgcttgctgaacacgataaatattagaagcaaaagttgcaaagataatacgccccttacaatttctgaaaattttatcgacattctgtccaacttcacgttcacttaaagtaaaatctggaactagtgcgtttgttgagtctgatagtaagcacaacacaccttcatgacctaattgagccattttagctatgttagcaggctcacctacaggagtaaagtcaaatttgaagtctcccgtatgaacaattttaccttcaggtgtatcgactataacgccatatgcttctggaatactatgtgtggttagatagaaagaaatttcaaaatgtttagacttaattacgctactttcatctatttcatgtaattcagtcgttctaagcaaatgatgttcttctagtttattgcgaatgagacctaatgctaatggaccaccgtaaataggtacattaatttgttttaataggaagggcacaccacctatatggtcttcgtgtccatgagtaataaacagaccgacaattttatcttggttctgttctaagtaagtgtaatcaggaattacataatcaattcctaacagattatcgtcagggaatttgattccagcatcaatgattacaatttcatctttgtactcaacagcataggtattttttccaacttcacctaaaccaccaagtgcatatacacctacttcatttgaatgtagttgtttcattattcggcgttctccacattaaagtgtgttgaatgttctttttcatattctaagtgtgcgccctctaatttagtaataaattcaatattaaaatttcggtctttcaaataacgtctcacttgttcctcagtttgtccctcaacataaattgtttgagtattttcacgaacgatgacttcatctttattatgttgataaaatactttaaatactgccattgttgtattgtcctcctataaattataattgttattttttacgaccctagttgtgaatactcgggttattaaagattttttacatatccattagagtattattcttcaataatttttgtgttctaaatttaatttgttagaaacataccagctcaatctaaacgttatttttatacttgtttaatctcactgcccagtatgttctctagggcaataatgtcgttcaagatttgaaattagtatcaatttactaagatttcagttaagttatattttacatgatgtttttgaataaataaagcagttttattttgcatgtactttgttgtttttaaattaatcctaatgacatttgaattacttttaaaaaaacacttcattaagtaagtataaaatacaacttaatgaagtgttttaatataattcatgatttagacttctacggcctcttcatgtggttttagaggttcattggcatcaatataatcataaaacataatgccatttagatgatcaatttcgtgttgaaatacaattgcaggatagcctttgagacgtaatttaacatcatttccatcaatatcttgagctttaatagtgactctatgatgacgatgcactaaacctgggatgttttcatcaacacttagacaaccttcgccagttggtaaataagcttcttgtacactgtaactcattattttaggatttacgagcatataatcatacgatttaccgtttccatcatcaggtaagtagacagcaatcatacgttttggttcattaatttgtggagcagctaaacctacgccagaacgtaaaccataacgttttgcggtttcttcatcctgactattgattagaaattcacgcattgcgcgcaatgtttctttatcattgttagaaagtgggaagcttaattctttcgctttttcacgaagtgttggatgaccatctcttataatatctttcattgttatcatgtcatacaccttccttattaaataatatatcagataagatagacacaagtacattaatagatactcaaagattttattgctttaaatgtttgcactagaatatagaatgatagctttatattgatttattataatttattatttaatattacaagcgaacaactttgaggaggtaacagttcatgaattttaaaaagactgtagcaattgtcctaacgtcagcagtgttattagctggatgtactatagataaaaaagaaattaaaaaatatgatgatcaagtacaaaaagctatggaccaagagaaaaccgttaatcaagtaagtaaaaaaataaacgaattagaagagaaaaagcaaaaattatttaaaaaggtaaatgataaagatcaaagcacacgtaaaaaagcagctgaagatatagttgaaaatgtaaaacaaagacaaaaagaatttgaaaaagaagagaaggctctagataatt

SEQ ID NO: 3952 - DNA, 3326 bp, Artificial Sequence
  Description of Artificial Sequence: synthetic nucleic acid sequence
tatacatcaaatacgagtgtatcatttaaaatatcttcaccattctcatgaataatggataacaattcagatgaagtaacttcatgattaacttctaatgcaatatcacgtgttacacctggaaatctaggtataggctcataattaatatatcccacagaaacttccatcattgcatcataattaagttcaaatacatacgtacgctttaaatcattgtttgcagctaacgtagggtgtagctcacctatgaagccaatatctttaccattaagtgacacaattgctgttcttcctggatgtaacccatctatttgaccagctctaaaatcgaattgaagattaagcttttcagcaatacgttcaacaatacccttagttaaatagaaatcaactgactctttcttaccttgccaagtgttattaacaaaatctccagttaatataccactcaagtattctacttcatctggtaactcaccttcaccgttaccaaagaagacacgtccaatttcatataacttaacatttgtatttttacgagcaacattgtatgatactgcatcaattaaatgcggtaataaactttgacgtaatgtggtatgtgcttcactcataggcataagtagttcaattgtaggacgattttgtagtgcaaaatcggtagcatgattttttgataccaatgaataagtaatagcttggtctagcccagcgccctcaagtgtttctttaacagtacgcgttttaaactgtcgatctgttagttctccacttgtaacatctttaaatacaggtagcgttgatggtatgtcatcgtatccatatatacgtgctacttcttctattaagtcttctttaatagaaatatctttacgtcttgagggaacattcacgataatttcaccatttttattttcagtgtcaaatcctaattgctcaaaaatatcaatgatttcttcatcagttaaattaaaaccaattgtacggttaactttgtcagcagtaatttctattggggtcacaaatgatcctaaatctccatgcgaaactcggtcttttaaaactgttcctgaagcatatctttcaagtaaataacaagctctgtctacagcttcatcgacaaattcagttgcaatccccttttcaaatcgactcgaagattcacttcttaaatttaaacggcgtgatgtatgtcgaatagatacaggatcaaagatagccccttctactacaacatgtcgtgtttgttcagtgacttcagagaaatctcctcccataacacctcctaatgcaatagggtctttgccatttgtaatgacaatgtcagtatctaacaatcgacgttcttcaccatctaaagttctcattgtctcatcttttttagcttgtctaacttctatagattgcgaaccaatttgttcttgatcaaacatgtgtagaggttggccatattctaaaagtacataattggaaatatctaccacattattaattggacgtattcccgctttaattaatcggaactgcatccatactggagaaggtccaatagtcacgtcatgaacaacacgtgcactatagtaaggtgctttatcttcatttttaacttctattgttaattcatctttagcagattcttgactttcattgcttgttaactgaggtttattcattttagtttgatataaagctgcgacttcatacgcagtacctaccatgcttaatgcatcagcacgattaggtgttaaatcaaattccatcacttggtcattaagatatagtgcttctaacgcatctgttccaggtttaactgcttctggaaatacatatatacctgactcataatttttaggagttacatgacttgaaatacctatttcttgtaatgagcaaatcataccttcagagcgttcgccacgtaatttggcacgcttaattttaattccaccaggtaaacgaccaccaactttagcaacaatcacgtgttgcccttcatctacatttggtgcaccacaaacaatttgaactggttcttcttcacctaagtctacttgacaaatatttaatttatcagcatctggatgtggcgtcttcgacaagacatgtccaactactaattttttaatatcttttgtatagtcaataatatcatcgacttcaattccagttcttgtaattctctctgctaacgcttgaactgactggtcaacattcacataatcttttagccattcatttgaaattaacattattgttcacctctatcttctacagctttaaattgatctaagaaacggacatcattggtataaaagtgacgaatatcttcaataccatactttaacattgcaattcgatctggtcccataccaaatgcgaagccagaatattccttagaatcgaatccggccatttctaatacattcgggtgaaccatgcccgctcctaaaatttcaatccaacctgtatgtttacaaacattacaaccctgccctttacatttgaaacatgatacatctacttcaactgatggttcagtaaacgggaaataacttgggcgtaaacgaatctcacgatctgcaccgaataattttttggcaactaactctaaagtcccttttaaatcgctcattttaatatttttatcaactactaaaccttcaatttgtgtaaattggtggctatgtgttgcatcatctgagtcacgtcgataaactttaccgggacaaataattttgactggtccttgtcctttacgtttttccatagtacgtgcttgtactggtgaagtatgtgtacgcattaaaatttcttctgtgatataaaagctatcttgcatatcacgtgctggatgcgatttaggtaagtttaaagcttcaaaattatagtaatcttgttcaacttcataaccatcaacaatttcataacctaatcctaagaacaagtcttcaatctcttcaactgtacgtgttaaaggatgttttgatccaatttcaatatgacgacttggcaatgtgacatcaattgtttcttcagaaagctgttgatttaatttctcttctttgattagcttttgtctttcatctaattcactttgaatagtttgtcttaattcatttaccttttgaccatacgcaggtttgtcttcattaggcaaatctttcatatttttcattaagccgctaacagaaccttttttacctaaatatttcacttttacttgttgtaacgcttgcgcatcttttgcttcatttatatccactaaagcttgttgcttcaactcagacattagatcattttgagtcatgactgaattcctcctt

SEQ ID NO: 3953 - DNA, 3138 bp, Artificial Sequence
  Description of Artificial Sequence: synthetic nucleic acid sequence
tgttgttaccccacctcaaaatagcggtatatgtcaagaggtgttagccgcttgttacattacaggcgttcatcatgtttatcaagtcggtggagcacaaagtattgcggcgctaacttatggcacggaaactataaaaaaagtcgacaaaatcgtaggtccagggaatcaatatgttgcttatgccaaaaagtttgtattcggtcaagtaggcatagaccaaatcgcagaaccgacagaaatagccttgattatagacgaaagtgctgacttagacgcaatcgcttatgacgtatttgcacaagcagaacatgatgaaatggcttgtacttatgtgattagtgaaaatgaaaaggtacttaatcaattgaacactataatacaagagaaacttcagtatgttgaacggcaagatatcatatcacaaagtattgctaaccatcattatctaatattagctcaagatactgaagaagcatgtttaattatgaacacgattgcacctgaacatgcatctattcaaactcgagcacctgaaatgtatatagataaagttaaatatgtaggcgcactttttttaggtcatttttctcctgaagttattggggactatgtggcaggtccaagtcatgtacttcctactaatcaaacagctagatttacaaatgggctttctgtgaatgactttatgacacgacattcagtcattcatttatcacaaaaaacatttaacgaagtggcagaatcagctgagcatattgcacatatagaatctttatttaatcatgaaaaatcgattcacgtacgccgataaagataggttattacgatatctgttaataaaaatgaaagcgtatgttcgttactctattgctacagaagaacaacttcttctactggaaaaatagtgaagaaatggagcgtatgttatgaactatcaaatcaaaagaaacactgaagaaactcagcttaatatttcactggctaataacggaacacaatctcatattaatactggtgtaggatttttagatcatatgttaacgctatttacttttcatagtggattaactttatctattgaggccactggagatacgtatgttgatgatcatcatataactgaagatataggtatagttattggacaattacttcttgaattaataaagactcaacaaagttttacaagatatggttgctcatatgtacccatggatgaggcgcttgctcgaacagtagtggacattagtggtcgtccatatttctcatttaatagcaagttgagcgctcaaaaggtaggaacttttgacactgaactagttgaagaattttttagagcattgataattaatgcgcgattaaccgttcacattgacttattaagaggtggaaatacacatcatgagattgaggcaatatttaaatcttttgcaagagcattaaagatttctcttgcacaaaatgaagatggacgtattccatcgtctaaaggagtaattgaatgattgcgattattgattatggattgggaaacataagtaacgtcactcgagcaattcaacatttaggatatgatgtgattttgacatgtgatgataaagacgtgcaaaaagctgaagctatcgtacttccaggtgttggacattttcaggatgcgatgcattctatagaagaaaaaagcattaaagatatgcttaaaaatatacatgataaaccgataattggaatatgtttaggtatgcaattactttttcaacatagcgcagaaggtgacgttagtggattggaacttgtcccgggaaatatagtgccaatccaatcatctcatcctattcctcatttgggttggaatgaattaaagagtacacatcccttactgcaaagtgatgtgtattttgttcattcatatcaagcagaaatgtcagaatatgtagtagcttatgctgactatggtacaaagattccgggagtcattcaataccgatgatattggctcagaccacgcatatctacctatatatgcaattcaaaacgacttatgcacaaaagcaatagcgggagaagtgattcaaggaccttataaggctgctaaaagaaatattgcaaattatgaattaaatcaacaggttgatgtacgtctaggcgatggtctaagcgttataaacacagaagaccaaattgataatataactgtttgtggtatgggagggccattaattgcaaaaatattaaacgatggaaaagataaattagttaaccatccaagactcatactacaaagcaacatacaaactcaagcattaagacaaactcttaataaactttcatatgaaatcgttgatgaaagaatcattgaggaaaagggtcacatatatgaaatcgtggtagctgagtttaataataacttagttaaattaaatatattacaagaaaaattcggaccatttttacttagagaatgtaataacatttttcaaaaaaaatggcaaagagagttagaagcactgcgtgatataaaatcccaattgaattcaacatcacatcatgagagactaaaagaaatagaagatgaaattaacttaatacaagaggtgttaattaatgaaaattagtgaactgatggaagttttaaataatcacgttccatttcatcaagctgaatcatgggataatgtaggattattaattggtaatgataagttagatattacaggtattctgacaacactcgactgcaccgatgatgttgttaaccaagcaattgaacttaataccaataccatcattgctcatcatccacttattttcaaaggagtaaaacgtatcgttgaagatggatatggtagtataattcgtaaacttatccaaaataatatcaatcttatagcattacacactaatcttgatgtaaatcctaaaggtgtcaatcgaatgttagcggatcaaataggtttagagaacatatcaatgattaatacaaatagctcatattattacaaagttcaaacttttatacctaaaaattatattgaagatttcaaagacagtttaaacgaacttggattagctaaagaaggtaattacgaatattgtttctttgaaagtgaaggtaaagggcaatttaaaccagtaggt

SEQ ID NO: 3954 - DNA, 3007 bp, Artificial Sequence
  Description of Artificial Sequence: synthetic nucleic acid sequence
atttgtatttttattagatgaatcttcagcaaaagctgtttgtgtagcgaaggttggcgtgataagcgccgtcgatagtaaatatactaaaaatttatttttcttcatcttatgtgtgctcccttaaaaattatttttagttattgtcataacaaatgagaatttgatataatttatcttatggtttataaagttgacaagcatcaacaaaaatgaattacgccttaatacaaatattatactaatcaacattagaaaaataaatccatttaatcaaattttaatataatatgtgtatcatctttacgtaagcaaaaaaatatgcacatttaagtaatcatctgtacggaaatgtattacaataaaaaagaataatgataattaggagtgtgaaaatgaaaaacgcactaaaactttttatcacggatttaaaaagagttgctaaaacaccaggtgtatgggtcatcttagctggtttagcaattcttccttcattctatgcatggtttaacctctgggctatgtgggatccgtatggtcatacaggacatatcaaagttgccgtagtgaatgaagaccaaggtgaaaaagttcgtggtaagaatattaatgtaggaaataaaatggtcaaaactttaaaaaagaatgatagttttgactggcaatttgtgagtagagaaaaagccgaccatgaaattaagatgggaaaatattatgcaggtatttatataccgaagaaattcacacatgaaatcactggtactttaagaaaacatcctcaaaaggcggatatagattttaaagtaaatcagaagattaatgctgtagcagctaagttaaccgatacgggatcgtcgtttgtgattgataaagcaaataaacaatttaacaaaaccgtagcaaccgctttactttctgaagctaataaagtcggactatcaattgaagataatgtacctacaatcaataaaattaagagtgctgtatatcaagctaataattcattgcctaaaattaatcaatttgcagacaagattattgaactaaataaacatcaagacgatttggatgcttatgctaatcaatttagaagtttaggaaagtataaagggaatgtattagacgctcaagaaaaacttaatgctgttaattcgtctattccggcgcttaatgaaagggctaaattgatacttgcacttgatagctacatgcctaatattgaaagaattttaaatgttgctgctaatgatgttccagcacaatttcctagaattaataggggtgtcgatattgcaagtgaaggtattgatgcagcgagtggtcagttaaatgatgcaaaaggttatttgactcaagctaaagcgagagtgggagactatcaagaagcagctggccgcgctcaagatgtgaacaaccaagcaaatcaaaatctaagaaatcaaacatcaactacaccccaaagcgctataaaatcatcgcattcggaagggaagagtcattcaagcattaaaacagtacctgtgagtcaatcaggtgagaatcaacccgtttatggtgataacattttatctaacagtgatgtaaaatcaatgaatacagctttaacagaagctttattatcattatctaatcaaacagatcaacaagcacaagctacccaacaagacattaagtcattaaaaaatatagcatatggtgttatcgcttcagataaaccatcagagtttaaagaaccattaaaaaatataaaatcacgcttagaaaacgcatctaagtataatcaacaatttatagatatcttgtcagagttggaaaaaagtgaacatgttgatctatctaatgaaattaagcaagtgaaagaagcaaacaatagcattaatgataatttaaaaagtactaatcaattaatagatgcattgtcaaatggtagctccggacaattagaagcagtcaatgtattacgtgacttacctaacttaaataaaaggttagatacattacgaaattacattaaaaaagaacttaatcgtaatttactagctgtttctaatgagattactgatcaacttaataaaggtcaaaatacattatcgacaatccaatctaaattaaatactattaaccgagtgattaacgctggtcaagatattttaaatagcggtaaaaagagaattgatacgattcaaactgcattgccagcaatcgaaaacgcatatataaatgcaatgcgaactgcacaagcttacttcccaacagctaaaaaagatgtcgcgaaagctgcagactttgtacgtaatgacttgcctggattagagagagaattagctaatgtaacacagtctgtaaaccaaaaaataccatctttatttagtcgttatgataatgctgtagatttattaaacgagaaacagcctcaagcaaaagaagcacttgcttcgcttgccgatttctcagaaaataaattgccagatgttgagaaagacttgaaaaaagcaaataaaatcttcaaaaagttagataaagatgatgctgtagataagctaatagatacattgaaaaatgatttgaagaaacaggcagatattgttgctaaccctattaataaaaaaacgacagatgtgttcccagtaaaagactatggttctggtatgacgccgttctatactgcattgtctatttgggttggaggattattaatggtcagcttattatccgatgtttccttttccgacttgataaccgtacaagccatctgtcttacttgttttgtttttagataatgacggctgataattataattttttccatacttttgtttaacttgatctaaagtaacagttctggaagcaattttaaattgtacgttgtttgctttatttccattaatttgttgaaatgtctgatcgtatatttttttagtagcagtcttagattcatatttttgatttaccttaataccattaaatgtaacgtttccagcttttaaaccttgataaaatgaattgc

SEQ ID NO: 3955 - DNA, 3253 bp, Artificial Sequence
  Description of Artificial Sequence: synthetic nucleic acid sequence
gacttcaccccaatcatttgtcccaccttcgacggctagctccaaatggttactccaccggcttcgggtgttacaaactctcgtggtgtgacgggcggtgtgtacaagacccgggaacgtattcaccgtagcatgctgatctacgattactagcgattccagcttcatatagtcgagttgcagactacaatccgaactgagaacaactttatgggatttgcttgacctcgcggtttcgctgccctttgtattgtccattgtagcacgtgtgtagcccaaatcataaggggcatgatgatttgacgtcatccccaccttcctccggtttgtcaccggcagtcaacttagagtgcccaacttaatgatggcaactaagcttaagggttgcgctcgttgcgggacttaacccaacatctcacgacacgagctgacgacaaccatgcaccacctgtcactctgtcccccgaaggggaaaactctatctctagaggggtcagaggatgtcaagatttggtaaggttcttcgcgttgcttcgaattaaaccacatgctccaccgcttgtgcgggtccccgtcaattcctttgagtttcaaccttgcggtcgtactccccaggcggagtgcttaatgcgttagctgcagcactaaggggcggaaaccccctaacacttagcactcatcgtttacggcgtggactaccagggtatctaatcctgtttgatccccacgctttcgcacatcagcgtcagttacagaccagaaagtcgccttcgccactggtgttcctccatatctctgcgcatttcaccgctacacatggaattccactttcctcttctgcactcaagttttccagtttccaatgaccctccacggttgagccgtgggctttcacatcagacttaaaaaaccgcctacgcgcgctttacgcccaataattccggataacgcttgccacctacgtattaccgcggctgctggcacgtagttagccgtggctttctgattaggtaccgtcaagacgtgcatagttacttacacatttgttcttccctaataacagagttttacgatccgaagaccttcatcactcacgcggcgttgctccgtcaggctttcgcccattgcggaagattccctactgctgcctcccgtaggagtctggaccgtgtctcagttccagtgtggccgatcaccctctcaggtcggctacgcatcgttgccttggtaagccgttaccttaccaactagctaatgcggcgcggatccatctataagtgacagcaaaaccgtctttcactattgaaccatgcggttcaatatattatccggtattagctccggtttcccgaagttatcccagtcttataggtaggttatccacgtgttactcacccgtccgccgctaacgtcagagaagcaagctcctcgtctgttcgctcgacttgcatgtattaggcacgccgccagcgttcatcctgagccaggatcaaactctccataaaaattatgatgtttgattagctcataaatactaaatagtttgtaacgtttcgttactgtttattggaattaacgttgacatattgtcattcagttttcaatgttcattttcttaccgacaagaattaattatactcttcatggttgtttaagtcaacaactttttgaaattaattttagtcgtttgtttaatgattcgttaagttgtttcgctcaacaaataaacactctacgttttgttgtgtaattattaatagattcttgagtcataccatttagtgatggttgactattaatcgcttgatctaatttttcttttgctctaacaagttcgctattatcttctttatcttgaagtatattaatagcttttgtaacctctggttgaattgcatttatcttacgtaaagcatcttctactgcatttacagtagggtttgtattttcaagaacattatgtgcttcatttttagcggtattatattggttttcgatatttcgtcttgcagacttatagttttgaatactagatggttttttaccattggtattaacattttgtataagtttattgtatgcagtctgtaattctcttttatcagctcttaagtcattcttagcattttgtaatgcttgtaatacttgctctactttagatttttcagaagaaatatcttgagcagtagcatctccattattaataatcatgttcgctttttgtatttcattttgagcttctcgctttttagcgttgtaattattaattgtttcttgagtcataccgtgtgttggatctgtatcatttactgcattttcaagtctgtttttagcattgactaattctgtattattttctttgttttgaagcatgttgatagcttctgttaattttggttgaatagctttgattttgttcaatgcttgagttacttgtgatacttgtggattatcattacctaaaattcgctccgcttcatttttagcatcattaatttgattttgtattctggctttggctgtttcgtattgacgtatactcgccggttttttaccattggtagatacgttctcaattaatttgttatatgcagtctgtaactcattcttatcagctctcagattacttttagcattagttaaagcttgcattgcttgctctactttagatttttcagaagtaatttcttgagttgtagcatccccattatcaatcactctttgtgcagatgtaagtgctctttcagcttcacgttgtttgtcattataattattaattgtttgttgagtcataccttgtgtttgaggtatgtcatttacagcgtcttgtaaacgttttttagcttgtacaagttctgaattattttcttttggttgaagtaaagcaattgcttgattcactttaggttgaacagtatttattttatttaaagcgtctctaacttgttcaactgaaggattagtgtttcgcaaagtactacttgcatccgctttagctgtatctaattctcttctaatatttgaaatggcttcattatagcgtcttacagatactggctttttatcatttgttaaaacatctctatttaacgtatcataagcgctttgtaactgtgacttatcagcacgtaagttgcttttagcttcaacataatctctctgtgcctgttcaactgtgtttttagcatcattaatttgttgggatgttgcgtctccattatttataacgctatttgcatgttgtattgcttgt

SEQ ID NO: 3956 - DNA, 3086 bp, Artificial Sequence
  Description of Artificial Sequence: synthetic nucleic acid sequence
ggtttcatttctaaaaaatcgcgttttgctaagtaatcatttgttgtgattagataagcacctttacctgtaagtgcatttaagtacagaggcatggtagctgtaagcgtcttaccttctcctgtttgcatttctgcaatattcccctgatgcatagcgattgctcctaaaatctgcacatcttttggatacatacctaaaacgcgcttagaagcctctctaactgttgcataagcttgtggcagaatgtgattgagtgaagctttattatcatttaaataaactttaaattcttttgtcttcgcttgaagtgcttcatcactaaaatttgagaactcctcactaagcgcattaatttgatttaatattttgcgcaattttcttaacctaatattattaataatttggttaacacctttagccattcatatcactcctgtgatagtttgatgagtctagatgatgtgtccttatattggttattatttgattaattactttaagttttttcttaggatctatatattgcgttgcctcataagcttgattactatcttctcttaattcttgcacaattatattgtgaaaagatagatgattcatgccagcattaataagttctaattcatatgaatatgcttctctaggatagacaatattttcttttttattttttagaatttgatgactaagaatttctttattcttacgataaaatttcattttaaaataagccgcaccctcaggttcaacttcaaaattaaattgaaattgatattggcgccctttttttaaaataggtagcttagggcttacacggtcttctgcaaaatcagttaacatataccaactgtgaatgattgtaccggatggcatcaaagggttctcaaaatagatattatcttgattaaaacgtaattttgtaccatacataaaagttgatgaattaactagtcgccatttgacttcaaatttcctatcttcttgcatgtgttaccctcccaaatcgctcttccatgattaaattataaaaattaataaaccaatgagtaacagtagcagaatcatcattatgtctaccaggaattcttttacttatcacacgtgcatgttgttttgtaagaacaggcaataaatcttgaaatgcatatttgtcataatcatcatgctccatgtaagcaatcgcaaatgtggtcattgacaaatcactatgctgaatttgcttccaaaaatgattatctaactgaacaacatctttgttagttatgccattttgattcaatcgcaaaatatcaagtgacgttccaaaatcgtttggacgaacgagtttcatattattagcaatagtaccgagatttatcaaaggttttcctacaataacagccgctggatttaattttgtagcgtaataaagtgcgccaaatgatcccattgataatccagaaagaattaattggttgttcgcaaatcccaaataatccaaagcattttggatgaccttacggattgcctgttcataattctctgaccctaggtaaaaggcaccaccttcgattctaggatcagctattaaaataaatggagcattcatacgtttcatcataaagtacccttcaaagccctcagcagtacgatacccactaaaatatacattgagtggtggttttaaatctccaggatggaagtaatgtataaattcttgcttattttcatcactatatcgttttccgcctaatatgaactgccctaattccaagcgtgaccaacgtttatgaatagcacctataaataatgttcctttacctttagctttgattgatacactcacatatgtttgataaggacgagcaggtagttctatgggagtgtctaaatcgtcttgttcatatattagcttttctactggttgatcagttgaataaacaggcgtcaatctcaatgtatattggattttagcatcaccttcaactttaaattctggccatatttgattcaccttattggcatcagcaatgatattttgactccatgtaatgaggggttggtatgattccccaaatcgtcctgatacttcaatagactcatttccattaaattgataagaaccatcaaaatgaatactaacgcgacaatgaataggtttaactttatctccatattgcccaggaaatgtaactgcctctagtttttgttgtaattgttcttcattttcataaatgagtggttttataaaattacgttgtattgtcttatcttgttggtattgattatcccaatactcattgtcaatcacagtattatacggtgtactgactaatgataaaagtttcattaatgaatcagaatatttttcacgtacaaaaacaaaatcaaattgtcctttttcatctaaaatatgtactacaacatcttgatagccactttcaaaatcaaacaaaccaacatcaaaataatcccattcgacattacttttttgattaaataaagaacctaaatcatgaccacctacttgaagtactctaaatttacgtgccacttgaaacatcacctttaaataactgattaatttgatgaataatattaattgaactaaaatcatccgttaatctcatggaatatgcataagaataattccaattttttaaatgtgccaaaaaataatctaaagattctacagtttgcgatatgtcatcaataatatatccattatgcatatgtttaacataatctgttctctttttattaatttgtggtatacccgcgccaatacaacagatttgtaaaaaaagtttcggctctaaagataaatctactacaactcttaattttgaaataacgcttacaagatcttcttcaaacggtactgtttcaatatcaatgattgtttcttttttattctgtatcacgtcttcaattacatcacttatttcctttttctcttggtgatataaatcattgagatgagcaacttcatctataagattttccgtaagattatctctactcttagttaaaattttcaacttatagccatctttatgttgaatatattgaaataagctgtttacaatctctcgtatttcaat

SEQ ID NO: 3957 - DNA, 3536 bp, Artificial Sequence
  Description of Artificial Sequence: synthetic nucleic acid sequence
tatacgctttaataattttttaacgtagcagttaacatagcatttagcttgattataatttgacaataggattaaacatgactttatttcttccttcacttttagccacatgtaccatgtcatcagcatctttaaatactttacgttgagatttacgatcttcttgagttaagtatcctacaccaattgaaactgatagcttgattacttctttgtttggtaggtggaaagaagatttttcaacaccacttcgaatattttctgctaatttcacgctttgatctagtgtgtaatctcttattacaacagaaaattcttcgccaccgtttctaaatattttgaactggtttgggacatagttttttaatagttgagacatttgtttgagaacagcatctcctgattggtgtgaataatgatcgtttacatctttaaagccatcaatatcaatgagaagtaaggctaaactttgtttcttttcttcagctttacttgagacctcatttaagtgtctatcaaattctttcacattacctagacctgtaagataatcgtatttatcttcattttcataacgattgactaaagagaaaaagtgccatatatcaacgaatgttattgctgaagcaattgtaataataaatgaaatagggataagcactaaaatctctacgagttcataaatagggcttaataatgctaaaaataacaaaatgataatgctaatcaaatttaaaataagtaaagaaatgatatcgttttgctttaagaatggtcccactgcactgacaatacctgcaataacgattaatgtaataccataaataattgagtttccaaagataaatacatcgactaaagatacgataaaagcagccgtgagtgtatatatcatgttggtataacgtcctaaaaacaaaagaggtacaaatgttaaatggacgaggtattcgttttgaaatgggatagggtatgccgctaaaagtaaagaaacgaatgtcattagtactgttacatattctttagaaaaaatcattcttttattttcagaatattgtaacctatgaaataaatatatacctgccaccatgacagatatgttatatatgatagcttcaaacatttccataccgactcctttattaaccattagctattgtaagtgaaaacttacaatttgtcatcatctagcaacagaaattacacacaaacaatggtatttaatgttaaaattagcacttaaatggtatgattaaaaaaatgtatagacaatgcaaagataatgtaaaggtcaatctttgtaatttaaacaatagctatgtaacatggatatttataatttaaacattaatcatataattttagttcaatgaaaactacatttatggttgataaatattgcattaaaaacgatagataacaaattttacatagcgtgaggtacaacttattcaatgaaggtgaactgatgtatacactattacttatagcttttactatgatagtcagtttaataattacacccattattattgtaatatcaaaaaaattagatttagtagatcgtcctaatttcagaaaagtacatacgaaacctatctcagtgatgggaggaacggtcattttattttctttcttaatagggatttggctcggacaccctattgaacgtgaggttaaaccgcttatattaggtgcaattacaatgtatatggttggattgattgatgatatttacgatctaagaccttatttaaagttagcaggtcaaattgttgcagctttaattgttacgttttatggaattacaatagactttatttcattgccaattggtccaacgattcattttggcatattcagcattcctattacagtaatatggattgtagcaattaccaatgctattaatcttatcgacggacttgatggacttgcctcaggcgtctcagcattggcattaatgactattggattcatcgctattttacaagcgaacatatttattatcatgatttgctgtgtacttttagggtctttacttggtttcttattctataactttcacccagcgaaaattttcctaggtgatagtggtgcattaatgataggatttattatcggtttcttatccttactcggctttaagaatatcacatttattgcattattctttcctatagttatattagcggtgccatttattgatacattatttgcaatgattcgtcgaatgaaaaaagggcaacatataatgcaagcggacaagtcacatttacatcataaattacttgctttaggatatacgcatagacaaaccgttttacttatttattcaatagcgattatgtttagtttatctagtgttatcctctatttatcccaaccgttgggtgcacttatgatgttcattctcattgtctttacgattgagttgatcgttgaatttactggattaatagatgataattatcgaccaatattaaatttaattacaaaaaaaggaaatggtaagcaacatcattatgatgagcatcaccgttcataataaaaaaacactatgtaggtcataagcacgcgttgctttaacttgcatagtgttttttatttaattggtttcaatatcaaaaggtaatagtttaaggtcttcttgtttcaaatcataatttccagaagtaattcgatttaaaaagtctataaaagcatcatattcattttttactacgtcaatttgataacttactttatcggtataaaattgttctcttaataagaatgtagtagaggcaagttcatattcaaatttacctgtctgatcataatctaacgtaacggttactggaatagcttctcttagttcgactctacctatatcatatatcacatcacgcacggcgccgctatatgctctaataagaccgcctgcacctaacttgataccaccgaagtagcgtgtcacgacgacacaaacattgtgtatctcttgttttttcagtatttcaagcattgggatgccagctgttccacttggttcgccatcgtcgtttgccttttgaatattcatctctggtccgacagtataggctgaacaattatgagttgcatctttatgtatcgaacggatcacaaaggccgtattaaagaagtatatgcggatgacctatcacttctagatggcggacgtaattcatatgcgcaacgaacagtaggaagagaagaccgattaccagatgatgacggcggtcatttaattgcgcgcggattcggaggttctaaagatatagataatctcgtcccccaaagtaaatacatcaaccgctcatttaaagagaacggagaatggtataacatgaagaaagaatggcaaaaagcaattaaaaagggagagaagtaaaaaatattaaaattgaagtgaaatatagcgagaatagtcaaaggcctaataaatttgacgttagttgtgaaattaatggagaagagcgtttgtattcaatagaaaatatttaggagtgagaaaatctgaaaccattctttag

SEQ ID NO: 3958 - DNA, 3260 bp, Artificial Sequence
  Description of Artificial Sequence: synthetic nucleic acid sequence
tattccatacttttcctaattcatggatgatgagatatctataaatgatttgttctaccattggacgtaagaataccatggatataaaagtaactaacaacacatatggtgatttaaatagccctagcgtacgttgttcgtattgcgtgagatgataacttaaatgattaggtaatgatgttccaatcacccgcattataagtaataataaatatacgacaatcgcaactattacaattttaattattttattctttgcaactatccattgttgcttcatcacatcatttattacagattgatgcattttataaaagataactaatattagaccttgagcaatcacaaaacttaaacttaatgaaaaatgatacaaccattgtggtggtgcctgttgtgttatcatggcagtgatccctaatgagccgaaaacaacaatgattggtacgatactttgtaataaaatataagctggtattaatataaaatttctttttaaaactgtcctactgtctgataaatgatgcggtcgaccttgtttctctgaagattgtttaatatccatattgtccctcttctcgcataaaacatttattttcatcttaatatagccgtacaataattttaatgtttttctattagactttcattgtaaaacgcatacattgttgtatcataatattgaaaacgtttttagggggtattgtttatgtcagttttaactgtcatgcaattcatagtcaatattatcatcatgattgtgttattaacgattatgattcttggggttatttggttatttaaagacaaaggtcaaaatcaacacagtgtactaagaaattttcctgttttgggtcgaatacgttatatttctgaaaaaatcggtcccgaattaagacaatatttcttcgctaacgataatgaaggtaaacctttttcacgaagtgattataaaaatattgttttagctggaaaatataaatcaagaatgactagtttcggtacaggtaaggattatgaagaagggttttatattcaaaatacgatgttcccacttcaagcaactgaattacatatcgatcatactgaattcatttctacatttttatatcatattgagaatgagcgcctatttagtagagaagaatacagaaaaagcgctcaggttgatccgtttttcttaactgatgaacatgcagtagtattgggctctaaccttaagcatccctttaaaatcaaacgcttagttggtcaatctgggatgagttatggcgctttaggtaaaaatgcaattactgcactgtcaatggggttagctaaagctggtacatggatgaatacaggtgaaggtggattatctgaatatcatttgaaaggtaatggtgacatcatctatcaaattggtccaggactctttggggtaagagatcatgatggcaattttaatagagacatgtttatcaatcttgccgaacacaataatgtacgcgcatttgaaattaagttagctcaaggtgctaaaacacgtggtggacatatggagggaaacaaagtcacagaagagattgcacgcattagaaatgtgaaaccatatgaaactattaattcacctaatcgttttgattttattaaaaatccaacagatttactgaatttcgttaatcatttacaatcgataggtcaaaaacctgtcggcttcaaaattgttgtcagtaaagttgaagaaatagaggcgttagttaaaacaatggtagagatagacacctatccaagctttattactgttgatggtggtgaaggtggtacaggcgctaccttccaagagcttgaagatggtgttggtttaccgttatttacagcacttcctatcgtttcaagtatgttagaaaagtatggcataagaaacaaggttaaaatttttgcgtccggtaaattagtgactccagataaaatcgcaattgcattaggattaggtgcggatctcgtcaatattgctagaggtatgatgataagtgtaggatgcatcatgagtcaacaatgtcatttaaatacatgtccagttggagtagcaacaaccgatcctaaaaaagaaaagggacttattgttgatgaaaaacaataccgtgttacaaattatgttacaagtttgcatgaaggtttatttaacatcgctgcagctgtaggtgttcatagtccaacggagattacttccgaccatattatctatagacaattagatggcactacaacgtccattcaggattataaacttaaattaatttcttaaatcacaacattgaaaaggagcgagacagaatgctgtctcactccttttcaatttaattatcttcattcattttacttttatcttttaaaccattacgtttgagttgtttaacaaccctatccatactcacatggtcacccttttttgcatctgatgatatgaaacctaaatttttcttaagctgatctatatccgcatctttataatcaatatcgatatgttcgatggcctttcgatctttaaaatcaactttatatgtgaccccgtctatccctttgaatgcttgttcatcatttttaaacatttgtttagcttcatctttatcgatgcctaaatcatcatatttaattgttgctatagtagattgtttgagaacttcatcatctttgtatgtcaaagatgtaatcacttgtttaccgttgacttcgccttcataagtttttgtgcgttctttcccacatgccgaaagagatacagcacttataactaatactactaaaagcgatatgacttttttcatagtagtcgccttctctcatctttaatcatgttaattatatcatctttaatttgaatatgttacttatatgaagataatatctttttatttcgaaaatttaaacatctataaacatggaattcagaatttcactacttagaatgttatactacttttaaagacttattaatggaggaatgactatgccagaatctaaagcgttacttaaatctttaacagatgttaatggtatttctggacatgaaatgcaagttaaatctttaatgaaagattatttaacacctgtgagcgatgatatcgttgaagaccaattaggtggtatttttggtaaaaagaatgctactcatggaactaaatctttaatgatttctggtcatttagatgagattggctttatcgttacacaaattgatgaacaaggatacatttatttcacgccaattggtggatggt

SEQ ID NO: 3959 - DNA, 3831 bp, Artificial Sequence
  Description of Artificial Sequence: synthetic nucleic acid sequence
gtggctcctgcgttaatcgcagtttgaacacattcaattaaaaatggaatttcagttcttgttgcatcctctggagagaattgtacgacttcaaaaaattgttttgcataagaaacgtgttcttttattgatgttaaaacttcatcttgagtcatttttaatttatgttctaaatgaataggggaggttgcaatgaatacatgtacttgaggttttacagcttctttagtggcttcatatacagcatcaatatcagattttttacatctagctaaaccacacactgctgttgtagtcaaagttttagctatagcttctactgatttaaagctaccagtactagaagcaggaaaacctgcttctagtacatctactccccatttttctagttgcttggcaatttttaatctttcatcaaaagtaaaattgactcctggcgtttgttcaccatctctaagtgttgtatcaaaaatttgaatatgttcttccattaaaaacacccctctactgttgttatttttcaatacttttagatttaatgaatggcatcatttctcttaattcacgtccaacttgttcaatttgatgaccatgttgatcttcacgtaattgatagaattctttaaagccatttttgttatcttcaacaaatctacggctaaagttaccattttgaatatcttcaagtacttttttcatattttctttaacattaggtgtaattactcttggtccagaaacatagtcgccaaattcagcagtgttagagatagaataacggacattttccattccgccttcatacattaaatcaacaattaatttcatttcgtgtaagacttcaaaataagctaattcaggttggtaacctgcttccacaagtgtttcgaatccactctgaattaatttggaaactcctccacaaagtacagcttgttcaccgaataaatctgtttcagtttcttctttaaatgtcgtttcaatgaccccggcacgagtagcaccaatgccttttgcgtagcttaaagcaatgtttctagcttggcctgtagcatcttgttgaacaccaaataatgctggtacggcacttccttcaacaaatgtacgtctaactaaatgaccaggtcctttaggtgctactaaaaagacatcgacatcactaggtggttcgataacactgaaatggatattaaaaccgtgtgcgaatgctaaagcatttcctttttctaaatatggtttaatttccttgttatatacttcaccttgaatttcatcaggcaatagtaccatcactacatctgcttgttgtgttgcttcacttaccgtataaacatcaaatccatcttctttagctttattaaatgatcgtcctggacgcaggccaatgactacatcataaccattgtcctttaaattttgtgcatgtgcatgtccttgtgagccataaccaatgacagcaatttttttaccttgtaatgcatcctgagttactgtttcgtcgtaatatacttttgtcataataaaatcctccagtcattttatagaaagttctgaattttcaaaataatttatgcgtaaaaggtgcatgatgttagttatgtttagttgattttttaactagcgcatcaaaacgtttattcacttttaacacttagtacatttacttgttgtgatagttttttaagaacaattttaaaagtatcatcatctttaatattgactttaagtttcatattagaaattccttctttgtctgaatgtttaacatgaagttcatcaatattacattgtaagcgaacgaaggcgctagtaattctgttcaaagtactcacttgatcaactaatgtaaaatgaattgttcgttccattagtaaccctccatttcatgatttgatttgccactaggtaccattggattaactggttctataggtgagattctaacttcaatgagtgccggtccatgatatgcaaatgcttcatcaattgaagattctaatttatctggagaatctatcaagaatcccttaataccatatgcttccgccattttcataaaatcaggttgatcgttaaatacagaatgagaaaatcgtttattaaagaatttatcttgccattgttttaccatacctaaagttccgttattaataagtactattttgacattaagtccatattctggaagtaaagccatttcttggttcgtcatttgaaaaccgccatctcctacaaaacatacaactgttttctcaggttcagctaattgtgctcctattgctgatggaattccaaatcccatagtacctaaaccaccacttgttacccattgtccataatttttaaatggatagaattgtgctgtccacatttggtgttggcctacgtcagttgtaacaattgcatttccattggtaactttgccaatatattcaatcgctttttgtggtttgcaaaagtttttatcattttcatcatatttaaatggatagttacttttgttattaatacaataatcgttccattcttcgtgggaggatgttaaaacttgctcatggcataagttctcaagcacaagcttgcaatcagcgactatacctaaatctgtattaataactttatttatttcagaagggtcgatatctacatgtacaacctttgcatttggtgcgaatgcatcaggcttacttgcaagacgatcatcgaatctactacctaaattgataagtaaatcacaatttgttaaagccatattacttgcataagatccatgcatacctcccatacctaagaataaagggtgatgataaggtactgctccaagtcctaggagagttgtaactgtagggatttgatgtcttgtcacaaattctgttaataaatgattagatttagagtgattaataccagcacctgcaagaataagaggtttcttagcttctttaatcatatatattaacttattaatatcctctttatttgggttactattaacttcataaccaggaatattaatatcttttgtaagttcaacatcagttttaagcacacccatatctttagggaaatcaatcactacaggaccttttcttccagtgttcgctaaatgaaaggcttcatgaacaattcttggaatgtcttcaatctttttaacttgataattgtgttttgtaataggtgtagtcatcgagagtaaatcagcttcttggaaagcatctttaccaataccaggtgtagcaacttgaccagtaaaaacgactagtggtaaagagtcgctatatgcatcagtaatacctgtaatggcatttgttgcaccgggtccacttgtcacaacaacgactcctgttttaccagagacacgcgcatatccttcagcagcatgtgtagcaccttgttcatgacgagcaagaatatgtttgattttcccgtcataaaatgtatcgtataaaggtaagacagctccaccgggataaccgaagataaaatctacatcttcctgctgaagtgcttcaactaataattgagaaccactgcgtgttattaagggttgtgattcctttgtttgatgcacagaagggtgaggcgaagccattgatttttgatttgacattttaatcatctcctaattaaataaggttttccggaacttgcataatacctccagtattagcgcttgtgactaaactagtatatctagctaagtagcctgttttaacctttgctctgaatggttcaagctgatttttacggcgatacagttcttcttcagattgattgacgtttagagttctattgattaaatcaatcgtaattttatcaccatctcttatt

SEQ ID NO: 3960 - DNA, 3290 bp, Artificial Sequence
  Description of Artificial Sequence: synthetic nucleic acid sequence
taccaccctcgtatgtatgaatattattcgcatacgttaataagttggttgcatatccactgttatattgaagtgcaatttccacttcaatatcgtctttagactgatggatatatataggttcatcgtgaagaggttctttattctcatttaataaatctacataggatttaatcccgccttcataatgatatgagtcttctctaacttcctcttctctttcatcttttaaagtaatttgaatacctttatttaagaaagcaagctcacgtatacgcttttgaagtgtttcatagttataaactgttgtctctgtaaagatttctttatcggctttgaatcgaatagctgtacctgttttatctgtatcgccaatttctttaagatcaaattgtggcacaccttgtttataggcttgatgataaatcgtgccattacgatgtacataaacttcaagatcttgtgagagtgcattaacaactgaagatccaacaccgtgaagaccgccagatactttgtatccgccacctccgaatttacctccagcgtgaagtacagttaagataacttcgacagcagggcgtcccatcttttcttgaatatcaacaggaataccacggccattgtcagtaactttaatccaattgtctttctcaattacaacttcaatatgactagcataacctgctaatgcctcgtcaatactattatcaacaatttcccatactaaatggtgcaaccctctttctgaagttgaaccaatatacatacccggtcttttacgaaccgcttcgagaccttctaaaacttgtatctgtccagcaccataattatctgtgttgtttacatctgacaatgtattcaccatcactttctcgttactttagtatttcaccttgactaatacggtataacttagcgttattcattatttcatgatctattccttcaactgacgtagttgtcacaaatgtttgtactttatgttgaatcgtacttaacaaatgtgtttgacgtgaatcatcaagctcactcaagacatcatctaaaagtaagattggatattctcctacttcaatattcattaattcaatttctgccaacttaattgacagcgcagttgtacgttgctgaccttgtgaaccatacgtttgagcatccatgccatttacattgaaacttaagtcatcacgatgtgggccatagagacataaagctataagtcgtgtacattataataatgttacaggtaactttggctatattcaaaaagatcaagcaagttatcaattcagttcaaattcaccaaaggataaaaatgtgaagttatatcgtatagatttaaataaataagaagaattggatatacgttttataagataaaatagtttgaaatttgaagagtttaaagttgaaatcataatttgtaaaatggatttcactttagctcttcttttcattttagttgctaatgatgatatgattaatcattatgttcaagtaaaattgtaagatgtatgataaaattttaatttgaaaatgattaacttatgaaatctacaaattacatcaagatttaaatgaaaaggagtaaatcatgcgtacgaatgataaagtattactcgaaaatattaatgattattttagtcacaaaggaatgtcaccacacttaattgatgatataaaagaaaaatatcgacaagatattaaaaagtctgaagaaaaagatcaagattacattgaatatagaggtaaatcacctgcgcaattaatattaacaattcagcgtaatttgtttgcattacaactcaatccaatgattttctttatcattaactttattcttatttcatatttgtacgataaacaatatgtaccttttcaagcaattaccggtataagcttgttttattgcttagttatatttccaataacactcattttatatgtgcgtattgccaaaaaaaattatctatacagtaataagtatgaaatgagaactggaataatcattggtattattgctttaattctagtaattatgcaagggtttcactttaactgggctatagatttttttaataatgttgtatggtggtcatttaaaagtaccatctcaattgatagacgaatcgcaacatagtctgttaataagtacgcatcattactttgtgtctgtgaccgatgatacatgattcctgcccaacctggtaaagataataaatgactctcaatatatgattgtcgatgttcttcttttactcctaattcttgaaaggcgtactctattgcttcggttgcttgatttggcaaatgtgctaaagtaagtcgttgtttttttgtgaataatggatcatgtttaactaaacgttgccaggcatgatagaatcctttttctctttttggcatagtccaacttgattgaaagtcatcaacatataatttagaccacttaatcatatgagcatttaaaatatcaataagtcgtgtaccttcctttgtgaaaacactagcactttgcgctatcacatcttcttttttcttataatccttaaaattagtttgtacccatttttccagtttctcgttatcttttgtattaaagtaaccttcttcaatcgtttttaaatttttcgctctttgaatatatgtgttgatatcactgtcagatagtgacctattattataatgcgcacgattttcatccaaccgttcttcaaatacttttaaatctatttctttattactaatcgctctgtgaatagtagacgcattaggataaatgtcaacatccctcacactttttaaccaacgtgccacttgatcaaacgaagcatcttctagcccctcccacggattacgggcagcaaatgttgaaatcggtgataaaggtgtaattacacgtttagcctgattgactaattcattgatatctgattgaagcataattctatcctcctttactaaaatcgttttaaatatgatggatgactttctatagattgggttttagcctctcctactttaataagccacaagtataacttcgcaaatgcctttgattctcttcgccgtgatacccatatgcttaacatactgccgaaaactataatagcaatcgatagaataatacttatgagtggtggtgaaacaatatgaatatcaacgttacttaatgtcgtgaagaaataatgatgcgtaataatataaacaattactacaacaataatcatacatactccgatgactcttccgatgagtccatgactaaaagcaactaattgattcca

SEQ ID NO: 3961 - DNA, 3520 bp, Artificial Sequence
  Description of Artificial Sequence: synthetic nucleic acid sequence
tctaaaagttacatttggcaatgaacctagcgatgaaacagtgttacgattcataacttttaaacttattcctttattaaatcaaacacacggtaagaagaaacctattcaaaagcataaaaagattaatccaaaacgtttacaacgtaaaatcgctaaagaacaaaaagagaccaatttaactacatttgctcaacaagcgattaaagaagaacaagagttgaataagctaaagagtaaaaaacttcagcgattagaaaaagaacgacacagacaatacaaaagaatgttaaaaagaaaaaaagcacatgaaaagcacaaaggtcactaattttaattgagtctgccacatatattaaatgtgttgcaggctcaaaactttttcaagttaatatagataacttaaatctaccaatttgaagttaatcatttcttcatttttaattactcataaaaactacgaattcatcatgcttttagttattatccaacgcttgtaggttaaaaaaacaacgatctcctttattaattacatcgtcccagttagcatcataattatatccgagtttttgtgctaatttaatagaatttgtattatattgatttgttcgaattaattttggtgttatggtatcatgcttttttaaatgacgggcaatctcctccattgactcaaaagctaaaccaacaccagtatacgatggaaagattctataatacgcattaagaaactgttgttgatgaattgtacgatactcaaatcccgctatccccactacttcgtgattatctctcataattaaaatgaagtaaccaaattgatattcatcccaatgcctcatccatcctttaataaaatcttgggttgctactttattctgatgaatacctttaggtgtatactttgtagctaccttatttgtatgcaattgataaagttcatctgtataactcaaattaggcttcactagctttaatctatgtgtttctaacatctacatccctctttccaataaattattcaattgtagataacttaatattgtttacgcactcttttcactattgagaagagtatatattgtatttagacttacgtcagtctcacccaaaaaattcacataacattcaattttgacactatagttcaccttaaatttatacttatttactagtaaatgtgtctaatcaatgatcatattgtgtctaaaatattacaaaatggaataggtagtattataaatatgtatttttgttatatagcctatcgtcttataataggaatcagcgcaataatttaattatttttgcacgaattcttaaaccaaagaaaggtgagcaaaaaaatggctaataaagagtcaaaaaatgttgttattattggcgctggtgtcttaagtacgacatttggttctatgattaaagaattagaacctgattggaacatcaaactctatgaacgcttagatcgtccaggtattgaaagttctaacgaaagaaacaatgccggtacaggacatgcggcgttatgtgaattgaactatacagtacaacaacctgatggttcaattgatatagaaaaagccaaagaaatcaacgaacaattcgagatttcaaaacaattctggggtcacttagtaaaaagtggtaacatcagtaaccctagagatttcattaatccacttcctcacattagtttcgtaagaggtaaaaataacgttaaattcttaaaaaaccgttacgaagcaatgcgtaacttccctatgttcgataacatcgaatatacagaagatatcgaagaaatgagaaaatggatgccattaatgatgacaggccgtactggtaacgaaatcatggcggctagtaaaatcgacgaaggtacagatgttaactacggtgaattaactcgtaaaatggcaaaaagtattgaaaaacatccaaatgctgatgttcaatacaaccacgaagtaattaatttcaatcgtcgtaaagacggtatttgggaagttaaagttaaaaaccgtaattctggagacgttgaaactgttctagctgattatgtatttatcggtgcaggcggtggcgctattccactattacaaaaaactggtatcccagaaagtaaacatcttggtggattccctatcagtggtcagttcttaatttgtacaaaccctgatgtaattaatgaacatgacgtcaaagtatatggtaaagaaccaccaggcacacctccaatgactgtaccacatttagatacacgttatatcgatggtgaaagaacattattatttggaccatttgcaaatattggccctaaattcttaagaaacggttctaacttagacttattcaaatcagttaaaccttataacatcacaacattactagcatctgcagttaaaaacttacctttaatcaaatactctatcgaccaagtattaatgactaaagaaggttgtatgaaccatctacgcacgttctaccctgaagctcgtgacgaagattggcaattatacactgcaggtaaacgtgttcaagttatcaaagatactaaagaacacggtaaaggattcattcaatttggtacagaagttgttaactctaaagaccactctgttatcgcactattgggtgaatcacctggagcatcaacttcagtatcagtagccctagaagttttagagaaaaactttgctgagtatgaaaaagattggactccaaaattacaaaaaatgatcccatcatatggtaaatctcttatcgatgatgttaagttaatgagagcaactcgtaaacaaacatctaaagatttagaattaaattattacgaatctaaataaaatactttccctgtaaaatataaaaatgatgaagagaaaataaataagtataaaatatttctccctatactcaaaaccttaattaatattaaattagagtaaataaatttagaaacaaaattaacccctacccctgatacctccaacgaagtcgagccaacttcgttggaggattttttatattctttcttagcgaattaagtatctgtcacagtaggtatctaacaaatcagcgatacagcaaaatttataagttgtccttttttaaactcaataatttaaaataactaatcacacgattccgtcacaatttattttttataaacaccgtttctatataaaaaacaaacttgcctctctttatataaaaacaaactcaaatatcatctcattatacatttttaaaaacgtagtttaacccattcactctttatataaatatgttcattgtactaaggggtatttgaaattccatgttgcaagtcatcatagatacgaagaagtctatgaattgatttaatttcagaatataatcgaacggaaccttcaacaatttcataactctactataaaaaacacccgtcctaagacgagtgaaaaaaaaaagagttagaaataaaaggaaactaaacataaaaagaacaatataatagatgatggtcaattgatgtattata

SEQ ID NO: 3962 - DNA, 3898 bp, Artificial Sequence
  Description of Artificial Sequence: synthetic nucleic acid sequence
agcttcaattgtttgaggcatcacaccatcatcagcggccacgactaaaattgtaatatcagtaacttgagcaccacgtgcacgcatagtcgtaaatgcagcatgtccaggagtatctaagaacgtaatttttttacctgaattttcaatttgataagcaccaatatgttgagtgattccgccagcttctccttctgtaactttagtgttacgaatagaatctaataaagtcgttttaccatggtctacgtggcccatgattgtaacaactgctggacgttcaattgcatcagaatcatcagtctcatcatcaaaataaattgataaatcttcttcatcaacgactacttctttctctatttcaacgccatagtcatctgcaattaattctaatgtttcttcatccaatgattgattgatattagccataatacctagtaagaacaattttttaataataccagctgattctacatttagcttttcagctaactcaccgacagttatgccttcttgataagtgattttagagggcatttcttttgtttctgctacctcattttgaggtttattatttttattattctttttatttttattgtttttttgattcttattagttttattgtttttattttgctgttttcctttgttgttttgttcttttttcttcgttggtttactattattcttactttgttgtttttctttatcgttagaattttgtttattattagatttttggtgattattttgagtattttgtttattagtgtctttcgcttgagaggctttaaattttttatctaatgctttgatttgttcttcttctaaagcttgcatatgatttgacacttcaacattcatactttttaactcatctataatctctttactctttagatttaattctttcgcatattcgtaaattctttttttactcatataatcactccttaccatattcatctatcattgataacaatttttttgcaaaaccattatctgttataccaatattaactctatcgcttttacctattgctaaccctaattcatttctagtaccaaacacttttaatggcacttggtaactattacatttattattcatttgttttagagtgttactagatgcatcgctagctaatatgacaagttttatttgattctttttaagctcatttaagatgaccgattcgccacttttgattttaccagctctcatagctaaaccaagcaaattaaaaattttcattttagtcattattttgggatctcttctctataaatcagtcttattatttctttataaacaggatcaagtgtatctttagtagcgttaaaatatttttctaaaacttctctttgttgagccttttcaactaaagctacatctttagacacatatgcaccgcgcccttgtttttttcctgtcgcatctgcaaagatttcgccttctttgttaataaccactcgaatcatatctttttttggacgcatttcattagatataatacattttctcattggaatttttttctttctcattaatttatcactccaacctatgattctgtgtcattatcttcttctgttttatcttttttatcttcatcattttcagcagctaattctgtactagttaagtttgtctcttccaagttaacattatcaaactcaacatcttcgtcaccggaattaacaatttcatctgcaacttcttctgattcaataacaggataaattccagcttctcgggcatcagattctgatttaatatctatcttccaacttgttaatttagcagctaaacgtgcgttttgccctcttttacctatagctaaggataattggtaatcaggaactacaactacagttgattgattctcttcatcaacaattacttctaaaacttgtgatggacttaaagcattacgaacaaatactttcggatcttcatcccattggacgatatcgattttttcgccaccaagttcttcaacaaccgcttctactcgtgctcctttagaacctacacatgcgccaacagcatctatatcaggattatcagaatacacgctaattttagaacgatctccagcttcacgcgctactgatttaacaataacagtaccatcataaatttctggaacttcttgttcgaataagcgttttagtaatccaggatgacttcttgatacgtaaatttgtggaccttttgtagtctgttcaactttatttacgtacaccttgatacgttcattaggaatatatttctcattaggacttctttcagcttctgacagcacagcttcaattcttcctaaattcacatatacatagcgatggtctacacggtcaatcacacctgttagaatatcttcttctttatcgataaattcatcatataaaatttctctttctgcgtctctaagtcgttgcatcacagcttgcttagctgcttgagctcctacacgtccgaagtctttcggtgttacatcttgttcataaatatctcctacttcataggcaggatttttgactaaagcagtacttaaatcaacttcatctctgtcatcaaacacttcttctacgacttctttacgtgcaatcactctaaatgaaccttcgtccatatttaattctactcttacatttctggcactatcatagtttttcttgtacgcagtaattaaagctgcttcaattgcatcaattaaaacttctctaggaattttcttttccttttctaaatattcagtagctaataataattcattacttgacacgttttttcctcctcatcacgttaaatcattacagcgtgacgtgcttttgctattttatttcttggaatttcaatttcttttgtttttgccttttctttaacttccatattaattgattcatcatttacagattttaaaacacctaaccattctttatctccttcaattggtgcataaagagatacaaaaatgggttgattgatagcattataaaaatctttttctttttttattggtctttctgcccctggcgatgcaacatcaagataatacatttcaggtattggatcattttcatccataacttcactaattttttctgaagctatagtacaatcattaagatctacgccaccttctttatcaatggaaatccttaaaaaatggtctttaccttctttaacatactcaatgtctactaattcaaagttcaaatcatttaaaactggttgaatcaatgcttcaacttgctcagtaattttactcatacaggcctccttttttggcaaatagaaaagagcgggtttatgcccactcttctgcctgagttaatcattttttacgcatatttagtatatcacaagtctaataagtaaacaaactgatatagggttactaataaagatgattgaacatatatgatatcaatttagtaattagaaatgcttacatatcaaatatcgacaattgtgccttgtcaggtaaatctggcaatgagcctaattcatctaaatagtcaataaccttttgagataagccggcttttttatttaaatcttctttggataaaaatggtccctcttctctcgcttcaacaattctttgtgcaacgttttctccaagtcctggcactgaaatgaatggaggaatcaatgtatccccttcaatgatgaagtcaaaagcttggcttttttctaaactaatcggttgcaatcgaaaacctcgatgcgccatttcattcattatttctaatacagttaatacatctttctcttttttccctaaatccatatatcgtgaatacatatctttaactgtattacgaatactcgttttatctttaatcattgttataaggtcaaaatcggaagctcttatggtaaagt

SEQ ID NO: 3963 - DNA, 3720 bp, Artificial Sequence
  Description of Artificial Sequence: synthetic nucleic acid sequence
catacagaacatcttgttatttctttaggtggaataggaagttttgatggcggtgcaggcatgttgcaagcattgggtgcaacattttatgatgatgaagcacaaattgtcgatatgaggaaaggtgcatatttaataaaatatattagacgtattgatttatcaggtgttcatccacaattaacaaaggtaaacattcaattaatgtcagatttctcaagtcgattgtatgggaaaaaaagtgaaatcatgcaaacatacgaatcattagatttgtctcaaaatgaagcagccgagatagataatttaatttggtattttagtgaattatttaagaatgaattgaaaatagcaatgggaccaatcgagcgcggtggtgctggaggtggtatagcagctgtattaaatagtctctatcaagctgagattttaacaagccatgaattagtgaatcaaatcacacatttagaaaacttaattcaacaggcagatcttattattttcggagaaggtttgaaagaagaagatcaaattctagagactacaacaatacgtatagcagaacttacccaacaatacagcaagccagctattgcaatttgtgctacaaatgataaatttgatttgtttgaatcattgaatgttacagcaatgtttaatacatttattgatatgcctgattcatatacagattttaagatgggtattcaaatcagacattacacagtacaagcactaaaattattgaaaacgcaaataaacttaccgctttcatcctaatattagaaaaagtttttatacacatttaatttaaaagccattgacagtaagagtagctttagagctacatactgacaatggctttttatgttatttataagattgatggctgtttgctacttcttgagcaataccaacgacaacatgaacagccttttccattacatcgatagaagcgtattcaaaaggaccgtggaaattgccacaaccagtaaaaatattaggtgtaggtaaccccataaaagataattgtgatccatctgtaccacctcgaataggttcagtgttaggtacgatgtctaaagcctcaaagacacgtttaggtatatcaatgatgtgtttcaaaggttcaattttttctgccatgttaaaatattggtcatgcacatctactttaattggaaaatgattataatgaacattaatatcatcacgaatttccatcatgcgttttttacgtagctcaaactgttctttgtcatggtcgcgaataatatattgtagagttgctttttcaacattacctgtaaaattcattaaatgatagaacccttcgtatccttcagttctttcaggcacttcatgtgagggaagtaaactattaaactgttgacctaaactaattgcattaaccatggcatttttagctgaacctggatgaacgttaacaccatggcaagtgacagttacctctgccgcattgaaactttcgaattgtagttctcctaattgactgccatccattgtatatgcaaaatctgcattaaatcgactaacatcaaattgatgcgggcctcgtccaatttcttcatcgggtgtaaagccaactcgaattgtaccgtgtttaatgtcaggatgatcaattaaatactttatcccttccattatttctacaacacctgctttatcatcggcgcctagtagagatgtaccatctgtcaccattagtgtatgacccacaactttatttaattcaggaaaaacatcaggatctaagatacgctgagattcaccaagtttgataggttgcccattataggcttcaatgatttgcggatttacatgagaagcattgaaatctggtgaagtgtctacatgtgctaaaaaaccgacagtaggtacattataattaatattgctttcgagtgtagcaaataagtaaccatgttcatccatgtctgttttaagacctaatgattgaagctcttcttctaatagatttaataaatcccactgtttattcgtagatggtgtcgtcttggaatcaggattagattgtgtatcaatttttacatatctcgttaatctttcgataatttgtttcttcatacgagttcatccccttagatttatactctattattcatattataggattttttataagttttacccttgattttaccataagattgcttgatgcgtgaataaatgtaatagactatttcagatacaagtataccgaatgcaattgcaccagaaattaatgttacctctaaaaaagtattaactgcattcgtataattatttgatactaaaaatcttgtagcttcatatgctgcgccacctggaacgagaggtataatgccggggacgataaatataataacaggttgcttgtaccgtctactcattgtatgactcattaatcctaatattagacttcctaaaaatgaagcgccaactttacctaaatccatacctactgtcatctgatatattgtccaagcaacagctccaacaaatccacaagctaatagcaattttttaggtgcattaaatataattgaaaaaaggactgtggcaatgaaactaatgataaagtgaaacagataaataaacataactaacagcctttcttataataatagtaatacaatagctactcctgcaccaatagcaaatgcagttaaagcagcttcaacaccacgtgacataccagcaagtaactctccggcaagtaagtcacgaatagcgttagtaatcaaaataccgggaacgagaggcatgacacttgcaatagtaataatgtcttgatttttagctatacctagtttagtgaatattgctgcaatactaataacaacagcagatgctacaaactctgaaaagaatttaatttgtatatatttttgcacgaaactaaacgttaaaaaagctatgccacccgctaggcatgcaatccaagcgtcggaagctacgccaccaaacatgaataagaaaaaaccacaagctacaaaggcagcaatgagatttgttaagaaagaatactgaagagacgcacgtttaagttgcagtaactcactttttgcttcgtcaattgtaagttgcttactcgaaattttacgagataggctattggttaaagcaattttctcaagatcggttgtacgttcgcgaatacgaatcaacctcgtactagtacgatcatttaatgagaaaataattgcagttgatgtcacaaaactgtatgtatcatgtaaaccataactatgggcaatacgattcattgtatcctcaattcgatatgtttcagcgcctgcttcaagtaagattcgcccagcaattaagactacatcaatcactttattttcatcaatgatagtgattgaatctgacatatctcatcacctccgaagctatttaatatttttatgaacaattgaagtttacaacttgaagacttaagtttcaatagacagcttgattttaataacattttcaatactaattaaaaatagtaaaaaatgctatgcataactgtatacgctttaataattttttaacgtagcagttaacatagcatttagcttgattataatttgacaataggattaaacatgactttatttcttccttcacttttagccacatgtaccatgtcatcagcatctttaaatactttacgttgagatttacgatcttcttgagttaagtatc

SEQ ID NO: 3964 - DNA, 3585 bp, Artificial Sequence
  Description of Artificial Sequence: synthetic nucleic acid sequence
ctgcttttggtaagattgttggcggtggtttaccaattggaggctatggtggtcgacaagatattatggagcacgttgcaccattaggtccagcttatcaagcaggaacaatggccggtaacccgttatctatgagagcaggtattgctttattagaggtacttgaacaagaaggtgtttatgataaacttgatcaattaggtcgtcgtcttgaagaagggttacaaaaattaatagataagcatcatattacagcaacaataaatcgaatctatggctcactgacattgtatttcacaaatgaaaaagttacacattatgaacaagttgaaaactctgatggagatgctttcgctcaattctttaaattaatgttgaaccaaggcattaatctcgcgccttctaaatttgaagcatggttcttaactacagaacatactgaagaagatatcgatcgcacactagaagcagctgattatgcatttagtaaaatgaaataacctacagtatgagaacttgacacattaactatgtgttcaagttctttttatgttcaattatggattaactgttgaaaatttaatggaaatttacgttttcacttttccaaagcaaaatttattatagttcataaaatttaatagcttttaaagtacaaaataaaactatttgcttaatttcttaacattttgcatctaaaaaccaaattgcgtatagataaacttgattatttaagttcaggggtgtataacaataatgaatgagagtattatttttactcaaaataattaaaaggagcatttaatttgagacttggagctcggattttcaaaactggtatagccattatcttagctatgtctatcgcttctttacttcctgataatattggtctaaaaacgttagcaggtgtcagtgcagtagttgccatgcaaccgagtgtttatcgctcaatcaaaactgtttctgaacaagctattggtaatgtgattggtgcattacttgcagtaacaatggtaacgatattcaataataatttcattatcatgggcgttaccgttattttactcattgcaattttgttccaatttaatcttgcccatgtagcaacacttgcaagcgtaactgcacttataattatggggcaacacactggttctttctatgttgtcgcattttttagatttgtactagtgatgattggtgtattgagttcttctgttgtcaatctaatttttttacctcctaagtttgaaacaaaaatttattataattctatgaatatttcttctgatatatttgtttggtttaaacttgtactcaatgacacatcagaatttcataatattaaacaggatggtgatcaactaaactcacgcatcaataaattagaaaagattttcgactattacaatgaagaaagaccattaacaaaaaaacatatttatcaacagaatagaaaaaaaatactatttagagaagtagttagaacgaccagacaagcatatgaagtgctaaaacgaatgtcacgatatcaaaatgatttatatcaactaaataatcaattacttttacaaatcaaattagaacttgattcattagttactttacatgaacaaatatttaagagtctatcaaaaaaagctagatatgatgtcactcaattagattatgaagttgacaatcctcagaagaaaaacttgatggatgcttttcagcaagaattaattaaaaacccacatcagacgcaatattcttatagcaatatgatgcaaattattgctgaaattgaagaatacagatatcaacttgaacacttagatagaatccgtttaagtttctttacctatcaccgttctgatactgatatagacatttcaaatgaggactttgacttataataaaacggtaaatcagaattttattggattaatcagtgaaattctcctagttagcagttttgattataggtaaaatagttcttatttttaataactgccaacagtacaaaaatgcctgagacaataacagtctcaggcattttcaatgttataagtgctttataaattttgaatactataaagatgctcataagcaccacgtttattaattaattgttggtgtgtgccagtctcaacaattcgtccattttccattacaactattctatctgcatgagtaatggtagatagacgatgtgcaacaattaatgttgttctatccttacttaaaacatcaagtgcttcttgaataatagcttcactctctaaatccaatgcacttgttgcttcatctaatattaaaacaggaggattatttaaaaagatacgtgcaattgacaacctttgtttttgtccaccagataatttaactcctcgttctcctacttcagtatcatatccattcggtaaatttgaaataaaatcatgggcattcgccatttttgcagcttctacgacttcatcatcagtcgcatcaggcctacccaacaaaatattctccttaaccgtatcagaaaaaagaatattatcttgttgtactaagcctatttgattccttaaactaccagttaggaaatctttaacattatgatgatcgataagtatttcaccttgagtaacatcataaaatcttggtataagattaatcaaagtagattttccaccaccactcatacctacaaatgctacagtttcgcctttgttaattgttaaattaatatcgtgtaatacttctttttcattttcattatatttgaaactcacatgttttaaatcaatttgacccttactgattttaattggctgtgctccaatgccatttttgatgtcgtaatcctcatccattaactgaaatactctgtccatagatgcaaaactttgtgtaagtgtagtaaatgaagatactagtcttctaagtggtccaaataattgttctagataaccgacaaatgctgctagagttccgacagtaatcgatcctgtaattgccaaatatgaacccacgccaatcacaattattgggcctaaatctgtaacagtattaatagcagcaaaagaatatgcgttccatcttgtatgttggaaggctcgttgtaaaaaattcttgttatggttatcaaaatttttagcttcattgtcttcaatagcaaaacttttaataacagacattccttgaacccgctcatgtaagaaaccttgtacttctgctagagcttgtgagcgcacacgtgtaagttttcgtaatcttccaaagaaaaaataaacagttaaaatataaaatggaaaaataaaaattgcagcaaacgtcaattttacatcaaggaagaacataatagaaagtgcgataataatcgttatacagtcaagccagatattcatcaatccagtaagaataaagtcttttgtttgttcgacatcattaatcactcttgaaatgacttgaccgacttgattatttgcataaaagcgaacacttagtgcttgcaagtgattatacaattgtttacgaatatcatatagtattttattacttgtccattgagctaaatattgtctaataaactcaatcggcgggcgaacaatt

SEQ ID NO: 3965 - DNA, 3089 bp, Artificial Sequence
  Description of Artificial Sequence: synthetic nucleic acid sequence
acgcaaatgatgaagcagcttctccaactagcgaacaaaatgcagctatagcacaagcaaagtcatatgcaaatacattacctatctctaagaaaagtttatacaaacaattaacttcggaatacggagagaaatatccggcagacatagcacagtatgctgttgaccatatcagtgtagattataaaatgaatgcactgagattagcaaaaagttacgtaaaaaatataaacatttctaatcaagcgttatatgatcaactcgtttcagaaaatggagaaggatttactcctgaagaagcacaatatgcaatgaatcatttagataggtaatcattaagaaagagttttaacattaaaggtttgttttcttagttgaaagcaaacctttaatatattcgtataaatataatctttatagactgtaaattcagttattataaaattttatagttacaattactttcaatcttttaaaatgtcatcgatatagagaaaattctccacctagtaggttaaactcaattttctatttaatttttataaagtagaatgttaaaaattgagaatttagtacatttgtttatagacattttctccctgaaacaagataatctgattcttcatcttttgtcattttatttgattgagtgcttactggtgagtcttgtcttaatgctttttcaacatttgattttaccatttgattaagtaagttagtaaatgattcaacatttttccttgttttttcagcatcagtatttactaatatattaacaatttgatcatcgaagttttctaaacctgactcattaagcattgattcgatgattgaaaatcttaaatttaaatgatgaaatgtgccagtattataatccgaatgatattttagtttgctttacgttgacattcttcacaaataccatacacttctaatttatgagtatgaatatttacattgggtaattgacttttaatcttttctattggacaaaaatcaatcactttagtttctccgcaattttcgcaaataaaatgatgatggtgatgatttgtgcatgcgattctgaatttcatttctccatctaattcggtactctctataatgcctaaatctttaaataaatgaagatttctgtatacagtatcaaatgatattccaggatagtctttatccatttgttgttgaatatgtttagcatttaaatatttatcctctttaacaaagatatctagcatatctttacgtttatcagtatatttaagtccgttttcctttaaaactttaattgcatcatttgtattcattcttaaacgactccctttttaaacttaatttttaacttctgaataatcatcgttagtatgagcattaataccaatagtacaacaatgacgccaccaggtgatatattcatataaaaagctataattaatcctagaattacagataattctcctaatataacacttaatgctattaattgtttaaatcctttagttattctcattgaaattgctataggaagagttattaacgcgcttactaataatatacctacaactctcattgatgcagatattaccatagcaacaattactataaataaaaattgaatccactttggtatacctatgaccttactatattcttcgtcaaatgataaaataaacaattctttataaaataaaacaataaatatgagaacaattattgtaatgataataattgtagttaaatcactaatatttactgcactaattgatccaaatagtaggtctacgatttcttgattaaaaccatctgctagagaaataaaaatagcacttagagcaataccagcgctcattataataggaattgcaatttcttgataattagaaaacgaagtccttaatttttcaattaataacgctccaataacagcaaaaagaataccaaaccacatagggtttattactgagaaaacgggaataatggtaagcaaaaacataccaaaggaaataccacctaatgtcacgtggcttaaagcgtcagcaattaaagatagtctccgaactacaataaatgcacctattaatggtgcgataaagccaataagcagaccgctaatcaaagaatatctaataaaatcaaaatttaataacgcatctatcaaaagttacacttcctctttgtttctaatataaatttattcatttccctcattacaacatgttcggttgtgttgatgatcaacaaattgaataggatgaccataaatttttgaaatttcaacttcatctaaagacttaaatgcttctgtggaaccgtggaaatgaagatgtttatttaaacatgctacttcagtagcggtatctgctacaacgccaatatcgtgagtgactaaaattattgtaatcccctgtttttttaatttatcaagtgtatcgtaaaatttgcttacatgttttgcatcaattccgtttgtaggttcatctaacactagcacacttgggtctgaaataagtgctctagcaataagtacacgttgttgttgaccaccagatagttcagctatatttttatttattaaatgagatatatttaatctctctaatacctttgtgactttttgatagtcatttttattaaatctttgaaataatttttttgttttagtcagaccacttaaaacaacttcctttacactagctgggaaacctgcattgaaggcagaagctttttgagaaacatagctaattttcaatgaagatttattacctttaaatggttttccatcaacaattatctcgcccttttgtataggcaatagccctagtataacttttagtaaagtagatttgcctgccccgttcggaccaacaattgctaaaaattctccctgattaattttgatatttatgttctctaatacatgcttattatcgaaataataatctaaatttcgtaattcaaaaactggtgttgtcatggttttcacctcgcatataactatacaacttattaatttttatgtaaatagtaatgtttacgactattttaaattacatatagttttgcttgttctataattagtctagtgactt

SEQ ID NO: 3966 - DNA, 3721 bp, Artificial Sequence
  Description of Artificial Sequence: synthetic nucleic acid sequence
tgcccgcttcaatgattttatgcacacaaggtggtgttgaaccatggtgtgtgcaaggttctaatgaaacgtatatggtagcaccttgggtatttaaacctgccatttcaatagcttgtacttcggcatgtttatctcccttttttaaatgtgcacctaaacctacaatcctaccgtttttaacaacaacggatcctactggtggattaacacctgtttgtccatttaccatttttgctagttgaatagcatcatccataaatctactcaattgatcacctcaaaaaaaaccttatacctatattgtaggcataaggagatatctatatctttaaataagcctattagcatacttaaaattgcacataagtatacaatacgcttatcataactacacgaatttgtgtaagtcgataattcaacttctttctcccatccagactctaactgtcggctctagattcacactagatcagccactaacatcaaaaacaatattagtgggtcgcaggctcaatttactgccggttgggaatttcaccctgccccgaaagaaatatatgaaattgttatgattaattgagtccagtagttcttcactacattgtaaatcttactatatttaaatttaaaatacaattttatagcttactttattaaaagattttatgagaatatattaaactcacaaacacgcttaatgcatattacttatttctattttcctgtgttatatataattgagatactgtatcaacaacttgattaacaatcatctttacgccatttctaagtttattgacaccgttggtcatttgtccaattgcaatcacattttttaaggttccatatctggggcttatgacttgatttgtttctgggataatttgaatgccacccataggatgacgttgaacaatttgtctattttctaagtttaaaattaattgatcatcctcatctaattgagaaagatgtgttttagagcccgttgcattaataacgatgtcaaacaactcataattttgcgtagtgtcgttatacttcaacataaattgattatttttatggactatgtcttctagcccttttttaatgacaagttcattattctgtattaacttgataagtaaacgagctgttctaggaggcattggattagaatttaactgaataattttagtgtatttacgattaaaagtttcttgatctttaacgctcaaactattccaaatccagtttaaattttcttttaaatgttcaatgatactttggaatatccccatttcttcttcatgatttaaatcatactccaagtctttgacatggtttccggttctacgataaataagttttttaaaatctattccataatcttcacattcttttaaaaataatgaaactactttttctaatggtacattaccaaagtgatttttcataattccattaaatcgtgatttagttaaatgcgtaaactgaattttagtcattttccctctaacacttggcaatgctgcagaacgacttgtcatagtaatgggtaaagatggatgatgtgcagctacatatctcacagcatctaaactagccaaccctgttccaataatcacgattcgatctgaatctttaacattatcaagtgtatgatatgtaggatacggcgtttgtatatagcctttagttcccttcaaatcataagggtcatggtaactaaaagttccaaaagttaaaaataaataatcgtattcacgccattctttttcatcatcacatgtacatacatgatattttaaatctgtgtcatcaacatcggattgtgtaaaaatttcttgtactttatcattgataatagttaaattatcaaattggtcattataataagataaataagacttcatataatgaccaaatacaaatctaggcaaatattgaggattactaaaattaaattccgtctgattttgataccacttccaaaactcttgatcatcatcaagatttaagctcatggattttgatggcatgttaataagtagttcgctactatcattttgaaatggaacaccttggcccatatttctaacatcgtcatatacatctacttttaattgagaaaagttttcatgtttaacgagttggcgtaacacacttacaccagctgttcccatacctattattgctacacgcatgtaaatcatccttatgtatttattattagtagttacgttttactgtacactttttcactttatctatattacctatttgattgacttttaatcttaaaatagtatgctaaaatttatttgaggtgaagcttatgaaatttatagttaaagttttaattgcttttgcagttctgtttacaatactatcgcgaaaaaacaaagctgaataatttaacatttaatccaataaattaaaaacaccactataaaactattgagagttaactattgcttaaatctaaattaattttaattagcacgattaacttcacaacttttattagtggtgtttagtttaactatttaatttatttttggtgtttatcgtcatctttataaacatataatttgaagtatttaccttctgttttcatgttcttgtagaaatctgcaatgatattcgcgttactttcagcccattttatatcagtagcatattggtgttcacccgggtttttagggttccatctcatactataaagtgtattttgatcgtcatgagataagaaatgcttatgaataaaatcagcgccaccataaatagctttttgtggtgtgtcccatccatgttttttagcatattcggcacctgttttaatagggtcactatctaatgcaccaacaccatagaaattgtaatattttttaccatctatttctacaccattagccagttcacttttagctgcgcctgtttctaatagagcatgagaaataagatatacttcattgacatgtttagactttgcagcattaataaaatcatctgtatgttttagtagtactggtctatcaaacaacatgcgtttaattctgtttttatcaatgccttgatacttagacaaatctaaaaattgatatttttgtttatcatcatctatgaatttactactatccatagcttctttaatttctgtaccagacgcatcacgccaagctgtatttgctttgttagatacttgttggctcgtataattgtgtatttgctttttagatgctttatctaaagttttatctaatttttcaaccttttcaactggtttgacatgtttgaaaaatatttgatctgaaatcattgaaaagaagataaaacctgtaacaacaaatacaattagcaaacctatgatagctaatattgagcctttcttgtgcttagtcatattcacacctcttaggtcattgttgttaaactagtcattctattacgataatcaagtttaacattattcaaacacattcacaatttgaaacttcttttgttacaaattcataaataaatggtaatcaaattgaaatttaaataaataggttacacgttgcacatattaaaataataagacaagaatcgaaaatttttaatgccaaatgaatgttttataaattgacaaaacttaaaaatttcattaattattattaaacaacaatattaacccttatttttatggcaattagatttaaattttaaatcatttaaatattatagtgttgaa

SEQ ID NO: 3967 - DNA, 3821 bp, Artificial Sequence
  Description of Artificial Sequence: synthetic nucleic acid sequence
aaagcattagtcctaagacaattaatctgactatgactgtagtatctaatttttatgattatctctataggagtaaaaaattagatgttaatttctatgattttatgcatatggaaagtaaatactctaaaaaatataaaagtttcatgcatcacataaataaggactatagaacgttgaaaaatattttgaaagttaaagaaccaaagaaaaaaatagaagtgttaactaatgcggaggttaagaaattattagaggaagctaataatattagagataaattcttaatacaattactatatgaaaccggattacgtataggtgaggtattatcattacgtattgatgatattaaatttgactttagaaacccatcgattaaaacgatactaggtggtacaggaatatcaacctgttatccatcgcctacgcctgtcggcctcagcttaggacccgactaacccagagcggacgagccttcctctggaaaccttagtcaatcggtggacgggattctcacccgtctttcgctactcacaccggcattctcacttctaagcgctccacatgtccttgcgatcatgcttcgacacccttagaacgctctcctaccattgtccaaaggacaatccacagcttcggtaatatgtttagccccggtacattttcggcgcagtgtcactcgactagtgagctattacgcactctttaaatgatggctgcttctaagccaacatcctagttgtctgggcaacgccacatccttttccacttaacatatattttgggaccttagctggtggtctgggctgtttccctttcgaacacggaccttatcacccatgttctgactcccaagttaaattaattggcattcggagtttgtctgaattcggtaacccgagaggggcccctcgtccaaacagtgctctacctccaataatcatcacttgaggctagccctaaagctatttcggagagaaccagctatctccaagttcgattggaatttctccgctaccctcagttcatccgctcacttttcaacgtaagtcggttcggtcctccattcagtgttacctgaacttcaacctgaccaagggtagatcacctggtttcgggtctacgaccaaatactcaacgccctattcagactcgctttcgctgcggctccacatttgctgcttaaccttgcatcagatcgtaactcgccggttcattctacaaaaggcacgccatcacccattaacgggctctgactacttgtaagcacacggtttcaagttctctttcactccccttccggggtacttttcacctttccctcacggtactggttcactatcggtcactagagagtatttagccttaggagatggtcctcccagattccgacggaatttcacgtgctccgtcgtactcaggatccactcaagagagaatatgttttcgactacaggattattaccttctttgattcatctttccagatgattcgtctaacatgttcttttgtaactccgtatagagtgtcctacaaccccaacaagcaagcttgttggtttgggctcttcccgtttcgctcgccgctactcagggaatcgatttttctttctcttcctccgggtactaagatgtttcagttctccgggtctgccttctgacatgctataaattcacatgtcgataacatgacataactcatgctgggttcccccattcggaaatctctggatcaacgcttacttacagctacccaaagcatatcgtcgttagtaacgtccttcatcggcttctagtgccaaggcatccaccgtgcgcccttaataacttaatctatgtttccaccatattttgaattgttattcaaaataaatagctaaaactagttattaatcttgtgagtgttctttcgaacactagcgattatttatgaattcaagcttatttaaaactctattcactcggttttgcttggtaaaatcttacttgcttatctagttttcaatgtacaaatgaatgttaataaacattcaaaactgaatacaatatgtcacgttattccctcatcttcgtagaagatgttccgaatatatccttagaaaggaggtgatccagccgcaccttccgatacggctaccttgttacgacttcaccccaatcatttgtcccaccttcgacggctagctccaaatggttactccaccggcttcgggtgttacaaactctcgtggtgtgacgggcggtgtgtacaagacccgggaacgtattcaccgtagcatgctgatctacgattactagcgattccagcttcatatagtcgagttgcagactacaatccgaactgagaacaactttatgggatttgcttgacctcgcagtttcgctgccctttgtattgtccattgtagcacgtgtgtagcccaaatcataaggggcatgatgatttgacgtcatccccaccttcctccggtttgtcaccggcagtcaacttagagtgcccaacttaatgatggcaactaagcttaagggttgcgctcgttgcgggacttaacccaacatctcacgacacgagctgacgacaaccatgcaccacctgtcactctgtcccccgaaggggaaaactctatctctagaggggtcagaggatgtcaagatttggtaaggttcttcgcgttgcttcgaattaaaccacatgctccaccgcttgtgcgggtccccgtcaattcctttgagtttcaaccttgcggtcgtactccccaggcggagtgcttaatgcgttagctgcagcactaaggggcggaaaccccctaacacttagcactcatcgtttacggcgtggactaccagggtatctaatcctgtttgatccccacgctttcgcacatcagcgtcagttacagaccagaaagtcgccttcgccactggtgttcctccatatctctgcgcatttcaccgctacacatggaattccactttcctcttctgcactcaagttttccagtttccaatgaccctccacggttgagccgtgggctttcacatcagacttaaaaaaccgcctacgcgcgctttacgcccaataattccggataacgcttgccacctacgtattaccgcggctgctggcacgtagttagccgtggctttctgattaggtaccgtcaagacgtgcatagttacttacacatttgttcttccctaataacagagttttacgatccgaagaccttcatcactcacgcggcgttgctccgtcaggctttcgcccattgcggaagattccctactgctgcctcccgtaggagtctggaccgtgtctcagttccagtgtggccgatcaccctctcaggtcggctacgcatcgttgccttggtaagccgttaccttaccaactagctaatgcggcgcggatccatctataagtgacagcaaaaccgtctttcactattgaaccatgcggttcaatatattatccggtattagctccggtttcccgaagttatcccagtcttataggtaggttatccacgtgttactcacccgtccgccgctaacgtcagaggagcaagctcctcgtctgttcgctcgacttgcatgtattaggcacgccgccagcgttcatcctgagccaggatcaaactctccataaaaattatgatgtttgattagctcataaatactaaatagtttgtaacgtttcgttactgtttattggaattaacgttgacatattgtcattcagttttcaatgttcattaataattaaatggtggagactagcgggatcgaaccgctgacctcctgcgtgcaaagcaggc

SEQ ID NO: 3968 - DNA, 3002 bp, Artificial Sequence
  Description of Artificial Sequence: synthetic nucleic acid sequence
cctcaccagtaatatataaaacattcttattttgtgacagcgcagcacaaatttgtagcaataaagtcgacttaccaatacctgggtctccacctattagtactaacgaaccacttacaatacctccacctaaaacacggttaaattcctttgattctgtaagtaatctaggggtagcttcatgcttaacactatttaacttttgtaccttacctgctgtttcttttgtttttacaccatgtttaggatgagcaaccttttctactatttcttccatttgattccacgcaccgcagttagggcacttgcccatccacttaggagattgatagccacatgccatacattcgaatattacttttttcttggccattgagacacctccgatttaatatgaacaaatctattttaaactgacaagttgaatctgacaaattaaaattaaataatgatgttgataacacttataagtctataaccctttcataatatttctataatgaacctataacattcatcatatgcttatctgtttaaacattctggcaattatactaatgatgattcagcaaaaatataagtaaaattttaaattgatttacctcattcattgtttattattatatatttaagtgattatcttagtatagaaaatgcctgagacaatgattgtcccaggcattttatttattggcaattgacaaccgagttgaacttgggctaatctcaattttcaactctagtcctcattaccaagtgagacagcgaattacttacgctttctatctcactcttcttaatttaatatttaacgttataattgtagtaactcaatatgcgaaattaaagttataataatttaattatgattctgttgtttcttttttagctgtaatttcataaatatcatacttaaattctttaccatcatgatcaattgttacttctttaccttcaattttatttccatctaaaatcaattcgcttaaattatcttcaaccgttttttgaattgctctaatgagtggtctagcaccatattcaggatcatatccttcttctgcaattttttctttcgctttatcagtaacaacaatattaatattttgctctgaaagacggtgagtaagtttatttaccatcattgtaacaatttcttttaattcatcttttgtaagtttgtggaagacaataatgtcatcaacacggtttaagaattctggtcggaatgaattttttaattctttcatcattgtttttctgacagtttcgtagtcactaccttctgaagcacctccaaaaccagcaaagcgttggtcctgtaattcttgagctcccacattagaagtcataataatcacagtattacggaagtccacagtacgacctttagtatctgttaaatgaccatcatctaaaacttgtagaagaatattaaatacgtcaggatgtgctttctcaatttcatcaaataaaatcacagagtatggtttacgtctaactttttcagtcaattgaccgccgtcatcatgtcctacatatcctggaggtgcaccaactaatcgactgacagcatgtttctccataaattcactcatatctacgcgaatcattgcatcgtcttcaccaaacatagattcagctaaagcacgagccaattcagttttacccacacctgtaggtcctaagaaaataaaactaccgattggacgttttggatctttaagaccagcacgagctcttctaacagctttactaattgaattgacagcatcgttttgtccaatgacacgtttatgaagtgtatcttcaagattcaataaacgatctgattcagtttcattaattttagttaaaggaatacctgtccaaccagctattacttcagcgatattttcttcagataaggcagtatctaaaccaccttgtgcatttttccattcatttttagcatcttcatattgcttttcaagtttagattgcttatctcttaaattagcggcattttcaaattcttgagcatgaactgcagcatctttttcattttttactttatcaatttcttgttcaatctcttttaaattacttggcgttgtatgacttttaagtctaacttttgaacttgcctcatcaattaagtcaatggctttatctggcaagaaacgatctgaaacatagcgatcactcaatttagcagccgcttctaaagcttcatctgagatattaattctgtgatgagcctcataacggtcacgtaatccttttaagatttcaatcgtgtcttcaactgtaggttcatccacttgaattggttgaaaacgacgttctaatgcagcgtctttttctatatttttacgatattcatctaatgttgtggcacctatacattgcaattctccacgagctaaagcaggttttaaaatattagatgcatcaattgctccttctgcgccaccagcgccaactaaagtatgaagttcatcgataaatagaataacattaccagcttgatggatttcctccataacttttttcaatctttcttcaaattcaccacgatatttagtgccagctacgactgtacccatatctaatgacattacacgtttgtcttttaaagtttctggtaatttccatagtcatgaatctcctttattgtttgattttatgtaaaagtaagagaaacgcgcctgtcaatgccctaaatgatagctttaagtattgtaacgtatcattaagcattgttgttttaaaaattaagcgcgttcctacaaatgattaattcatcacccaaagtttaacactagaaagaatagtttggtgattctttcgtaatttgaacattatgaggatgactttcagctaagccagctggtcccatacgtgtaaattgtgcttcttcacgtaatttttttaggttttctgaaccagtataacccatgccagctctaacgccacccataagttgataaattgtatcttgtaatggtcctttataagct

SEQ ID NO: 3969 - DNA, 3022 bp, Artificial Sequence
  Description of Artificial Sequence: synthetic nucleic acid sequence
tctgtttccccccacaccttatattctttatcatctgtccatggtgctggtgtcacgttatactcatactcactatatggttgatctttaaaaacaatatctttttcagcatatcccattataatattaaaactcattttttcattttttatttttttatcccaacccttacgttctataacgtgattgatgattttctcactcttgtgtttctgataagtaatcacactaaaagtccaaactgttaaggtaataatgataacaataatagaagttattaatatttttaagattttattcattttttaatttctataccatgctgttttaggccagtttttatgtttgggtttacctttccatgatgagcaatctttgacaccttttctataaatactattcaaaccatcgcatttagtcatttttcccaaggaagaacatttataagctttggcgtgataccagcaatcacttttataaaaatctacataagctctaggatgtttttttgaccagtatctatgatcagattttgttccgttaaatctattacaatgtacatgagtccctttttttactttttgaccatcgtgttgtccgttatatgatttaccactataaaaggttatcccatccgatatttttccatcatctttcccatccatattaccaacaaaatcagagaaattaattacttttgtattattttcagcactaccatcagctgaataacttgaagttttattctctggattaggtaatttgtcttctacaacgactttatttccatgtttagttatgtggaaattattatcttctttttctatttctttaaattgtttcatcgttttggaatcaacttgagaagtatcatacgttcccactaatttaatattttgaggagttgaatcgtgactttcttttgcgtgagttatatttgtttgtacactcgctatccctgaccccgatactaaaatgcccaccaaaattagttttgcgaaatttttcaacttttttacatctccttgaaaattaaatatattatgtagaaaaaatatacacttttaagttatcataaattataaaaatttttttgaaaactaggtgaactttaatgaaaaaagtattctatgttattggtataataatttttttagcaatttgttatatttttgtaaactttttctattttgattcatgggcgtgtcattcaagtgaaaagcaattaaataattatgttaagcatgaagatactaagaaattaaaagaggttgctaactatttatacatatgatgaacaatcaagtaacagtgtcgtggttaatcaattaacacgctcagtttatgaccgtttaatgttatcaatgggcggtgtgctaagctttaatcaattagctaaagatccttcaaatgaagacgtagcaatgacattgattgatatgttatttaccggtttaaatcggataaaatgaatacagttgatgcatatgaaaacttattgtttgattgtcttaaaggtgatgcgactaattttacacattgggaagaattaaaatctacttggaaatttgtagatgcaatccaagatcaatggacaatggttgaaccatgtttccctaactatgaagcgggtacgaatggacctcttgaaagtgatcttttattaagtcgtgatggaaatcattggtgggatgatatccactaatatggattttatataaatatagattagtgtgaatgatgatatcttaaattacgcaacgtttaaaagaacttgtagtgatttaggacttaatcattcacattttttatattttgcaaaaaattaatctggctttaagatgtataatatttaaaaataatgtacaataaagattatgattgaatttaattggagtgaaagttttggacgttatcaagcaaatacaacaggcaattgtatatattgaggatcgtttgttagagccttttaatttgcaagaattaagtgattacgttggtctttctccgtatcatttggatcaatcttttaagatgatagttggtcagtccccagaggaatatgcgcgtgcacgtaaaatgacaatagcagcaaacgatgtagttaatggagctagtcgattaatggatgttgctaagaaatatcgttatgcgaattctaatgatttcgcaaatgattttagcgattttcatggtatctcacctattcaagctacaacaaaaaaagatgaactaaaaatacagcaacgactgtatataaaattatcaacgactgaaaatgcaccctatacatacagacttcaagagactgatgatatttctttagttggctattcaagatttattcctactgagcaattatcaaatccatttaatattccagactttttagaggatctattagtagatggttatattaaagaacttaaacgttataatgatacgagcccgtatgaattatttgtagtcagctgtcctctggaacaaggtttagaaatatttgttggtgttccgagtgaacgttacccttcacatcttgaaagcagatttttacctggtcgccattatgcattgtttaatttacaaggtgaaattgattatgctacaaacgaggcttggtattatattgagtctagcttgcaacttactttaccttatgagcgaaatagtttatatgttgagatttatccacttgatatttcatttaatgacccattcactaagattcaattatggttgcctattaaacaagaaatctatgatttagatgaaggttatcaaaattaagatgtgacatagagttatgagattatcagtattatatgaatcgtgtttcgaatttcaactcgatagatttgttgaattttagaatgaaattcttcgagttgtgttcacctaaatttagttgggacaaacttaatataaatgagtttttcaaattaattaagttatggactaccaataccaccaatgtatagtgaaacacgccagtgacgtatttaaaatcactggcgtgtttatt

SEQ ID NO: 3970 - DNA, 3748 bp, Artificial Sequence
  Description of Artificial Sequence: synthetic nucleic acid sequence
gtggatgatgtgacaaaatatggtccagttgatggagatccgatcacgtcaacggaagaaattccattcgacaagaaacgtgaattcaatcctgatttaaaaccaggtgaagagcgtgttaaacaaaaaggtgaaccaggaacaaaaacaattacaacaccaacaactaagaacccattaacaggggaaaaagttggcgaaggtgaaccaacagaaaaaataacaaaacaaccagtagatgaaatcacagaatatggtggcgaagaaatcaagccaggccataaggatgaatttgatccaaatgcaccgaaaggtagccaagaggacgttccaggtaaaccaggagttaaaaaccctgatacaggcgaagtagtcacaccaccagtggatgatgtgacaaaatatggtccagttgatggagatccgatcacgtcaacggaagaaattccattcgacaagaaacgtgaattcaatcctgatttaaaaccaggtaaagagcgcgttaaacagaaaggtgaaccaggaacaaaaacaattacaacaccaacaactaagaacccattaacaggggaaaaagttggcgaaggtgaaccaacagaaaaagtaacaaaacaaccagtagatgaaatcacagaatatggtggcgaagaaatcaagccaggccataaggatgaatttgatccaaatgcaccgaaaggtagccaagaggacgttccaggtaaaccaggagttaaaaatcctgatacaggcgaagtagttactccaccagtggatgatgtgacaaaatatggtccagttgatggagatccgattacgtcaacggaagaaattccgtttgataaaaaacgcgaatttgatccaaacttagcgccaggtacagagaaagtcgttcaaaaaggtgaaccaggaacaaaaacaattacaacaccaacaactaagaacccattaacaggggaaaaagttggcgaaggtgaaccaacagaaaaagtaacaaaacaaccagtggatgaaatcgttcattatggtggcgaagaaatcaagccaggccataaggatgaatttgatccaaatgcaccgaaaggtagccaagaggacgttccaggtaaaccaggagttaaaaaccctgatacaggcgaagtagtcacaccaccagtggatgatgtgacaaaatatggtccagttgatggagatccgatcacgtcaacggaagaaattccgtttgataaaaaacgcgaatttgatccaaacttagcgccaggtacagagaaagtcgttcaaaaaggtgaaccaggaacaaaaacaattacaacaccaacaactaagaacccattaacaggggaaaaagttggcgaaggtgaaccaacagaaaaagtaacaaaacaaccagtagatgaaatcgttcattatggtggcgaagaaatcaagccaggccataaggatgaatttgatccaaatgcaccgaaaggtagccaagaggacgttccaggtaaaccaggagttaaaaatcctgatacaggcgaagtagtcacaccaccagtggatgatgtgacaaaatatggtccagttgatggagatccgattacgtcaacggaagaaattccattcgacaagaaacgtgaattcaatcctgatttaaaaccaggtgaagagcgtgttaaacagaaaggtgaaccaggaacaaaaacaattacaacaccaacaactaagaacccattaacaggggaaaaagttggcgaaggtgaaccaacagaaaaaataacaaaacaaccagtagatgaaatcacagaatatggtggcgaagaaatcaagccaggccataaggatgaatttgatccgaacgcaccgaaaggtagccaagaggacgttccaggtaaaccaggagttaaaaatcctgatacaggcgaagtagtcacaccaccagtggatgatgtgacaaaatatggtccagttgatggagatccgattacgtcaacggaagaaattccgtttgataaaaaacgcgaatttgatccaaacttagcgccaggtacagagaaagtcgttcaaaaaggtgaaccaggaacaaaaacaattacaacaccaacaactaagaacccattaacaggagaaaaagttggcgaaggtgaaccaacagaaaaaataacaaaacaaccagtggatgagatcgttcattatggtggcgaagaaatcaagacaggccataaggatgaatttgatccgaacgcaccgaaaggtagtcaaacaacgcaaccaggtaagccaggagttaaaaatcctgatacaggcgaagtagtcacaccaccagtggatgatgtgacaaaatatggtccagttgatggagatccgattacgtcaacggaagaaattccgtttgataaaaaacgcgaatttgatccaaacttagcgccaggtacagagaaagtcgttcaaaaaggtgaaccaggaacaaaaacaattacaacgccaacaactaagaacccattaacaggggaaaaagttggtgaaggtgaaccaactctaaagacacctgttaagagtgatgtcagactgaccgcaatattaacaatactcatatctacatgataaaaacgttgaacatgtggtgcgatattcaaaaaagactgtgcaaataaccagtatgtgagaatccctaagataatcgctacaattagttgtttccctttattaaactgttcgctcatcgtaagtggcctcctactcttccgtcatttatttcgttacagcactttgaccggcaatgcgaccaaaagtaaaaatatctgccagtgcatttccgcctaaacggttaccagcatgaataccaccggcaacttcaccagccgcatataaaccttcaatgatatgaccttcaacatctataacttgtgcatgcgtgtttatttttaaaccacccatagtatgatgtattgcaggtttacgtggtgtcgcgtagaatggtgctttttcaatttttaaatcaaatgcatttttattgaaatcctcatcttgtccttgttctacgaaggtattatatctttcaatcgtgttcacaaaagtagttgtatcaatgtttaatttttgggctaatgcttctaaggtatctgcttttactaaagtgccgtcttctaattcttgattaattttatcctcagttgtattcatagctagtgctttaatatttgcatctgcaataatatagaagataccgtctttttgttctaatgctgccttagataatacatctctactttcaaattcgttaacaaaacgctgtccttccttattaacgaagacaaagtttgaaggtgttacaattaatccagtaaacaatgcacctgtcttcggatcagaaatcggcatcatttgagagaatcccatacctacgatgtcagcgcctgcctgcacacctaaacgtataccatcacctgtaattgcaggagaattcgttgtcttaatgtcatcaggaatattatcccaatacgtattatattgttgtagcatttttgtattcgctccaaagccaccagtagccaacactacaccatgacgtgtatgaatcttcactttagcaccatttgctttacgtgcttcaataccaacaacttgattaccttctttaattaacttttctgcagtagtttctgtaaaaatacgaccatgattatgtttaacgtagtctcctaaattttcaatgtactctaaaccttgtgctttcattggtttatgaccacgacgccataaagcaccc

SEQ ID NO: 3971 - DNA, 3051 bp, Artificial Sequence
  Description of Artificial Sequence: synthetic nucleic acid sequence
acacatatcactgatgatatgttaactgatgctcccgaaattgaagaagtgttaactgaatttaaagagtgggttggagatgctatatttgtagctcataatgcttcatttgatatgggatttattgacacaggatatgaaaggttaggctttggaccttctacaaacggtgtaattgatacacttgagctttcacgtacaattaataccgaatatgggaaacatggtttgaatttccttgccaaaaaatatggtgtcgaattaacgcaacatcatagagcgatttatgatacagaagcaacagcttatatttttataaaaatggttcaacaaatgaaagaactaggtgtgaacaaccatctagaaattaataaaaaattaactaatgaagatgcatataaaagagctcgtccatctcacgttacactcattgttcaaaatcaagaaggtcttaaaaatttatttaaaatagttagtgcttcattagttaagtattattaccgtacgccaagaattccacgttctcttttaaatgaatatcgagaagggatcttgattggtacagcttgtgatgagggtgaattattcacagcagtaatgcagaaggatcagtcggaagtagaaaaaatagcaaagttctatgattttatagaagttcaaccgcctgcgctttatcaagatttaatggatagagaattaatacgagataatgaaacgttaacacaaatttacaagcgattaatagatgctggtaaaagcgctaatatcccagtgattgctactggtaacgcgcattatctatatgaacatgatgctatagccagaaaaattttaattgcatcccaaccagggaatccattaaatcgttcaacattaccagaagctcactttagaaccactgatgaaatgttagatgattttcacttcttaggtgaagaaaaagcatatgaaatcgttgtaacaaatacaaatgagctcgctaataaaattgaaaaagtggttcctataaaagataaactatttacgccaagaatggatggggctaatgaagaaattcgtgagttgagttattctaatgcgaaaaaactatatggtgaagatttaccacaaattgttatagatcgccttgaaaaggaattagatagtattattggtaatggcttttctgttatttacctcatatctcaacgtttggtgaagaaatcgctagatgatggttatttagttggatcgcgtggttcagttggttctagtttcgtagcaacaatgactgaaattacagaagttaatccgcttccaccacactacatttgttcacattgtaagacaagtgagttctttgatgatggttcggttggatctggattcgatttaccagataaaaaatgtcctacttgtggtaatgaattaattaaagaaggacaagatatcccttttgagacattccttggatttaaaggagataaagttccagatattgatttgaactttagtggtgaatatcaacctaacgctcataattacacaaaagtattgtttggtgaagataaagtatttcgtgctggaacaataggtactgttgctgaaaaaacagcttttggtttcgtaaaaggttacttaaatgatcaaggtattcacaaacgtggtgctgaaattgatcggttggttaaaggttgtacaggggtcaaacgtacaactggtcaacatcctggaggaatcattgttgtaccggattacatggatatttatgattttacaccgattcaattcccagcagacgaccaaagtgcagcgtggatgacaacccatttcgacttccattcaatacacgataatgtcttaaaattagatatattaggacatgatgacccaacgatgattcgtatgttacaagacttatcaggaattgaccccaaaactataccagtagatgataaagaaacaatgcaaatatttagtggtcctgagagtttaggtgttacagaagacgaaatattatgtaagacaggtacatttggtgtaccagaatttggtactggatttgtacgtcaaatgcttgaagatactaagccaacgacattctcagaattagttcaaatttcaggtttatctcatggtacggacgtttggttaggtaatgcacaagagttaattcgtcaagggatatgtgacttatctagtgtgataggctgtcgtgatgatatcatggtatatctgatgtatgctggacttgaaccgtcaatggcttttaaaacgatggaatttgtacgtaaaggtcgtggcttaacagatgaaatggttgaagcgatgaaggaaaataacgtgccagattggtatttagattcttgtcgtaaaattaaatatatgttccctaaagctcatgccgctgcttatgtactgatggctgtaagaattgcatactttaaagtacatcatccactatattattatgcagcatactttaccataagagcttccgattttgaccttataacaatgattaaagataaaacgagtattcgtaatacagttaaagatatgtattcacgatatatggatttagggaaaaaagagaaagatgtattaactgtattagaaataatgaatgaaatggcgcatcgaggttttcgattgcaaccgattagtttagaaaaaagccaagcttttgacttcatcattgaaggggatacattgattcctccattcatttcagtgccaggacttggagaaaacgttgcacaaagaattgttgaagcgagagaagagggaccatttttatccaaagaagatttaaataaaaaagccggcttatctcaaaaggttattgactatttagatgaattaggctcattgccagatttacctgacaaggcacaattgtcgatatttgatatgtaagcatttctaattactaaattgatatcatatatgttcaatcatctttattagtaaccctatatcagtttgtttacttattagacttgtgatatactaaatatgcgtaaaaaatgattaactcaggcagaagagtgggcataaacccgctctttt

SEQ ID NO: 3972 - DNA, 3488 bp, Artificial Sequence
  Description of Artificial Sequence: synthetic nucleic acid sequence
aaagtaagcttttaatcgaactcctttttcaggatagtcttcagggtttaagtcataaatttctccaaacttatcaataggttgttcttctaaaatatttgaatcttcaattacaactccattagagccataactttcaagaatttctgtaacatcgtattctacttcgtgattaactacaattgagagttccatccaattcattgactattctcctttaaagaatcttttcgctctatctttgaaattagatgactgttcatttatattttcaccattaatttcagcaaattcttttaataattctttttgacggtcatttaattttgttggtgtaaccacttttatgttgacaaataagtccccgtagccataaccatgaacattctttacacctttatctttaagtcggaattgtttacccgtttgtgtacctgccggaatggttaaaacaacattactttttaatgtaggtatcttaatttcatcacctagtgcagcctgtgaaaagctaatatctagattatagtagatatcgtctccatcacgttcaaatgtattggatggtttaactctgaacaccacatataggtcaccatgtggtcctccgttaacaccaggtgaaccttctccagctaaacgaacttgttgttcgttatctacaccttcaggaacagttacttctagtttaactgttttattttcagtaccttttcctttacatgttggacatggttcttcaaattcttgtccactaccttcacatttaggacaaacttgttcagttctcactctacccaaaatagtattttgttcaacagaaacacgaccagcgccattacaatagctacaattttttttacttgtaccaggtttagccccatcaccgttacatgtatgacatgttacatctttttttattgatatttctttttttgtcccgaatacagcctcttcaaatgttattgtcattgtgtattgaaggtcatcacctttgcgaggtgcattaggatctctttgacgtgaaccgccaccaaagaatgagctgaaaatatcttcaaatccaccaaagtcactgccaccaaagccttgacttccaaatccgccttgtggtccgtcatgaccaaattgatcataatttgcacgtttgttttcatcacttaaaacttcatatgcttcggagatttctttgaatttttcgtctgcgccttcttctttatttatatctggatggtatttttttgataatttacgataagcttttttaatttcgtctttagaagcgcttttgtttacgcctaagacttcataatagtctcttttggccataattacctctccttttatacgtttaacaagaatagtttatctaattgtttcttaatatccaaataaaaagtcaaagtcaatgatcgattgactttgactttttttactaaaaattaatagataattataagttagatactaaacttattttttatcttcgtcatctttaacttctttaaagtctgcatcttcaacagtgctatcttgagaaccttgttcttcttggccttgttgttgtgcttgttgagcttgttcataaacttttgcagataattcctgaattactttttcaagttcttcttttttagctttaatatcgtcgatgtcttcaccttctaatgctgttttaagtgcatcttttttctcttcagcatttttcttatcttcatcgctaatattttcgcctaagtctttaactgttttttcaacttggaatactagactatctgcttcgtttcgcaagtctacttcttcacgacgttttttatctgcttcagcattttcttcagcatctttcaccatgcgatcgatttcttcatcagatagagatgagcttgattgtattgtaatgttttgttctttattagtacctaaatctttagctgtaacgttaacaataccgtttttatcgatatcaaatgttacttcgatttgaggtacaccacgtggtgcaggtggaatgtcagttaattggaatcttcctaaagttttgttgtcagatgccattggacgttcaccttgtaatacatgaatatctactgctggttgattgtcagctgctgtagaataaacttgtgatttggaagttggaatagtagtattacgttcaattaatgtgttcatacgtccacccataatttcgatacctaaagataatggcgtaacatcaagtaatactacatctttaacatcacctgtgattacaccagcttgaatagcagcacccattgctacaacttcatctgggttaacacctttatgtggttctttcccaatttcttttttaacagcttcttgaacggccggaatacgtgttgaaccaccaactaaaataacttcatctatttctgaagtagataaaccagcatcttttaatgcttgacgagtcggttccatagtttttttgattaatgaatcagctaattcctcaaatttagaacgagttaaactaatttctaagtgtaatgggccattttctccagcagaaatgaatggtaatgaaatttgagtttgagaaacacctgataaatcttttttagctttttcggcagcatcttttaatctttgtaatgccattttatcttgtgataaatctacaccattctctttcttgaattctgaaacaagataatcaataatcacttggtcgaagtcatcgccaccaagtttattatctccggcagttgataatacttcaaatacgccgtcgcctaactctagaatagatacgtcaaatgttcccccacctaagtcaaatacgagaaccttttgatctgtttcagttttatctaaaccataagcaagtgcagcagctgtaggttcgttgataatacgttcaacttctaagcctgcaattttaccagcatctttagttgcttgacgttcaccatcattgaaataagcagggacagtgataacagctttgtctactgtatcccctaaatagttttctgcagtgctttttaaattttgtaaaatcattgctgaaagttcttgtggtgtatatgatttaccttcaatatctactttataatctgtacccatatgacgtttaatagattgtacagtgttagggtttgtgatagcttgtcgttttgctacttcacccacttgagtttcaccatttttaaatgcaaccactgatggtgtagtacgtgcaccttctgggttttgaattacttttggttcatctccttctaagatagaaacacaagagttagttgtacctaaatcaattccaattactttacccataatataattcctccaatttaatcattttatttatttcaatgtattttcaatcaaattattgatttacttttaccattgatggtcttaaaacacgatccttaagtttgtatcctttttgtaattcttgagtaacttctcctgatttaaaatcaggattgtcatcttgaacgacagcttgctttaga

SEQ ID NO: 3973 - DNA, 3059 bp, Artificial Sequence
  Description of Artificial Sequence: synthetic nucleic acid sequence
taaatcattatatggcaccgtgatagtgtttttagcaataccttcagggacgcctggtgaatcaggtaaacctagtgttgcaacacctgatcctgctttaatcaataaagaatcactgtgtccatgataacacccttcaaattttataattttattacgtcctgtataacccctagctaaacgaagtgtgtctaaagtagcttcagttcctgaggaaaccattcttactttttcaattgaaggtacacggtcaatcacaagttcagcaagtttattttcttgaagtgttgaagcgccgaagcttgtacctttatctactgcttcatgtaatttggatataacttgttgatttttatgtcccagaattaatgggccccaacttagcacataatcaatgtattcatttccatcaatatcatatattttagatccttcaccatgatccataaaaatagctggtgtgtctactgatttaaatgctcttacgggactgttaacaccgccaggcattaatttctcagcttgctccattgctttaatagatttttcaaaactcatcatatgacctcctcaattatcatctatttatctaaataacgacagatatcttttgcaaaataagtaattattaaatcagcacctgcacgtttcatagatatcatttgttccataacaattttctcttcatctatccaaccatttaacgctgctgcttttgtcatactatattctccactaacgttgtatgctacgactggcacgttcgtattattttttacatctctaataatatctagataacttaaagatggtttaactatcatcatatcgcaaccttctttaagatcactttccaattctcttaatgcctctaaacggtttgcaggatccatttgataggtttttctatccccaaaagaaggtgctgaatctgcagcatctctgaatggaccgaaaaagcttgatgcatatttaataccataactcatgataggaatattttgatatcccgcttgatcaaggccttcacgaatttcagcaacaaaaccatccatcatattacttggagcaatgatgtcagctccagcttcaacttgagaaatagctgtttttacaagtaatggaagtgatttatcattgtctacatcatgcgtatgatcgtcaataacgccacagtgtccgtggtctgtgtattcacaaagacaagtatctgcaacaataagtaaatccttatataaattcttagatattcgtgtcgcttcttgaacaactccattatgatcatatgcaccagatccaatgtcgtctttgtcatttggcacaccgaagaacatgattgctctaatacctaaatcatatgcctctttaatctcttcatgcaataaatttaaactaatttggtatatgcctggtagtgatttaatttcactttttatatcatcttgctcaactacaaatattggatatattaaatcttcttttctaacatgagtttctcttactaaatcacgcattgtcttagatgaacgcaatcttctatgtctatcaaatttcattttgttccctactttctattattttatcaataagtgaatctaatgtttgtttatttgccacttttacagatgtattgaattttaaaatggtcctagcagtttgcttaccgatagcaaaataatgatcaaattcaggcacattgtcctctttgaaataaaattcaactgcagaggaactagaaaaagtcactgcgtctatttgatgttttctaacaagagacttaacttgacttatatttttaaaattcggtactggtctatataaatcaattttaacgacttcattatatttgctcaattgttgaactaatttaggacgtgctttttcacttgagggcaacaataaatgttgttcgctaatcttaaactcgtccaaaaagccttcttgagaaaaatcacgtggcacaaagtcgacactaatacctaattcattacaatactgagctgtcttatcacctataacagctacctttttaactttaacgttttttaaataaggataaaagtattttactgcgtttttagacgaaaaaataagccagtcgtagctatgatcaagcaatttttcattaaaatgaagttgttttagttggataaaaggcttatggataatatcaactaaatgactatgaacttcattcgtctgcgtcataactataactggtttcataaatttatttcacctctataatagagtttagtattattctgcttcgtttaattttttaattatgtcataagcaccttgttttttaagtacttgactcacttctatacccaattttacaggatcagtacccaatgctgtatgctcatatctttccttaccatctggagacataatcagtcctgtaaattcaatttggttatcttgagcaattgttgcatatccacctataggaacctgacaactgccatccatttctgatagaaaagtacgttcagcagtcacacattgtgctacatcatgattgtgtactttagatagtaaatctaaaagttctttgtcatcactcctacactcaataccaagtgcaccctgccctatagctggcagtaatatatctcgatcaagataagtcgtaacaatattatctgaccaacccatgcgttttaatccagcagcagctaatataatagcatcataatcttcagtctctaatttttttaatcgagtatcaatgtttccacgaatccacttaatttttaaatgtgggtattttgataaaatttgagcgccacgacgtaaagaacttgtacctacaatgctgccctcagacaattcttgtaatggtatatgattttttgctatataggcatcaaaaggaatttctctatcaggaatacatcctaaggtaagaccgtcaggaatcatacttggtacatcttttagagaatgaatcgccatatctatctctttattaaataattcattttggatttccttaacaaaaagtcctttacctccaactttggataattgtttatctacaattttgtcgc

SEQ ID NO: 3974 - DNA, 2936 bp, Artificial Sequence
  Description of Artificial Sequence: synthetic nucleic acid sequence
tgttatttttccttttaagaaattataattcgcctaatgcacaagctaagatattagttaatgctgtagataataatgattcacaaaaagttgctacattattgagtactaaaaataaaaaagtagacgatgttgaagcgcaacaatatattaattatgtaaaaaaagaagtaggtattaagaagtatattcgagatatcaataatactgtagataaattgaataaaagtaattcaagcgtggcatcttatatacaaacgaaaagtggacaagatgtacttaagataagtaaaaatggtacaaagtatttaatttttgataatatgagtttcacagctccgactaaaaagccaattattaaacctaaagtagaaactaaatatgaatttagaacaagtggtaaaaagaaaactgtcattgctgaagcaaataaaaatacacctttgggtgaatttattcctggtacatatcatttaccagctaagaaaattacagaaaacggtacattcaatgggcatttaaattttgactttagagaaagccactctgaaaccgtagatgtagctgaagattatgatcaatcatttatcaatatcaaatttaagggtgcgaataaattaagtgataaatcagaaaaagttcaaatcaatgaccgtacattcacttattctcattctaaagaatttggtccttatccaaaaacaaaagatataacgatttctgcaactggtaaggcaaaaggtaagacgtttagttctgagacgaaaacaattagtgcagacgatttgaaagataatacgaaagttacattggaatttgatagtgataaaataaatagctatgttgagaagaaagaaaaagaagaaaatagtttgaaaaataaattaactgaattttttactggttatgcaacggctatgaattcagcatttaatatgaatgattttaactttatatcgagttattttaaaaagaattcgtctatatacacatcaatgaaaagtaatttccaaaatcgaacgaacgtgactatgatatctccgcaagtgttaagtgttcatcgaaacggacatactgtaagaacaactattcaacatatcgatcatattggtaattatataaataaagattatgaattagaaatagataatgatgatagtaatatgcagttggttaaagaattataaaaatagactggattttatcaaacattcaaaatattttattaaaagggaggagtaagcttgaaaagagtgtatcagtcagaaaatcaatcattactttttattgttattttaggttcattaacagcatttggcccattggctattgatatgtttttacctggactacctaatattagtcatgattttgatatttctgcatctacaactcagcttactatctccttttttatgattggattagcgttaggaaattttttggctggccccatatctgatattactggtagaaaaaaaccattaattttctcactgattatttttactattgcgagtttaggtattatattcgtcacaaatatatggattatgattattttacgatttattcaaggattaactggtggtgcaggtgcagtcatctcaagagccattgctagtgatatgtactcaggtaatgcgctaactaaatttttatcattattaatgcttgtcaatggcattgcgccaattatcgcacctgcgcttggcggtatcattttaaattatgggccatggcgaattgtatttgtaatactaacaatgtttgggattgtcatgttaataggaactttatttaaagttcctgagtcgcttgaaaagagcctaagggaaagtagtaacataggtacgatgctaattaatttcaaagaactttttaaaacaccccgttttgtattacccatgttgatacaaggggtgtcatttgtattactatttacttatatttctgcatctccttttatagttcaaacaatttatggtttaacgccattaaacttcagtattatgtttgcttttataggcgttacactcattatttcaagccaattaaccggaaaacttgttgactatatagatagattactgttgctgagaatcatgtctactatacaagttattggtgttataatcgtatcactaactttactcaaccattggactttttggatactttcttgtggctttgtgattttagtggcaccagttacagggattgcaacgttaggattttcgatagcaatggatgagagtaaaggggccaaaggtagttcttcaagtttgttgggattgtttcaaactttacttggtggcgtcatctctccacttgttggtattaagggagacagtaatgcgataccttatataatcgttatcgttattacagcaataattcttatggttttacagttgattaatgtgaagatatttaaaaaagctaaaattcattgataaaattgagtgatttttcaatgagttttagcttttttatcgttgtaatttaattgtattagctaaaagaacttgagcgacctcttgaggagattcgatgcatccattacgtaaccaatcgataaatacacctgcttgaccaccgactgaataaatgataaacatacgtttattatttattgaggtttcatatctattcatgactttttcataacatgttttagtggcgttaatgtaatctaatgcaatatctttattaggatatgttacaagtgttgctctgtagaacgcttctttacgtttaatatatttggctatcaataagaaaaatttatataattttttttgatctgttttgatatgatgaaaatcgttatagaaagattgtagtaaagatatatatttgtttaaatgataattttggatcttatctagtaattgatatttatcttgaaaatgatcataaaaagtagagcgatt

SEQ ID NO: 3975 - DNA, 3406 bp, Artificial Sequence
  Description of Artificial Sequence: synthetic nucleic acid sequence
tagaattataataaatttttgtttcaaacttaggaggtaaaaaaattagattgacaacagaagaactcaatacaccaatcatcactagtacaaatctaaaaaatgcgacaacatagaaagaaccagtgtgttgccccataattataagtgcagttacgcttgcaagtgttgctacatgggcaagattaaattggaacaaaattgcaatgagtaaaataacggtaacgcccatgataatgaaattattattgaatatcgttaccattgttactgcaagtaatgcaccaatcacattaccaatagcttgttcagaaacagttttgattgagcgataaacactcggttgcatggcaactactgcactgacacctgctaacgtttttagaccaatattatcaggaagtaaagaagcgatagacatagctaagataatggctataccagttttgaaaatccgagctccaagtctcaaattaaatgctccttttaattattttgagtaaaaataatactctcattcattattgttatacacccctgaacttaaataatcaagtttatctatacgcaatttggtttttagatgcaaaatgttaagaaattaagcaaatagttttattttgtactttaaaagctattaaattttatgaactataataaattttgctttggaaaagtgaaaacgtaaatttccattaaattttcaacagttaatccataattgaacataaaaagaacttgaacacatagttaatgtgtcaagttctcatactgtaggttatttcattttactaaatgcataatcagctgcttctagtgtgcgatcgatatcttcttcagtatgttctgtagttaagaaccatgcttcaaatttagaaggcgcgagattaatgccttggttcaacattaatttaaagaattgagcgaaagcatctccatcagagttttcaacttgttcataatgtgtaactttttcatttgtgaaatacaatgtcagtgagccatagattcgatttattgttgctgtaatatgatgcttatctattaatttttgtaacccttcttcaagacgacgacctaattgatcaagtttatcataaacaccttcttgttcaagtacctctaataaagcaatacctgctctcatagataacgggttaccggccattgttcctgcttgataagctggacctaatggtgcaacgtgctccataatatcttgtcgaccaccatagcctccaattggtaaaccaccgccaacaatcttaccaaaagcagtgaggtctggtttaacacctaataaatcttgagctgcaccataatggaaacgaaaagcagtgataacttcatcatagataactaatgttccattatcatgagaaattttatttacttcttctaagaaacctggttgtggcatgaccatcccaaaattacccacaatcggctctactaatactgcagcaatgtcgtctttccaataatcaatagcttctctatatgattctatatcattaaacggtactgtaataacctcttgtgcaacactttgggggacaccagcagaatctggagaaccaagttgagaaggtccacttccagctgccactaaaactaaatcagaatgaccatgataagagcctgcaaacttaatgattttgtttcttttagtataagcacgagcaactctaattgttgtcataactgcttcagtaccagagttcacgaaacgaatcttttctaaagaaggaactgcttctctaagtttttttgagaaatttatttctaattcagtaggggtaccataaagtacgccttttgctgcttgatcttggatagcttcggtgatatgtgggtgtgcatgaccagttattattggaccataagcttgtagatagtcgatatatttattaccatctacatcatataagtaagcgccatgaccttctttcattactactggtgccccaccacctactgctttatacgaccttgaaggtgaattcacacctcccaaaatatattcattagaaagttgctgaagacgttcgctttcagtaaatttcatatctatcaacctctttttatttaatattttcaattaatatcgtatcataaaatcaacacatttaagaaataggtgagtatatgattagtaaaggtgaacaatttccctctttttctttagaaaatcaagatggcaattttatttcaaatgaaacaattaaaggtcgtaaaacgattctttatttttatccaagagataatacaccaacgtgtactactgaagcttgtgaatttagagatcacattgaagattttaatcaacttgatgtagatatatatggcataagcgcagattctaaaaagaaacatcaaaattttataaaaaaacaccaattgaattttgacttactcgtagataaagattatcaacttgctaataaagttggggtttaccaattgaaaaaatcatttggcaaggagaatatggggattgtaagaacaacatttattctcgatgaaaatggtaacattattgatgtgattgaaaaggtaaaggtaaaaacacaaattgaaacaataaaaaatattctggagggttaattttgaaaattgttagcttaaatagattaaatgaaatagaaaatgaattaagaaaacaatttccaaacgaagaatttaaattttatgacaaagctataaatatccctattaatgatagaaaaactatggacattttaataggttatgatggcaaaatagatcgtacctttattgaacattgtatcaaccttaaatggattggatggtttgcaacaggtgtaaataatttaccgttaaattatattaaagagcgagatatcattctaacaaatggtaaaggtatacaagctaaacaagtgtctgaatatataatgacattcattttgcatgattataaaaagatgaaaacttcctatagaaatcaattagaaaaaaattatgactccagaattactggtaaaagattaaacgaagagactttattattcttgggaactggtgcgattgcacaaagggctgcttatttagccaaagcttttggaatgaaagtaataggggttagtaagtcaggaaaaaatgttgaacaatttgatgaagtttatacaattgaagagttagatgatgttattgaaaaggcaaatattattgttaatgcattacctgaaacagaagaaacaatttacttattaaaaagaaaagatttcatacaaatggacaataatgccttatttataaatgtaggaagaggaacaattgttgatgaggaagtgctcatcaatgtactcaaagatcgattaatcagacatgcttatttagatgtttttgaaaaagaaccacttagtaaggacaatcctttata

SEQ ID NO: 3976 - DNA, 4069 bp, Artificial Sequence
  Description of Artificial Sequence: synthetic nucleic acid sequence
tattttatcaataagtgaatctaatgtttgtttatttgccacttttacagatgtattgaattttaaaatggtcctagcagtttgcttaccgatagcaaaataatgatcaaattcaggcacattgtcctctttgaaataaaattcaactgcagaggaactagaaaaagtcactgcgtctatttgatgttttctaacaagagacttaacttgacttatatttttaaaattcggtactggtctatataaatcaattttaacgacttcattatatttgctcaattgttgaactaatttaggacgtgctttttcacttgagggcaacaataaatgttgttcgctaatcttaaactcgtccaaaaagccttcttgagaaaaatcacgtggcacaaagtcgacactaatacctaattcattacaatactgagctgtcttatcacctataacagctacctttttaactttaacgttttttaaataaggataaaagtattttactgcgtttttagacgaaaaaataagccagtcgtagctatgatcaagcaatttttcattaaaatgaagttgttttagttggataaaaggcttatggataatatcaactaaatgactatgaacttcattcgtctgcgtcataactataactggtttcataaatttatttcacctctataatagagtttagtattattctgcttcgtttaattttttaattatgtcataagcaccttgttttttaagtacttgactcacttctatacccaattttacaggatcagtacccaatgctgtatgctcatatctttccttaccatctggagacataatcagtcctgtaaattcaatttggttatcttgagcaattgttgcatatccacctataggaacctgacaactgccatccatttctgatagaaaagtacgttcagcagtcacacattgtgctacatcatgattgtgtactttagatagtaaatctaaaagttctttgtcatcactcctacactcaataccaagtgcaccctgccctatagctggcagtaatatatctcgatcaagataagtcgtaacaatattatctgaccaacccatgcgttttaatccagcagcagctaatataatagcatcataatcttcagtctctaatttttttaatcgagtatcaatgtttccacgaatccacttaatttttaaatgtgggtattttgataaaatttgagcgccacgacgtaaagaacttgtacctacaatgctgccctcagacaattcttgtaatggtatatgattttttgctatataggcatcaaaaggaatttctctatcaggaatacatcctaaggtaagaccgtcaggaatcatacttggtacatcttttagagaatgaatcgccatatctatctctttattaaataattcattttggatttccttaacaaaaagtcctttacctccaactttggataattgtttatctacaattttgtcgcctttagttacaatttcttttatttcaatatccaaagacggatcgataaattttaatttatctataaattgttgactttgtgttagcgctaatttacttcttcgcgacccaacaattaatttacgcatacgttaaatgcctcctcgataccggtttttttatatgaaaaacaggttatttcttatctaaaatgagttaaaaagaataaattaatcatacacaaacaaaataatataatgttaaagtagataagatttctttgtgatatccatttttttattctaatgaaaatataaacaccatataataaattaataattgttgaaaatattacttttggatctataaatatttgtttaccgactgcaaagataccccattgtgcacctaaaatcgtacttaatataaggataatccatgcaacaagtgttgaatagaaaacgatggtttctaaagtagcaacactaccaattctaaagtaattttgatcgaaatttttctcctttaaatttcgatattgaataatgtagagtaatgaatttacaaatgcgattgcaaaaaatgcataacttaatactgcaagtgctatatgaacaagtaataattcattaattactgcaatttgttgaatttgcgtttgataatgttcaggctgaaaagtatttaaactcattaggataaatccaatcaaattaaggaaaaaaacagaaaaattcattactttaatcaaattcaatatcaacgaaattgatataataatccaagttaaagagaaaaaaacgtcaaatatagaacctagtggcacttgtttagtatgaataaaaaaaatagacaaagagattgtttgtaaaacccaaacaatccctaatgaataaaaacctacagttctagtcttataatttttattaatgaaatcaacaaagtaacatataatactaaacagataaatcattaatatgatttcatgaaatcgaattaacagggtttcttgcatatcatcaccaaattaatatgcttattcaaaactaaatattcgatgcgctaagatttcctttgctctactctctttttctaactttgctttttcacgaggatcttcggcttcaatatcaaatatgttttgaaatagctctaatttttcattactttttttatcagtacttaattccttagcctgtttgataggatcttttaacatttgattgataatactttttgtatgtttcgaaatgactttacgttctctttcagagagatctggcaatttacgatcaatactttccatagtttctgcttggatattcatagctttttcacgtaaagctctgattacaggtacaacaccaagcatattaacccattcgttgtgtgaatcaatctcctcaggtatttgtcctgcaatagtttcagcagctaattgacgttctcttaaattggcatctaccaaatctttcaaatcatcaacatcataattaaaaatatttgtaattgcatcaatccctggttcaatgtctcgtggaaccgcaatatcaatcagaactaatgaatccagttttctagtttctgaaattgttttcaccatagaattagtgatgatatagtcttcagcacttgtagaactaattactatgtccgttgtttctaataaagatggtaatgctgaaagtgaatcatatgaaacattgtgtttttcggctaaaattttagctttagataatgtccgattaacaattgttacatttgaaattccagaacctaaaagatttaagagtgataattcacccatttcccctgctccaataacgacagcatgtttactttttaattttccaaatacctttttagctaattcaacagcagcataagaaacactcacagcattatctgcaatgtctgtttcactgtgtgcttttttagcaaaagtaatcgcttgtttaaataaatgattaaaaatcgttccagttgtaccagtattttgcgctaagaaaaatgcatcgcgcatttgtcctaaaatttgtgtttcaccaagcacaattgaatctaagccagaagtgacacgcaataaatgttcaactgcatcgtcccccactttaacttccgacatatctttaatatcatctacctcaaatccaaaagagcgcgctaaaaatctttgtatataataacgtcctgtatgaacttgatcaacaatagcgtatacttcagtacgattacatgtagataaaatgacattttctaaaattgctttagtttcatataaatcttcatgtgctaatcgtaaggcatcatctctaaaagcaacttgctctcttaatgttacatcagctgttcgatgatttatgctaattgcaacaaaatgcatttataacgccctccatatactaacaataaaacaagtataacacatttaaaaagatgtttaagtggaatgcttaaataaattagaaagattataatctacattcaattttttgccaaaataccgacattttttaattgtggttaaaatacatttctctaattgaaaaaatttatatatatgtttcaataaagttccaaatttcttgctgtttactatttttaatt

SEQ ID NO: 3977 - DNA, 3816 bp, Artificial Sequence
  Description of Artificial Sequence: synthetic nucleic acid sequence
catttgtaattatatcgatactaataagcttttcaatttttaaatcaggggttaaaggcaatattagtgttgccttagcaaggttagtggggatattggtgtcttgaatatgtgtccatttattcatggatgttgataagacttccggttattttaaaccttttaccacagatgttttttcaattattttagccggcattcatattatagtcattacgctaatttgtttagttatgtatagcttttcttatcgcaataagtaagttaagaaaaattaagatttcctagatgatgtgataaaaaaatgaaatagaattagcattgaattgttgttcaatcctattcttcgaacacaactgactttatttacggaatttttgtgtggaatggtctttgcttggacctcgactactgttgaatcaaattttaaataagaatttttaattttgtcaccaactgactatatgttaagaatcctttagacatttatttgtgctatagtcctttctttatatatttattgatataactttattgatttaatagttgtcttttctggaaggaagttatatttaatattgattgtaagtccgacgggttttttattaatatctaaacgataataaccaataggcccactaccttggttatctgtcgcattttcgaaatcggctttctttatagtttttaaaaactgatatgtctgcttatctttagcaatcttatgaagttgctttgtgtcatgatgttgtatggattgatttaattggtgttcacttgagtgaatcacccacatgtcgaagaagaaaaagttaataacaacataactacaggcttggataaagagaataacaactataaaaatcaatcttttcattgatatgcaccttatttttaatgaaatatttgcttcttatatttaatttatcataatattgttcagtttaacttaaaattcacgatgttcaatatatattcatcattctatattttgtataaaaagcaaggactatatttaacagtttgctcatttacttttcggcccactatatgtttaagtaatcagtctaaaacttatttttatgtcacttttgtaaattgctcgagatttactactacttaatattaaacaacctccctctgactcaacaggggaggttcatttattgtttattatacttaccgctcgcatacttatacttctgaacgtgcatccatacgtgcttcaaaagtatcgagtagttctcttgcttcggcaatggattgggtgttcattaattgatggcggagttcgctagcgcctctaatgccgcgtacgtagattttgaagaatctgcgtaaacttttgaagtgtcgggcttcatctttatcatatttttcaaataaagagagatgtaagcgtaataaacctaataattctttgcttgaatgttcgcgtggttccttttcaaatgcgaatgggttatggaagatccctctaccaatcataatgccatcaataccatatttatttgcgagttctagaccagtttgtctatcggggatatcaccattgatagttaatagtgtatttggcgcaatttcatcacgtaatgtcttgattgcttcgattaattcccagtgtgcatctactttactcatctctttacgggtacgtagatgaatggataaatttgcgatatcttgttcgaagacgtgttttaaccagtctcgccattcatcgatatcgtaataacctaaacgtgtttttacactgaccggtagaccacctgctttagaagcttgaatgatttcggctgccgtttcaggtcgtagaattaagccggatcctttaccttttttcgcaacgtttgcgacagggcaacccatatttaaatctatacctttaaaacccatatccgctaagccgatactcatttctcggaattgttctggtttatcgccccagatgtgcgctaccattggttgttcgtcgtcactaaaagttaagcgtccgcgcacactatgaataccttcagggtgacagtaactctcagtattggtaaattcagtaaaaaatacatctggtctcgcagcttcactgacaacatgccgaaagacaatatctgtcacgtcttccataggtgccagaataaaaaacggacgtggcaatgtactccaaaaattttctttcatgatttatttaaaccttctttataataataatctcgaatttttacgcatgatgatattaccacaaaactcacatagctgactacaacttttaaataaatgattactgagttttcgcgcttaattgtttaataaatttttaaagtggtaaagtctatatatgtactattttaatatataaatttagaaaggaacatgcacatgagtgaagcaaatcataaaaacatcgttgttgtaggtgcaggaattattggtacgtcagtagcgacaatgctttcaaaagtaagtcctaactggcatatcgatatgtttgaaagactagaaggcgctggtattgaaagttcaaatgaaaataataatgctgggacaggtcatgcggcattatgtgaattaaactatacagttgaacaagatgatggttcaattgatgcatctaaagcgcaagaaattaatgaacaattcgaattatctagacaattctggggtaatttagttaaaaatggtgatatttctaatcctgaagaatttattcaaccattacctcatatcagtttcgttatgggaccaacaaacgttaactttttaagaaaacgttatgaaacactaagaactcttccaatgttcgatacaatcgaatatacagaagacatggaaacaatgagaaaatggatgccattaatgatggaaaatcgtgaaccaggtcatcaaatggcagcaagtaaaattgatgaaggtacagatgtgaactatggtgcgttaacacgtaagttagcacattacttagaacaaaaatctaatgtttcattaaaatacaatcatgatgttgtagatttaacacaaagagaagatggcaaatgggaagttgtcgttgaaaatagagaaactaaagaaaaagtaactaaaatagcagataaagtgtttattggtgctggcggtcactctattccgttattacaaaaatctggcgttaaacaaagagaacacctaggtggtttcccaatcagtggtcaattcttaagatgtacaaacccagatattattaaacaacatgcggctaaagtttacagtaaagagcctcaaggtaagccaccaatgactgtaccacaccttgatacacgttatatcaatggtaaacaaacattattatttggtccatatgcgaatatcggccctaaattcttgaaattcggttcaaatctagacttattcgaatcaatcaaaccatataacattactacaatgttggcttcagcagttaaaaatgtacctttaattaaatattcaattgatcaaatgatcaaaactaaagaaggttgtatgaactatttaagaacatttattcctgatgctaaagatgaagattgggaactttacactgctggtaaacgtgttcaagttattaaagatagtgaacaacacgggaaaggtttcgtagtatttggtactgaagttgtcaattcagacgacaattctatgattgcattattaggtgaatctccaggggcttcaacatcattatcagttgtattagaagttttagagaaaaacttcgctgatgacaaagaagcatgggaacctgttgttaaagaaatggtaccaacatacggtcgttcattaattaatgacgaaaaattaatgagagaa

SEQ ID NO: 3978 - DNA, 3738 bp, Artificial Sequence
  Description of Artificial Sequence: synthetic nucleic acid sequence
attgttgcgtaagtaatttgtattcatattgatttgccttcacaggcaggcgataaatatgaagttctcttaaatctctcgcaatagtagtcatgctataacgtacaccaaagtgatcatcaatgtaatcaataatatctgcttttttataaatgtgattttgcttaacaatcatagttactaaatcttgtcgtttactctttttcattgaatgatcaactcctatagataactaatttattttaatttataaattaaaatttctttttatttaattatactttatcattttattgttgataattataagaatttttatgtcgtttgtgacaaagtacgtaaacatacattcaaatttaaaattaatttgtttatttaactatcattttatctatatttccccttttattcttattaggttttttatactcattactatgcagtcacacttacgctagacaaaccgtagtcttacctcaaggtaaagtaagcggctttgtattagtttaaaaattcctgaagattttagttcactattatgatgaaataaaaaacctgagacagttaagtttgtctcaggctgagtcgaaattaagtcaacactcatttcgattaaggctttaaaaattgtaaatatttaacattacttcttctttgttaaagctcttaaaaattcatttttagatacttgttaacatatttttattttaaaacggttcgcctacacgccaacactgtcccatgcttgacctacttgttgagcaataccgtcgccatataaatcaaatgctgcttgttgtaatgatgctttggcatcttggaaatcagaatttgaagttaaataaacagttaacgctctataataaatttgttcagaacgttgtttaccaatactacgaattgtgttgtaagctgctttgttcggaatacctgaattcgtatgtacgcctccgttgtcagaatttgtataaacaaaatcattcatatgagatggttgtccaaaacgctctggattagacatacttcttaaggcatctccgcctacaccaggtgtgtaaacatcttcacccattaagaaatcttcatcatcaatgaagtaaccaaatacatctgaaaaactttcatttaatgcacctgattgagaacggtaaacaagattagcagtttgctgtgttacaccatgtgtaatttcatgtgcaacaacatcatttgcaccagaacaatctgctcaacgattaggttcacaagcaacttatctacctttgaaagttaactctgccggtgttattccagttatctttgcgatggcgtttttcttgttaccaagaacattgactttattcttcccgaaagcagaatgggcacagaatattgctgatactgccaacccatcaagtaatattggaatgattatttatgtagttttaattattgcatttgcatatttttatgcttttgtacaagttaatcctgaaaaaatggcagataaccttaaaaagcaaggtagttatgtcccaggaattagacctggtgaacaaacaaaaaaatatattactaaagtactttatagattgacttttgttggttcaattttcttagcagctatagctattttacctataattgcgactaaatttatgggcttaccacaatcaattcaaattggtggtacgagtcttttgatcgttattggtgtagctattgaaactatgaaaactttagaagcacaagtcactcaaaaagaatataaaggctttggtggtagataatttgtaggagggcatttatgaatatcattttaatgggcaataatgattttacccttgagccaatctaaaggtagcttaaggtgtacagttttcacgaaagtagcatactcatcctcggcactccattttttaatttcttcaagcgatactgtgtgtataagtgaatgttctaacatagatgtgtacatttcataatgtttctcaattgcactaataaatgcaagttggttcttttctagtttcaattttaacttatctaaatcactctcaataaagtcgtctaatgtgttaaacgatatttcataaaattctagtacatgattaacttcctctagtaattgttctttcgattttaatgtgatttgactctctttaccatatgataattccgtcgttgccgctgttgttggattaggagaactaactaaatagttttcacctagtagagcgttgattaagctgcttttacctgcgctaaatgtaccaaaaacaccaacttttgttatttgattatcgagtctcagaatggtatcggtgatatcttgtttagtgcgatcaaataatggtacatctttaacgatatctaatgcacgcttaatatcttgattagatgtaacaaactcgttacgatgttgtgtctcatgtttacgatgataagcagttgaattttcttgtttaagttcaaaatgagtctctgttcttccaattaatttatctaaagaatcgtctaaatggatatagtaatgtttgtagttgtgggatgtaagcgaatcctttaatgtgttaagttcaatgtatctatcatattcatacctatcttcattttcatcactcgataattcattaacttgtacatgattgacagcttcttcaaatagtggtgttgactcattttctatttttttattcaaagcttttataacttcatctgaaaatgttaaaacgtatgtgttgctaatgctcgtttgagtttgatatagctctgatataagtgacggaacgacgtcatattcttgatttagtattttttcattcacagcatgtttatttatgaatctagttaaaaatgacatatcttcacgaagtggttgtcgtacttgttgattaactttctcttgcaattgagtggtcgcctcattaagtcgtttgatttgttcttcttcttttttcttccttttattaaaaaatccattcactttaaaatcagttgccatgctttctaaataattccgtaaagattcacgcatatcgtacgtcatgatataagcattatctaatatatctttacgcttctgttttaaataattaaataattgattagagtcattgagcaattgtgcttctgcgctgacttcttgattttgttgaaattgaatatatgcttcctcgaattgttcttcattaatttgaagggtgtcaagaatagattgcatttcattttgaatgtatatgtattgtgcgtcggtaatgaattgaatggttctattaacatagtcttctgttgattcacgatgttgatccataaatactagaaaatttgaaagtttgtcaatttcattctgtggatgatcaaactttgaaacgtaataagtatcttgaagtttgatatcccagtctttgattgatttttcgactcttgatttaaaagtttcaaatgtaatttcttcttcattatgtttatcaatctgattaatcacaaaaataattggtataccaacttcattaatacgtttcataaatttaaagttcaacgctgattggacatgattatagtctactgtataaaacaacaagttacttgtatacataaattgctctgtactcgactgatgcgttgcaacgttagagtcaacacccggtgtatcttgaaatgtaaaccctagattaaatttgtttgatggaaaattaatttctatcgattctacatcgacattttgtcgattcatttgtttaacatcgttgtacgttt

SEQ ID NO: 3979 - DNA, 3110 bp, Artificial Sequence
  Description of Artificial Sequence: synthetic nucleic acid sequence
atttcttcactatgggtaatggtgcgttaattaactcattcttctctatctcaacaatgttaatcggtgttccaaccggagttaaactatttaactggtcgctcacattatacaaaggtagaattacatttgagtcacctatgctattctcattagcattcatccctaacttcttattaggaggggttactggtgtaatgcttgcaatggcatcagctgactatcaatatcacaacacttatttcttagtagctcacttccactatacattggttactggtgtagtatttgcctgcttagctggtttaatcttctggtatccaaaaatgatgggctacaagttaaatgaaacattaaacaaatggtgcttctggttcttcatgatcggatttaacgtttgtttcttaccacaattcattctaggtttagatggtatgccacgtcgtctatacacttacatgccttctgatggttggtggttactaaacttcatctcaactatcggtgcagtattgatggcaattggattcttattcctagttgcaagtatcgtttatagtcatatcaaagctccacgtgaagctactggagataactgggatggacttggtcgtactttagaatggtctacagcatcagctattccacctaaatacaactttgctatcactcctgattggaatgactacgatacattcgttgatatgaaagaacatggtcgtcattatttagacaaccataactacaaagatattcatatgccaaacaatactccagtaggattctggatgggtatatttatgactattggtggtttcttcttaatcttcgaatctattgttccagcacttatctgtttagcaggtatcttcattactatgatttggagaagtttccaaattgatcatggttaccacatccctgcttcagaagttgcagaaactgaagctcgtttaagagaagctcgaattaaagaaagggaggctgtaagtcatgagtcatgatgcaaatactattaaacgttcttgtaatacgctatcagcttttaattcagaagcgtattcaaataatgttacgtgtttaacgatgccggctaaatcaatagctgcttctacaccagagttaccaccaccgatgacagcaacatctttattttcaaataaaggtccgtcacagtgagggcagaaagccacgcctttattgattagacggtcttcgcctgggatgtttagtttacgccaacttgcacctgtggaaatgatgacagttttactttctaaaacagcatcattttctaaagttacgcgaatagctgaatctgttttttcgatatttgtagcacgaataccagtcattgtatcaatatcatattgtgcaatatgttctgcaagatttgatgagaactctgaacctgtcgtttctttaacagtgatgaagttctcgataccagcagtatcattaacttgaccaccaattcgatcagcgacaatacctgtacgtagccctttacgtgctgtataaattgcagcactaccacttgcaggtccgccaccaacgattaacacgtcataaggatctttatcgttgaattcagaggcatcttgcgtgcttcctaatttagttaaaatatcttgaactgtcatgcgtccattaccaaattcttgaccatctaagaagacggcaggaactgccataatgttttcagattcttcacggaaaacagcgccatcaatcatagtatgagtaatgttaggattaataacactcattaggtttaatgcttgaacgacgtcaggacacttttgacaagtaagacttacaaaggtttcgaaatgaaatggaccttcgagccctttaatttgatcaataatggattgcttttctttaggtgcgcgaccactcacttgtagtatagctaatactaaagagttgaattcatggcctaaaggtatgccagcaaaggtaatacctgtttcttcaccagggcgattaactgaaaaacttggtgtacgttttaaagatttttcagttattgttatgtgtgctgacatctcagccatctcatttaataattctttgagttcgtttgatttatcatcagagcctaggctggcaacgaattcaacgtcgccttccataagctcaagtaattgttgtaattgttgctttaaatcagcattaagcatattttaatgcctccttagattttacctactaagtctaaaccaggttgtaatgattctgaaccttcttcccatttagctgggcaaacttcacctggatgttgacgtacatattgagcggctttaattttgttaactaatgtacttgcgtcacgtccgattccgtcagcattgatttctgctgcttgtaccacaccatcagggtcgataatgaaagtaccacgttgtgctagaccagtttcttcatccaacacatcgaaattgcgagtgattgtttgagaaggatcaccaatcatgctgtattctagtttgctgattgcatcagaatggtcatgccaagctttgtgtacgaagtgtgtatctgttgatactgagtacacgttaacacctaattcttgtaatttagcgtattgattttgtaaatcttctaattcagtagggcatacgaatgagaagtcagcaggatagaaacatacaacgttccaagaacctttaaaatcttcttgagtaacttctttaaactcatctttttttggatcataagcttgtgctgtgaaaggtaaaatttctttgttaattaaagacatagataaattcctcctgaaaagttaagtgttaattagaattacttaaaaataattgtttgtttataataattctaatctcttgtttagtattattacatcttggcattgaatagtcaactttagaagttcttaaaatctatgaaagtataaaaaagctataattaagccgttttaaatccctcattaattaaagaataacgagtgaaaaaagttgaaaatccaatgtgaaactgaaattttcaaatgtgtatgactttgaaattcagttgtcattctcaactatggttattttattgataatgaagtgtaattttattactacttcatatatataataaca

SEQ ID NO: 3980 - DNA, 3866 bp, Artificial Sequence
  Description of Artificial Sequence: synthetic nucleic acid sequence
aatcatttcactcgactttgctgtccatgaaaattgatcatatttatatcttgcgatatgtccaataacaaatattgctaaacataaatatggataaataacccatacaaattgattaagcatgattttccacctctttcaaaggcacgatacacgcttttaacgtttttcttaatgcactgacaacatatgcatagggattattgttttcagctagggtatttgccatttcatacgtaccatcttcaataatcataatgacaagttgaaggttttcctgtgctcgactatcatttttaaaatcagcaacttgcaaaaactgtagcatcaatgggagaaaatcagataattcattatcaaccatttttagtccaaacatttcgtataaaacctttaatttagctagcatttgaccccgttccttttgcgtgtcaaatttattaaatgtcatatagagtgggtgttttttactaaaatcaaatgtatctgtatagatagctttaatttctgacaaagtataattcatcatgacttctctatatgcaagcaaatcttcgtagccggggtgagacttagaaatagtttcttcaaatatttttggatgaaatgtcattttttctggaaaattcatttgttgaccaagatagcctaagctatcttggtatagacttaattgttcaaggttaatcacggaagatccctccatagaaattttcattataaatttcttgtccagttttacctgattgaactgcaacaccacaaccttcacaattagagccaaagtactctccaccgtaaccttgacttccttgcgctttataagtatctaaatatgtttctttatgggaagaaggcacaacaaaacgatcttcatatttagcaatacctagtaagcgatacatttcagtcatctgtctttcagtaagtcctaatcgttctaatttagaagtatcgaaaggttggtttgttatttgagaacgcatataacttctcatcatcgccattttttgtaagccctctttaacaggttttgtgtcgccagcagttaataaatttgctaagtattgaataggtaaacgcatttcctcaatagctgggaaaatcatatctggattttgacctgcattttcaccttcgaaataactcataataggacttaaaggtggacaataccacaccatcggcatagttctaaattcaggatgcaatggaaaggccattttatattctattgccaatttatacactggtgagttttgagctgctgtaatccattcttgatttattccatctttttcagcttgtgcaatgacttcctcatcaaatggatcaaggaataggtctaattgtttttcgtataagtctttttcatctttagctgaagccgcttcttgaacgcgatctgcgtcatataataaaacacctaaatatctcatacgtcctgtacaagtttcggaacaaacagttggcataccagcttcgattcgtgggaaacaaaatgtacatttttcagctttattcgttttccagttaaaatatacttttttatacggacatccagtcatacagtatctccaacctcgacaggcttcttgatcgacgagtacgataccatcctcatctcgtttatacatagctcctgatggacaagatgctacgcaacttggatttaaacagtgttcacatagtcttggtaaatacatcataaatgtctcatcgaattggaatttaatatcttcttctattttctgaatatttggatcctctggtcctgtaatgtgacctccagctaaatcatcttcccagtttggcccccatttaagattcaatctatcacctgaaattaaagagtgagctgtcgccacgggagagtgctgtccttgtttagcattggttaagtgttcatagttatatgtccacggttcataataatcttgaatgagtggcatgtctggattatagaagattttacctaaagcaatttttgaccatctgttaccagattttaattcaagctttccttttttatttagcacccaaccacctttatattgtccttggtcttcccatctttttggatatcctacacccggttttgtttctacgttattaaaccacatatattctgcaccaggtcgatttgtccatgtgtttttacatgtcacactgcaagtatgacaaccaatacatttgtctagattcaataccattgcaacttgcgctttaatcttcaagccaattgacctccttcatttttctaacagctacatactcatctctttgatttccaattggtccataatagttaaagtgataactaatttgtgcatatcctcctactaattgagtaggtttcaagtgaatacgagtaggtgcattatgagaacctccacgagtatcagtaatttcagaaccaggtgtctctatatgtttatcttgtgcatgatacataaacattgtgcctctaggcatacgatgagatgttacagctctggcagtaacaactccgtttctgttgtatacttctaaccagtcgttatcattaataccatggtcagctgcgtcttcatttgaaatccatacaactggtccacctctaaacaacgtcaacatgcgttcattatcttgataagttgaatgaatattccattttccatgaggtgtaaggtatcgaagcactaatgtatcttgtccacctttaacttttttatcacgagcaccaaataccattggaggtaaagtaggtttatataccggtaaactttcgccaaactgttggaatacctcatgatctatataataactttgacgtccagttagtgttctaaatggcactaaacgttcaacattagttgtaaacggtgagtagcgtcttccatctttattagagccagggaatactgcagttggaatcacttctcttggttgagaagtaatgtttaagaatgatatcttttcagaagcacgttctttagaaatatctttaagttccatacctgtttgattttctaaatcttcatatgacttttgtgataatttgccgtttgtagcagaggatatattcaaaatgacatctgctacttttctcgctgtatctattctcggtctatcatttttaactgaaatagtattatcatcattccaagttccaactatacttttaagttcttcgtactcttcactaacgctataactcacaccatgagcacctattttccctttttctagttttggaccaacagtaacgaatttatcgtaaatttgtgtatagtctcgctctacgatagaaaaattaggcattgttttacctggcacaccttcaatttctcctttagaccaatcttttacaataccgtattcagttgaaatttcttgttttgaatcatgtcctaatggtgtagttacgacatctttaaatttacctggaagataatctttcgccatttctgaaacagctttacttagagttttataaatatcccagtccgaacgcgattcccataatgggtcaatcgctgggttaaatggatgaataaatggatgcatgtctgtagaagataaatcatgtttttcataccaagttgcagcaggtaaaacgatatctgaatataatggcgtcgcagtcattctgaaatcaagtgatactaataaatcaagtttcccttctgtatcctcgcgccatttaatttcctctggtttatcatcttcatttggctctgccattaaaccagagcgcgcacctaacaagtgcttcataaagtattcttgtcctttagctgaactagaaattaaattagatctccatacaaataatgttttaggatggttttttcttaaatctggatcttctatcgcaaattgtg

SEQ ID NO: 3981 - DNA, 3341 bp, Artificial Sequence
  Description of Artificial Sequence: synthetic nucleic acid sequence
tttttccagagtcagattctaaaatagcttgagcaatcataactgatgcatatatatcttggtcttttccaatctgatgcgcatctttagcaattgattgaatgaaatcacgtgtgtcttgactgtcaacaacattaaatgaatcagaagataagtcaccattgtctaattcaggtagttgttggaaaagacttgttgaacgtgtatttgagcgtttaatgtcatcctcaaatgattgtgcaggttttgattgatgttttaattcatcatctgttggtaattgtggattcttgtcggcattatcactttgagatgttttagtgtgacttgtattcttgctcttattgtaatctttttctgttttcttagcgtcctgactatattcatctaatatagagtctaatgctgaatctgtaatactagaatatttcttgttacgttctgagctatcatcattcgcttgagtttgttgttgctcagaagaagattgatttttgtttgtatctacgttttcgccttcttgatcttctttatccatttctccaagtaaatcactgacgtcagaatcggcttgatggttagttgtcttttctttttcatcgtttgatgattcttgatcttgtttagcagacgactgtgattgttcttgatgttgtgatggttgttttgcctgatctgcttggtctacttgatctttttcgtcattagaagaatggcttgtcttttgtggctgttcgtaatctgttatatcagaatcaaaatcaaataaattttgtatgagtgacgttaaactaaaactgtcttcgtatttattcggttcccagtatttagaaaaatctactgactgagacttaaaattatcataaagttgatcaactaaattatcatctttcattttatagttacgatgtgttgagtcagctgataatggtttattagagtctttgtccttgctgtcagaagtgctttttttatcatcagaatcgtgtttagaatcatcgttgttaaattcatctttttcagattgttttgatgtttctttttgtgattgatgttgttccattttatctgaatttgtatttttattagatgaatcttcagcaaaagctgtttgtgtagcgaaggttggcgtgataagcgccgtcgatagtaaatatactaaaaatttatttttcttcatcttatgtgtgctcccttaaaaattatttttagttattgtcataacaaatgagaatttgatataatttatcttatggtttataaagttgacaagcatcaacaaaaatgaattacgccttaatacaaatattatactaatcaacattagaaaaataaatccatttaatcaaattttaatataatatgtgtatcatctttacgtaagcaaaaaaatatgcacatttaagtaatcatctgtacggaaatgtattacaataaaaaagaataatgataattaggagtgtgaaaatgaaaaacgcactaaaactttttatcacggatttaaaaagagttgctaaaacaccaggtgtatgggtcatcttagctggtttagcaattcttccttcattctatgcatggtttaacctctgggctatgtgggatccgtatggtcatacaggacatatcaaagttgccgtagtgaatgaagaccaaggtgaaaaagttcgtggtaagaatattaatgtaggaaataaaatggtcaaaactttaaaaaagaatgatagttttgactggcaatttgtgagtagagaaaaagccgaccatgaaattaagatgggaaaatattatgcaggtatttatataccgaagaaattcacacatgaaatcactggtactttaagaaaacatcctcaaaaggcggatatagattttaaagtaaatcagaagattaatgctgtagcagctaagttaaccgatacgggatcgtcgtttgtgattgataaagcaaataaacaatttaacaaaaccgtagcaaccgctttactttctgaagctaataaagtcggactatcaattgaagataatgtacctacaatcaataaaattaagagtgctgtatatcaagctaataattcattgcctaaaattaatcaatttgcagacaagattattgaactaaataaacatcaagacgatttggatgcttatgctaatcaatttagaagtttaggaaagtataaagggaatgtattagacgctcaagaaaaacttaatgctgttaattcgtctattccggcgcttaatgaaagggctaaattgatacttgcacttgatagctacatgcctaatattgaaagaattttaaatgttgctgctaatgatgttccagcacaatttcctagaattaataggggtgtcgatattgcaagtgaaggtattgatgcagcgagtggtcagttaaatgatgcaaaaggttatttgactcaagctaaagcgagagtgggagactatcaagaagcagctggccgcgctcaagatgtgaacaaccaagcaaatcaaaatctaagaaatcaaacatcaactacaccccaaagcgctataaaatcatcgcattcggaagggaagagtcattcaagcattaaaacagtacctgtgagtcaatcaggtgagaatcaacccgtttatggtgataacattttatctaacagtgatgtaaaatcaatgaatacagctttaacagaagctttattatcattatctaatcaaacagatcaacaagcacaagctacccaacaagacattaagtcattaaaaaatatagcatatggtgttatcgcttcagataaaccatcagagtttaaagaaccattaaaaaatataaaatcacgcttagaaaacgcatctaagtataatcaacaatttatagatatcttgtcagagttggaaaaaagtgaacatgttgatctatctaatgaaattaagcaagtgaaagaagcaaacaatagcattaatgataatttaaaaagtactaatcaattaatagatgcattgtcaaatggtagctccggacaattagaagcagtcaatgtattacgtgacttacctaacttaaataaaaggttagatacattacgaaattacattaaaaaagaacttaatcgtaatttactagctgtttctaatgagattactgatcaacttaataaaggtcaaaatacattatcgacaatccaatctaaattaaatactattaaccgagtgattaacgctggtcaagatattttaaatagcggtaaaaagagaattgatacgattcaaactgcattgccagcaatcgaaaacgcatatataaatgcaatgcgaactgcacaagcttacttcccaacagctaaaaaagatgt

SEQ ID NO: 3982 - DNA, 3192 bp, Artificial Sequence
  Description of Artificial Sequence: synthetic nucleic acid sequence
acatttcttctatcgcggcaatcttcgttctagttttattccaaagtggtttagtaaaaatatttaatttaattcttgcatatttatcttaaaatgtgacacgcactaattttataatatttaacataacgaggcaaagtagctagactttgacctcgttttatcatatgacttattgttgacagtgttatagtcgtagtgttttaaaaatttttcaacataaaaggagtagataaccatcgatatacaaatcacctttctctttaatttcctctatgttcaataatgagttccctactttatttgtaatattattagttagtttacttctaattcccatataatgacatcctttcaaataaaacttcaacagtgatttatacccatttttatagaaaattaatgttttattgttacaaatactgcttttaaatattttgaaggtttgtagtgaggatgagttttaaaatctttaggtaaccccattacttcatttatttcatatacaatattattttgggctaatgttttctttattacgtttttaaatgccttaagagaaaatgcacttgaattcgtacataatagtaatgtacctcctggcgataaaatgttaagggctccttcaattaataaattataatctttttgaacagagaatgtttttttcttatttctcgcaaagctaggtggatcaataacaattgtatcgtattgatgtccatgtcgtcctgcataattataaaaatcaaacgtatccataacataaatatattgagatttaggattaataccatttaaaccaaaattttcttcagttagccctctagagcgatttgctaagtctacacttgttgttgagtttgcattttcagctgctattactgaaaacgctccagtgtaactgaataagttaagtacgtgtcgtctttctgaaaactgatctcttaatttttttctaacttctttttgatctaaaaatataccagtcataagaccatcgtttaggtctacattataaaaggtaaaattttcttctacaacgataggaaattcaggagcattaccttctacaaagccaccagtgtaggaagtacctttaaaacgcattttctcaaaaattgaagtgtattcatatacctctttgattgcttctaagataggaaatctaaatttatatattcctttcgaataccattgaattaaaagatgtccgttataattatcaattgtcaggccacctacaccgtcaccttcagcattaaataatctaaatgcatttgtaccttctatgttgaaatagtattgtcgctcttctaatgcagcttcaaataaacgtttaaaaaacaaagtgttaatctcttcattttgattataactcaatacccatcctaatcctttatgttgtcttccaatatatccagtagctatatattgttgttgctctgtcaccagtgttatcaaatcaccttctttaagatgatcatgttcaaataaatcttcttcatctaagaagaataaaatcaataaacttaaaatgattgctggaataaataattcatgaggatgtatcaacaacattgcacgcccatcattgacaagagatcctaatgacgtcttaggcgcaggcacccctattccaataaagcttaaaaatgcttcgaaaaatattgcacttggaacagtaaacattgatgtaacgacaattgctcctaatgtgttaggtaatatatgtttaaagattaacttgaatttagaagcacccaatgtttgagatgccaaaacaaattcttgatttttcaattttaaaaattctccacgtaccactctactcatccccagccagccagtaattgacatagctaatataatagtccaaattgatggttcaaaaataagtacgaataaaataacgacaattaaattgggtatagaagcaataatttctaaaatcctttgcatcacatcatctaccctgcctccaaagaaaccagaaacggctccatatacaacgccaatacaaatatctaataatgcagcaactacaccaatataaagtgaaatttgagcacctttccaagtacgtgtccataaatcacgtccaagttgatcagtaccaaaccaatagttttctttcgcacctgcttctttgtaagcatttttaccgtccgtacctttaccgtcaaaaggtaaaaatgaaacatgatctaataatggtatttttgctgggagattacgatgatcaacattctgctcagcaaaatcgtgtttattcattaatggtcctataaatgccataataactataagcaacaaacctatcattccgattactgctaatttattacgtttcaattgtgaccaagcatcttgccaaaaattcttactttgacgtggcatttctggctcttgattcaagtctaaatctctaataataaaatctgtattcgaaatatcattacttgtatgtgacatcgttgcattagaaatatcgccattaatgtttgtaacatcttctttattactcattatttcttgcccccttgtacacgaattcttggatcgataacaccatataaaatgtctacaataaagatcgaaacaataaataaagtactgaataatatcgttgtagccatgatgactgaaaaatcatttgtagttatagaacgaacaaattgatcacctaatcctggaacaccaaagatattttcaattgttaatgttcctgttaatatacctgctaacataggtacaatgattgtaataataggaattaatgcatttcgtaatgcatgtccaaagagcacttttaaagtagaatttcctttagctcgagctaaaagtatgtaatctgaactgagtacttcaatcatttcagctctaatatatcttgcaacagttgctaaaactgtagctgatagtgctagagaaggtaaaatagctgtagaaaaaccttcccatcctgcaactggaaaccattctaacttaactgcaaatacatactgcaataaaactgctaagacaaatgacggcactgatactgcgataacagagataattgttgttgtatagtctacccatgtattttgtttagtagcagcagcaacacctaatactaaacctaaaacaacaccaataaccatagctgttattcccatctccattgaaggtatcaatcgtggtttaact

SEQ ID NO: 3983 - DNA, 2943 bp, Artificial Sequence
  Description of Artificial Sequence: synthetic nucleic acid sequence
caatttgataattaggattagcataatcagcaactttggcaatttttttgaaatttggtaacttgtgccaatattttttcttactaattaataaacctaattcataatctaaattcattgctgacaatttttttacacaatcaaaatcgaatgattgtaaaatcactttagatttagatatttgtctttccttcaatttatcaacaatcatattttcaatatttggatactgactaggcttttttatttctattaataatttttgtgaaaagttatctgctaaatctaacacttcatcaaaagtcggtatactctcccctttaaatttctctcctttatagaaaccaaaatctaacgcttttaattcttttaaagtaaaatcagaaaccttacctttaccatttgacgtacgatcgatagtatcatcatgtataacgacaagttctttatcttttgtgtaatgtacatcaatttccaacatatctatatgtaacatgagcgcatgtcgataagcgataatagtattttcaggataatcttcaggtaatcctctatgcgctacgatttggaaatgttgatttggacgtcgaaatttcatcaaagtcacctttcttttaaacttatttaatttgccctaaacttaaattaccataattaaattggaggtcaattcatatggttagacatgattttaaagttaaaactgaatggctaggtggacgcgaagaagtaggtaaacttcgaggagatattatcaatgaaaatatatccatcccctcttcactcggtggccaaggagaaggcacaaatccagatgaattactagtaagtgcagcatcatcttgttacatcatttcactcgctgcaacactagaaaagagtggttttactaatgtaaaaattaatcaacagtcaataggtacagcctcgtttgaaaataaaaaatttaaaatggaacgtattacacattatccctcaattaaagtaccctcttctcaaacagaaaagcttaaaagtattttagataaattattagtgattgcagataataattgtatgatatctaatgcaatacggaataatgtcattatttcaattgaacctaatttaatataaatcatatagctatcacaaattttaaacatgtaaacgttttaattatgtgatagctatataataagggttttaaatattcagaatttttgctaaaataaataaatcttattatgggaggaatgtacaatgcagtattaccaacctttattattaacacctggaccaactcctgtaccggaacaaatcttgagtgccgtacaattaccaatggtaggtcatcgttctactgactttgaggaaattgctagtgaagcatttaaaggtttaaagccagtatttggtagcaaaaacgaagtacttattcttacatctagtggcactagcgtattagaagcaagtatgcttaacatcgcgaatcctgacgatcatattgtgataattgtttctggtgcatttggaatcgctttaaacaaatcgcacaaacttattataatcatgtacatgtatatgatgttaactggggtgaagctgtaatagttgatgactttatcacttatttaaagcaattaaacgttccagtcactgcagtattcactcaattttgtgaaacatctactggtgtcatacatccagttcaccaattaggtcatgcacttaaagcttttgataattccttatattttattgttgatggtgtaagctgtatcggtgcagtggatgttgatttaacaaaagataaaatcgatgtattagtttcgggaagtcaaaaagctatcatgctaccaccaggtctagcatttgttgcttatagcgatagagcaaaaaaacgatttgctgatgtaaaaacaccgagattctatttagatttaaataaatacataaaatcacaagagcaaaattcaacgcccttcacccctaatgttggtctatttagaggaataaatgcttatgtagaacttgtaaaaaaagaaggattaaatcacgttatttcacgccattttaaaatacgtaatgccttaagagcagcactaaaggcacttgaattagaattattagtaaaagatgatgctcatgcctcacctactgtgacctcatttgttccaaaaaatcaagaagaacttaatatcattaaaaatcaacttaaatctcaattcaatataactattgctgggggacaaggacacttaaaaggacaaattttgagaattggtcacatggggaaaatatctccttttgatattttagcagtcgtgtctgcattggaaattattttaacttctaatagaaatgtcaattatattggaacagggataactcaatttatggaggttattagacatgagtcataagatattagtatcagacccaatttctgaggatggtttacaaagtattttaaaacatccagaatttgacgtagatatacaaacagatttatctgaaaatgatttagtaaatatgatttcaacttatgatgctcttatcgtacgaagtcaaacccaagtaacagagcgaattattaatgctgcaacaaatttgaaggtcattgcaagagctggtgtaggtgtggataatattaatatagaagcagcgactttaaaaggtattttagtaattaatgctcctgatggtaatacaatttctgctacagaacattcagtagctatgttgcttgcaatggcacgaaatattcctcaagcacaccaatctttacgtaacaaagaatggaatcgtaaagcatttagaggggttgaactttatggcaaaaccttaggtgttatcggtgctggtaggattggtttgggcgtcgctaaacgtgcgcagagtttcggtatgaaaattttagcgttcgatccttatttaacagaagataaagcgaagtcatta

SEQ ID NO: 3984 - DNA, 3451 bp, Artificial Sequence
  Description of Artificial Sequence: synthetic nucleic acid sequence
ggaggtaacgatactttgatgattttgacttcttcaaatgaaatagcagaatttgtttgttatcaattattcccttaaaaattaaatgattatattaataggaatgattactaatacaaaaaaatgagtaaaaaatctttttgcttgaataagataaggttttaacaatgagatttttcaaattattcactattatatagtacaaaatacatattcatacaaaattttgcattgaataaatctatatatgtgaaaaccctccctaaacaattgtgaattaaatcacacgatgttttttgaaagcgttttataatgtgaatgtaataaagcaaaggaggaatttgaaatggtacaaggacccattcaagtaaatagtgaaataggcaaattgaaaactgtgttgttaaaaagaccaggaaaagaattagaaaatttagtacctgatcatttaagtggtttattattcgatgatattccctacttaaaagttgcacaagaagagcatgacaaatttgctcaaactttgagagatgaaggaatcgaagtagtttatttagaaaaacttgcagcagaatctattactgagccagaagtacgcgagaacttcataaacgacatattaacagaatctaaaaagacaatattaggtcatgaaactgaaattaaagaattcttttcaaagttatctgaccaagaacttgtaaataaaatcatggctggcgtacgtaaagaagaaattcaacttgaaacaacccatttagtagaatatatggatgatagatatccattttacttagatccaatgcccaacctttattttacaagagatccccaagcttcaattggtagaggaatgacaattaacagaatgtattggagagcacgacgtagagaatctatttttatgacatatatactgaaacatcatccaagatttaaagataaagatgtaccagtatggttagatcgtaactcaccatttaatattgaaggtggagatgaattagtattatcgaaagatgttttagctattggtatatcagaacgtacatcagctcaagcaatagaaaagttagcacgtaatattttcaaagatgcaaacacaagttttaaaaaaatcgtagctattgaaatacctaatacacgtacatttatgcacctagatacagtactaactatgattgactacgataagtttacagtacatgcagcaatatttaaagaagaaaataatatgaatatatttaccatagaacaaaatgatggtaaggacgatataaaaattactcgttctagcaagttacgtgaaacacttgctgaagttttagaagtagaaaaagtggactttattccaacaggtaatggcgacgttattgatggtgcacgtgaacaatggaatgatggctcaaacacattatgtattcgaccaggggttgtggtgacatacgatcgcaactatgtatcaaaccaacttttacgcgacaaaggaattaaagtgattgaaattactggtagtgaacttgtacgtggacgcggaggcccaagatgtatgagtcagccgttatttagagaagatatttaaatttgaaaggtggtaaaagtcacaagtaattcattcattaaatcaaataacaagatttttaccacctttattaggggagattaatatggatgaaaataaattaggtaaaacttccttaattggtttagtcataggctctatgataggcggtggtgcattcaatatcatctcagatatgggtggccaagctggtggacttgcaataattatcggttggataataactgctattggtatgatttctcttgctttcgtatttcaaaatttaacaaatgagcgaccagatcttgatggaggaatttatagttatgctcaaacagggtttggagattttattggtttttcaagtgcttggggatattggtttgcagcatttctaggtaatgtggcttatgcaaccctattaatgtcagctgtgggtaactttttccctatatttaaaggaggtaacacacttccaagtattatcatagcatcaattttattatggggtgtacattttttaatacttagaggtgtagaaactgcagcgtttataaatagtattgttacagtagctaaattaatacctatatttctagttattatatgcatgatagttgtattcaacttcagtacttttaaatccggtttttatggtatgactagtggaagtgttggcgtttttagttggggagatacaatggcacaagtaaaaagtactatgttagtaactgtatgggtattcacagggattgaaggagccgttgtcttttctggacgtgcaaagtctaaaaaggatgtaggaactgctaccgttattggtttgatttctgtgctagtcatttatttcttaatgactgtactagcccaaggtgtcattcagcagaaccaaatttcaaaacttgctaatccatcaatggcacaagtattagaacatattgtaggtcattggggttcagtgttagttaatataggcttaattatctctgttttaggagcttggttaggatggacattactagctggtgaattaccattcattgtagctaaagatggacttttcccgaaatggtttgctaaagaaaataagaataaagctccggtcaacgctttaattattactaatatattagttcagttatttttaattagtatgttgtttacagatagtgcctatcagtttgcgttttcacttgcatcaagtgcaatcttaattccatatacactcagtgctttttaccaggttaaatatactattcaaaataaatctaaagctaatttaaaacaatggataataggaattattgcatctatttacacaatttggttggtttatgcagctggattagattatttactattaacgatgttgttatatatacctggattactcgtatacagctacgtacaaagggataataacaaacatttgacaaaattggattatacgttattcatattcatcattgtacttgcaataataggaatagttcgtttgattacaggtaatatttctgtattttaagttatgatttaaactaagtaatttttaaggggtttatagttatgtatgaagaaaatatttatattaaaaattcagaatatgaatttgataataatcttaaacaattagcatcatacttaaatattcctgttagtattgttagaccttataaagaggatttaacactttatcaatataaaaaaggacaagtcatatatcattcaactgatcaaataaaatttgtatactttttagtaaatggttgtattttacatgaatcttctaatattactggtgacaattatttaagattaagtaaagacgaaaatatatttccaatgaacttcatatttaatgaaacccctgcaccatatgaaatatgt

SEQ ID NO: 3985 - DNA, 3993 bp, Artificial Sequence
  Description of Artificial Sequence: synthetic nucleic acid sequence
tcaattttttatactgctaatgttataaagcaaagtcaagctttaagtaagattgagagcacgcccgcgataagtgttgattttactcattttaaagcttcacgccgttttagtggtttattagctagagtagaatcacaagatatggcgagtagcataatcatgtttattaaattagtattcatgatagattatgttttatttcatttaatacaacgcagctactttaagtatcaagaagaagttatgacatgttatgactacataagcatattagataatcattactctatagctatgtatcaacatactttgacacattattgttatcctaaaatcaatcacaatattaatggtcttcaaatgaaatcaatcattcatcctctactagatgaagaaaatgcgattgctaacacaattgacatttcaaatcatatattgctcacaggctctaatgcatcaggaaaatctacatttatgaaagcagttgcactaaatttgattttagctcaatcgatacaaactgcaacagctcactcatttatttatcaacctggctatgtaatgacatcaatggcaaatgcggatgacgttttaagtggtgacagttatttcatgtcagaacttaagtctattcgtagattatttaacactcatcagtgcaataagatatattgttttatagatgaaatttttaaaagaacgaatacaactgaacgtattgcggcttctgaatcagtattatcgtatttagataatcaaaaagcatatcaggttatcgctgcgacacatgatgttgaattatcaacattattagaaaatacatataataattatcattttaatgaatcaattcaagaaaatagcatatttttcgattacaaaattaaaccaggtaaagccaatacacgtaatgcaattgaattactacgcattacgcagtttcctatcgatatttatcagcgtgctcaacaaaatattcgaaacctctagaattaattagtttaatatttataaaaaagttaagcgcctatctaaaagtagttactcttagataggcgctttgaaatattatttaaacagaaaaagtttcaatatcaatattattttgtccatttaaagctaaatcgccacgcaaaccagcttgatataaataatatccagcagcaccaatcatcgctgcattatcagtgcaaagaacaggacttggaatagtaaggtgtataccctcttttttacatgcttcacttagtgcatttcttaatcctttattactagcaacaccacctgcaacaattaagcgattaacattataagttttacaagcatgaatagctttataggttaaaacttctacaacactattttggaaactcgttgcaacatcttcagctacaatttcaatatttttctgtcttaaattatgcagtttatttattacagcacttttaagaccactaaaactaaaatcataactatctttttcgagccaaactcttggaaaatcatatacatctttacctttagctgctaatcgatcaatatgcggtccaccaggataaggaagattgattgttcgagcaactttatcataagcttctcctactgcatcatctctcgtttcaccaatcacttcgaaatctaaatgatttttcatatatactagttcagtatgaccaccagatacaatcaatgacattagtggaaacgttaatggttgttctaagtgattggcataaatatgaccagcaatatgatgtactggaataataggcttatcataagcaaatgccaaagctttagccgcattaataccaatcaataaagctcctattaatcctgggccttgtgttactgcaatagcgtcaatgtcttccattttcacttttgcactcactaacttgctaataaaacgcaagaccagagttcttatgaaacgtctaaagccggtgtgacgatgctgactaaaagcttagctagagaatggtctagatatggaattaaagtaaatgcaattgcccctggttacatgagaacaatcgaaacggaaaagatactaaatgataatactgaaacaaatacaacgcctatggaacgagtaggtgagcctgaagaattagctggaataacagtttatcttgcttctgatgcatcatcgtttactcaaggtagtgtatttaatattgatggcggttattcagcattataatatcagtaatagttgagaatgtgaagatacaaattaataggagtctttatctacctttaatattgtattaacaattgaatcgtttttgtgtattattttttagtaaatatatttaatcgaaagcatcgaatttgtttggtaaataagaacagagtgactttgtaatcatcattcaatctattgagtatgtttcatatcagagtatttaaatattgacaaatctcaagatttaatattgggatttatcttttttgtttaggagaagatgattttagcgctttaaatgtttattgatacccaatcaaagttaatatgggttgttgatacaaaggtaagtgttcaggttgtctgacgtaagacatagggcacactaaaaatgtgcatccttattcctaacagtaacgttatatctagcaaacgggtttatcgaaacgttataataaaatcatcagttatatccttgcgataaaaaatacctacaatcatgtatgtttatatgccgcacttttcaaaaattcactttaaagatgtggcataaggcactgaacccttaaaacgggaacttaataaaaacaccatgttctaggctattaattctctgtattttactggggataagtagcctagtttttgttgaattcgattattattatagtttttaatgtacttttcgacaatatctattacaatatgattagagcgattaagctcattattgatgtaaaaagtttcagactttagcgaggaatggaaactttctatcggggcgttatcggcaggtgttccctttcgggacatacttctgataatgcctttttcttcgcacaattgataataagcataagatgtataaacgctgccttgatcactatgtaatatacaaccttcaggtatatcgatttgatttaatgtatcattaactaaactttggtcttgtttatcatctattttatacgccacaatttctccgttataaatatccattatcgaagataaatacaacatagaatgaccaaatggtaaataagtaatatcggttgttaatacttccatgggacaactcgctttaaattgtctttgtaataaattgtccgttttataatacggtttacctattcttgtcgtctttttaggtctaactcggcagttcaaatgatgcttctgcatcattctctgtactctcttatgattaattggtgatgtataacattgattaatcaatgctgtaatcttacgataaccgtaggtatagtggttagctttacataattcaatgactttttgtgttacggtatcatttttataggttttgtttttccatcggtaatatgttgatttaggtatgtttaatacttctagtatcaatttgattgaatattttacttttaattgatccactaaatctatgactactgttggtaccacttcctttccaatgccttgtacttttttaaaatatccaattctatatcttttctcttattttctaattttaattgttctacttctgacagctcttctaatcctttaccgtaggtatattgtttaccaacttgttgtgaaaatctataactttccccatttcgataccatcgccaccaagttttcacttgcgtcctatttctaatatttaattctttcataatttcttttgttgaaaatcctgctgctttcatttcaactgctttatactttgtttctactgaataagaagctcttttcatagaaaaaaacctccgtatgattcattttaatatgaattcaacgaaagtgtttttatataa

SEQ ID NO: 3986 - DNA, 3797 bp, Artificial Sequence
  Description of Artificial Sequence: synthetic nucleic acid sequence
tataacgtctgccacagcaaaactcattgtgccatctttatgatcaataagattaaaataatcaccacttactttttgtgcagcaacagatatcactcctatttgaatgctatcaaattgtggaatatcaactttcagcatagtttgttgaagtcttgaggctaaatccatttctttatcgtggacttgaagcttattaacaagtctttggtaatctcggtaactatatccaaatcctttaacgacttcttgtaacacatcgagcgtttctaaaatatcttcttcagttaaatctaatgtattaatataatctttatgtatctcaactatatcttcaggtaaaacatctttctttataacttcatttgtgaatgcttcacatttcttaattaataatgttttattgttagttattaaactttctttaacaagggctttataactttttgtgaattcttccacgaaatgcgcctccttacttccacttcaatatcccatcatttttataacaatatgaaacctttatttactttctgcgaatagcataatttttggtgttaaaactttgttgatagctaaaaaagactttaggaatggataacctaaagccttaaaaactcaagacatccttttataataaatacattttcataataactatagtgatacgtcttaaatcaaatataaatagacatatcgacaactatataagtgtttaaatatcctaatattacttaaacacttaattattataaagttattgccttttatttcaatatttttttatgtttactgcatataattatttaagatttatgatgatcaaagttatttaatcccaaactaatatctaaggcattatcaacctctatcattttactctctgataaaaatgttaatttttcttttaaacgctttttatctagtgttctaatttgttcaagaagaataactgaatctttgtctaatttatactttttcttttcaatttctacgtgggttggtattttcgctttattaatcctaccagtaatcgcagctacaattacagttggactatatttattaccagtatcattttgaatgataactacaggtcttactcccccttgttcagacccttgaactggtgataaatccgctaaataaacatctcctcttctaatcattcattctttgaattagatattaaatgtgattcattgcaatcacaagcttcacactctatcgggaaagcttctgttgctagggagaggtttaaatcggccatttgtgcataaccttcttttaaagattgttcaagactgtggtttctattttgattaaaagataacatgaaaagaacctccatctgattccaaaagttgttatattagcatcgatttagttttataataacaaatttcctaatcagtgactatactattttaacaattcgttagtaacctcttcattattatcataataatatattcttggaagacgtcttgataaattacataatacttcgtagttaattgtaccttgtttatttgctacggcttcagctgattgtggtgaatcaacgtgattatccataagtattactttttcacccgtttttacatgagaaggaaccttaactatcatttggtccatacaaatgcgtccaatgacttcacattgactcccgttaacattgacgaatgcaccttgcatcgatcttaaatatccgtcggcatacccaataggtaaaattgcaattgtcatttcttcatcagcaataaatgtacgtccataactaacagtttccccaactttaagcgttttgacttgaacggtttctgatactaactgcgcactcggtcttaaatgaactttcacattatctttaacatattctgaaggatagtatccataaagagagattcctaatcttattgcattacaaaattgaccatccatgagtagtgatccagcagaattttgacaatgaatataaattggtttctcaacttgattaaccatctctttgaacaaaatatattgttcattcatagaacttccaggttcatcagcactcgcaaaatgtgtgaaaaccccttcaaaaactaaatgatctcttttattaattaaatcaaccacttctttatattcatctatatctttcattccaattcggcccataccagtatctaattttacatgtagccataaatttttttggttatcatcaggaatttgcttgatagtttccttcaaccatgctttagaaggtactgttaatgcaacacgatgctgtatagccttctcaatgtcttctgttggaacaacgcctaaaactaataatttagcatcaactccatgcattcttaactctattgcttcatcaagtgtagccaccgcaaaaaatgttgcaccatgacgcattaaatgttgtgctattttcacacttcctaatccatatccatttgctttaataactgaaatgacagtcttattagcgtgtaattgattgaaattttgataatttgctaaaattgcatctaaattcacatttaaatatgttgctctataaaacttctctgacatatatatgtcctccttgaaactacttacttcatcttatttctgatgattaaaaattctatccaattttcattcgtttttttcaagaataacttgactcatagcataattctccgtatgtgtaatactcacatgtgtataaaaaccaggatagtcaatacatggtttacctagagcgtcgttgtaacagttaatgtcctgaaacgatactgatttccctaaccctgtacctaaggccttactaaatgcttctttcactgtaaagcgtccagctaaaaattctaatctacgttgctcgtgtgtatattgatttaatttgtccctttcctctatagtaagtattctttcaataaattttgtttgattctgaagatttttaattcgttcaatttctattaaatctatacctattccataaatcacttgtatcgcctctttagtatatcaccaataatcttttatcaagtcttttatatatcatcgtttaatttttctaatgaagttacatttgtcgttattgatttttgttgtttaatttgttttttcaatctttgtgcttcttgaatatctatcaatgctatttcagaatttcccccagcagttgataatgacagcgaagcgagttggaactttctcatgataaatccctcaactatatctatattttgtattctaaagtaagggatgacgtgaacatctataaaaatgataccttctctaatatgtatttctttatcatctaaaaaatatctaagatgtttaaacttaaaccaaggcactataatcataaataaaatacaaactattgtagttaaaattattgctccaattattaaatttttagtattaataaaatggaattttaattcattaagcaatattaaaatagacaatgctatcactagtaaaaacgtccaaaaagcaccactaattctcattactttaataccattttggtgcatatatttataagacttcatgagtatcacctttcatgtaccaatttttgagtttaagaacattatctacttcactaaacttcaaaccaatgttttgctgactactacccttagcaataacaaattgaaaatttgcgagttgacttctttcaagaaagggatgttggctaatagtcattcctaaaactttttcttttttaacataaaatctcttaatatttaatatagacgctttttggacaacaagctctgattcgctaaaagcaaaac

SEQ ID NO: 3987 - DNA, 3198 bp, Artificial Sequence
  Description of Artificial Sequence: synthetic nucleic acid sequence
attatccaaccgataattattgcaagtccaccagcttggccacccatatctgagatgatattgaatgcaccaccgcctatcatagagcctatgactaaaccaattaaggaagttttacctaatttattttcatccatattaatctcccctaataaaggtggtaaaaatcttgttatttgatttaatgaatgaattacttgtgacttttaccacctttcaaatttaaatatcttctctaaataacggctgactcatacatcttgggcctccgcgtccacgtacaagttcactaccagtaatttcaatcactttaattcctttgtcgcgtaaaagttggtttgatacatagttgcgatcgtatgtcaccacaacccctggtcgaatacataatgtgtttgagccatcattccattgttcacgtgcaccatcaataacgtcgccattacctgttggaataaagtccactttttctacttctaaaacttcagcaagtgtttcacgtaacttgctagaacgagtaatttttatatcgtccttaccatcattttgttctatggtaaatatattcatattattttcttctttaaatattgctgcatgtactgtaaacttatcgtagtcaatcatagttagtactgtatctaggtgcataaatgtacgtgtattaggtatttcaatagctacgatttttttaaaacttgtgtttgcatctttgaaaatattacgtgctaacttttctattgcttgagctgatgtacgttctgatataccaatagctaaaacatctttcgataatactaattcatctccaccttcaatattaaatggtgagttacgatctaaccatactggtacatctttatctttaaatcttggatgatgtttcagtatatatgtcataaaaatagattctctacgtcgtgctctccaatacattctgttaattgtcattcctctaccaattgaagcttggggatctcttgtaaaataaaggttgggcattggatctaagtaaaatggatatctatcatccatatattctactaaatgggttgtttcaagttgaatttcttctttacgtacgccagccatgattttatttacaagttcttggtcagataactttgaaaagaattctttaatttcagtttcatgacctaatattgtctttttagattctgttaatatgtcgtttatgaagttctcgcgtacttctggctcagtaatagattctgctgcaagtttttctaaataaactacttcgattccttcatctctcaaagtttgagcaaatttgtcatgctcttcttgtgcaacttttaagtagggaatatcatcgaataataaaccacttaaatgatcaggtactaaattttctaattcttttcctggtctttttaacaacacagttttcaatttgcctatttcactatttacttgaatgggtccttgtaccatttcaaattcctcctttgctttattacattcacattataaaacgctttcaaaaaacatcgtgtgatttaattcacaattgtttagggagggttttcacatatatagatttattcaatgcaaaattttgtatgaatatgtattttgtactatataatagtgaataatttgaaaaatctcattgttaaaaccttatcttattcaagcaaaaagattttttactcatttttttgtattagtaatcattcctattaatataatcatttaatttttaagggaataattgataacaaacaaattctgctatttcatttgaagaagtcaaaatcatcaaagtatcgttacctccaataattcctaatatttctttcatttgtaattgatctatgtaataacttatactttgagcaaagccaggagatgtttttattaagacatagttatttagcgttataaattcaataatctcatcactaaatatttctaattgtttttttgcacttaattgatttgtttgatttattttcttgtaaatatactttttattttcaacagggattttgtaaatttctaattcttgtaagtcacgagaaatagttgtcaagctatagtaaactccaaaatgtcttgccatgtaatccactatttgttgttttttattaaactgattctgttgtataacagttaagataagatttaaacgtttttcttttttcatttttattaccccctttattatttttgattatgaaatagattttaaataactgtataaaaatcacttataaatctcaatttacaaataattttgaaatagtggatgctttaattataagtagattattttatgcctaaaaggagagattaattagaatagattatagtcatcataattataaaatcaaaataatttgcgtaataatagcgaaatgtgtaaattgtaaatgtcaggtaataacaaaacatgttaggtgagaatgtcttacagttacatttactatgtataaataaaataataacattaataatgagagttaggtaataaccacaatatctcataaaagaagtttggaaaaaggcattgaaataaaaagtagtttataagttgaagatatttaggtatgtattagagcgctttataaataaataggtttatacaaagaattacaaaaataatataaaaaatagaatctaatacatgataaggaatatatttgaataatttgaatatgagaataagcatacatatttagggtatatataagtaatagacatctaaataataagtaataggaggctggtgtagatgttcaaaaatatattattaccctatgatttcgaaaatgattttagtgctatccctgactatttagaaaaagtcaccgatgaagattcagttgttgtaatttatcacgttgtaacagaaaatgatcttgcaattagtgtcaagtattataataagcataaagaagatattattagagaaaaagagaaaaaactcactccatttttacgtgaattagaaaaaagagatattcaatataaaatagatgtagattttgggcatattaaagatacaatcttagaaaaaattacttctggagatataaataatggtgaatttgatttagtaattatgagtaatcatagagtcgatttgaatattaaacatgttttaggagatgttacacataagattgctaaaagaagttctgtcccagtactaattgttaaataaacata

SEQ ID NO: 3988 - DNA, 3572 bp, Artificial Sequence
  Description of Artificial Sequence: synthetic nucleic acid sequence
gatcctgatggtaaagcacaatctctagatatggatgagattcgaaatcctataaaagcaattctattaaatatagataacaaagattttgacatgattgctcatcaattagtaagtcagtctcatggtattgaattaattcgtcattacagtgagtcctatattgatgtaacggcacgtggcgttgataagtatactactattcaatatattttaggaactaatagtgattatatcgcttttggtaatgatcacaatgatgttcatatgcttgaacatgcgagccaaggttattttgtgactaatcaatttatagaacacacatcattttttaaaaataaaaatattacagttattgatgacacaatatatgcaatatgtgaggttttagatcgatatctgtaattaacaatttgagtccaatgcatggtattttggtgaaggtggcaatcaaataacgattgaacaactaaagagaattaaacaggcattcctaaagtaaaatgattatatagcggtaaaatttactcaaatgattaactaataacccccaaaagttagattttaattccaacttttgggggttattatgtgaatgaaaaatatcttaatcatttaaatgactatgactatattcaatattcatacgtttgaattaatagttttgtatatggatgtcttttatggctaaataaatctttacttttaaaatcatctactatttgaccgtctttgataactattatcctattcgttaacctttgtaaaacagataaatcatgcgagatgacgattagtgttttattttgaatgtttttttcgttaagtaaaatattgattacattttgttcggccatgacgtctaagttcgaagttatttcatcacaaaccaatatatctggttgtgctaagagagaacgtataatatttaatctttgtagttgcccaccacttacctcttgaggaaactttgttattagatctgtagacaaattaaattcaattaaatagttaagaatgatatttttgatattttgtcgtattaattgtcgataaaataaaagtggctctctcaaagactgttcaatcgtgaattgacgatcaaaactttctgtcgcatgttgaaaaataggtagaacctttcctgaatcgatacttatttttccttttgttggctttaattgacctaatattaaagaaccaatagtactttttccagcaccgctttcccctaaaacccctattttttcaccacgttgaatacttatattaatatcttttaaaacaggctgttttcgatgatatgaataatctacatgatcaaattgaatcataattagatgttgtcctccttttgcagcttgcttctatagtttaataattgttctgtataccgatgaagatgatggtgattaaataatttgtctatttctccagattcaatcatcatgccatttctcattacattaaaataatcagcatatttgaggacatgattcatgttatgagtgataagtaatacagtattatgatgatctttaacaatgtgttgaaggagttgcattatttgatgaccgttcactacatctaaagatgcaacaggttcatctgcaataattaattctggatctaacattaaaacgctagcaatattaactcgctctaattgtcctcctgaaagttggaaactatatttattaatgattgattcatcatttaagttaacccaagttaaagctttttttatctttttcaatgcattatccttagaaacattaaaatgataacgatatatagctataagttgtttatccaaacgagtatattcattaaaactttgagcataattttgagagatatagccgatatgtttacctaaaagttgcttgataccagaagtattttgaccttgcattttaaattcatcgaaactcatatgtaactgagtaggtaaatgatttaatattgctttaacagtcaaactttttccagcaccactttcacctataatgacatttagagattgattatatatatttaagtcgacatttttaataattgcttgcccttctttatcattgatgtttagattttttattgttaaaagtttcaacttttacacctctttgttctaataaacgatctcttacagcatcaccagttaaattaaatatcaatattgtacctgatatcaaagatgctggagcgataatcatgataggatgtgaagtaataaattcacgccctgcttgtaacattgccccccactctggagatggtggttgtgcacctaaacctaaaaatgataatgaactaatgtataaaatgatttttccaaaatcaactatcataataacaaatatagatggtaaaacttttggtaataagtgtttaaataagatattcaaagttgagacattaaaaaattgtgccatctgtatatacgattgattcatttcggtattgacaatccctcttgtcacgcgagtataattcatccattttatgattgtaatagctattactaaattccaaagactaggatgaaaaaaacttgctaaggcaatcataataacgaattctggtatgcttaatcctatatcaataattcgcatgataatcgtatcaatccaaccttttttatagcctgcaagtaaccctaaaggtactccaaccactacagtgaaaagtaaagtaagtagtgtaacaaacaatgttgcacgagagcccacgactaaacgactgaataaatcacgtccgtaatcatctgtgccaagtaaatgattcatactcataggttcaaatgagtttgacaaatgtacctgatacgcagcttcatcattgattataaattgcaatacaataagacatataatatagaccgtaaaaatgaaaaatatagtgtttttctttgacaacttaaacttcatcgttacgaccttcttttctatgtgaattaaaccatttaaactttgatgtttctttctgagtaatagcataacgttgtttaggatcgataagtaatgaaagtaaatctgcaattgtgtttataatcactacaaagaaaccaataaataatacacaaccttgaatgactggataatctctcgactttatactgtcaactaaaaaatagcctaacccaggaatatcaaataaattttcaatgactactgttccacctatcaaactaccaatggataatcctaatagaggtatgattggtagtatcgtaggtttaaggatatcttgaaaaagtatatatctttcgggcatacctctgagacgagacgattcaactataggtgtttgatattgttctaataaagtagaacgaataaatcgaatataataagcacacattccaatactcatggtaattattggtaaaatatatgaaacgaaacgcccctcatctgaagttggtaaaatattcaacttcaagctaaatatatataataagataagaccgataaaaaatgatggtaggcttacggataatgatgtcataacacggattatcctatcccaaattttatggtagtaaaccgctgctataatccctaatggta

SEQ ID NO: 3989 - DNA, 4342 bp, Artificial Sequence
  Description of Artificial Sequence: synthetic nucleic acid sequence
aaagttacacgtaaattgccacaagcaattgaaggcttgaaacctactttaatctatccattactttcagtttcaattactggattgttaatggtgtatgtctttaatccgccagcagcttggttaaatcatttgctactaaatggtttaaatagtctgtcaggctctaatattatgttacttggtcttgtgattggagctatgatggcaattgacatgggcggtccatttaataaagcagcttatgtatttgctactgctgcattaacggaaggaaatgcagctcctattactgcagcgatgattggtggtatgattcctccattagctatcgctacagcaatgttaatctttagaagaaaattcactaaagagcaaagaggctcaattgtaccaaactatgtcatgggattatcatttattactgaaggtgccatcccattcgcagctgccgatccattacgtgtgattccttcaatgatggttggctcaggtgtggctggagcaattgctttaggtttaggatcaagtatcaaagcacctcatggtggaattttcgtcattattggtactgattttaaccatatacttcaaactcttattgctttagttgtgggtacgttagtttcagctttaatttatggtttcttgaaaccaaaagtaacagaaaatgaaattcaagcatctcaagctatggatgaatagtaattttaaaattagtaataacaatgctttaaatatatagaaaattaattgaattaaacggtgatttccattttgaaaataaatgggaattgccgttttttttgaatcgaaacttatgttgcattggttagattgaatgttatcgttgtaataaagactaagaagttttaataaatttacattaaatagttattttgtatgaaaataatatcttaaattaaaaatacagttattaaattaagaatatagagtgaattagtaaaattcatctgttaaccagtaaaatattgaaaaagtgatattcattacgaagaaagatataataaaatagttcagtcaactactaataattcaaagaaaagaagggttcaatcatgtcagaatatgttttaacgaatggcatcgtatatacagaaaatgaaatgattaacaatggatatgttcatattaaagatgggaaaattttagacgttggtaagtgtccttttcatccgtcatcgtcgcataatacaattgacattattgatgtaaaaaaacgacatatactgccaggatttatagatattcacatccatggggggtatggtgaagatgccatggatgcatctgaacaaggcttacaacatttagcagaatcactcctttctgaggggacaacatcttttttagcaacaacaatgacacagtcaacagtcaatattgagcgagcacttcaaactattgctaaatatactcaacaacaagatgttacaaatgctgccgaaattgtgggagtacatcttgaaggtccatttatttcagaacataaagtaggcgcacaacatcctcaattcgtacaacgtcctacggttgataaaataaagtcgtttcaggaagtagcgaatggactaattaagattattacgtacgctcctgaagttgatggagcaacagaaacgttaaagacaatgaaaaatgatatcattttttcaatcggacatacggtggcaacgtttgatcaagcgaatacagctgtgagtcatggtgccaaacacatcactcatttgtataatgcagcgaccggctttcaacatagagaaccaggtgtatttggtgcagcctggttaaatcaagggttgcatactgaaatgattgtggatggtgttcattcacatcctgcatccatcgcacttgcatatagacttaaggggaatcaaagctgttatttaattacagatgcgatgagagctaaaggaatgccagaaggacattatgatttaggtggtcaggatgtgattgtaaagggaagtgaagcacgcctgtcttctggggctttagctggaagtatactcaaaatgaacgaaggacttaaaaatttaatacaatttacaggtgacacgattgagcatttatggagagtaacaagtttaaatcaagcgataacattaggtatagacgacataaaaggtagtattaaaatcgggaaagatgcagatattgttatcatagatgatgcatgtaatgttgaaacgacgattaaaaatggaaaatatcatgctttcaaatgatttgtcattggttgaataaaaaaattattttgtctacaatatagtattggcatatgtttaacatataacaaaagatttatgatagaatgaagccaatcacattttttacggggagtatcacgatgggaaggtcttagcatgtagttgtcacttattgagtcatgatgatttaaatacgtgttacctaagcgtgacacaacatatatggaggtgaatccctagaaatagggaattaattggaaacttcgaccataattagtttagctatattttttcttttgattgcattaacaacagtattcgttgggtcagaatttgcactagtaaaagtgagatcaacgcgtattgaacaattagtagatgagggtaataagagcgcaaaaattgtcaaaaaaatgatagacaatcttgattattacttatctgcctgtcaattaggtattacagtaacatctttaggcttaggttggttaggtgaaccgacatttgaaaagatgatgcacccactattcgagttattacatttacctagtcctttaacaacgacgatttcatttgttgtttcattcattgttgtgacatatttacatgttgtattaggcgaattggcacctaaatcatttgctattcaacatacagaacaacttgcacttttatattcaagaccattattttattttggtaattttatgaaaccacttatatggttaatgaatggttcttctcgtgtgattgtcagaatgtttggatttgatccagatgctcaaactgatgcaatgtcagaagaagaaataaaaattattataaacaatagttataacggtggagagattaaccaaaccgagcttgcgtatatgcaaaatattttttcatttgatgaacgtcatgcaaaagatattatggtgccacgtacacaaatggttacgctcaacgaaccatttaatgtagatgaattattagatactatcaaagaacatcagtttacaagatatccaatcactgaagatggtgataaagaccatgtaaaaggttttataaatgtcaaagagtttttaacagaatatgcgtcaggtaaaccgattaaaatcgccaattatattcatgaattacccatgatttcagaaacaactagaataagtgatgctcttgtaagaatgcaaagagagcatgtacatattagtttgattatagatgagtatggtgggacagctggtattttaacaatggaagatattttagaagaaattgttggtgaaatcagagacgaatttgatgatgacgaagttaacgatatagttaaacttgatgatcatacttatcaaattaatggtcgtgttttacttgatgatttaaatgaaaaatttggcatagagtttgaagattcagaagatattgatactattggtggttggttacaatcacaaaatactaatttgcaaaaagatgacttcgttgatactgaatatgatcgttggacgattacagaaatcgacaatcatcaaattatttgggtcaacttaaattatgaatttaatagtggacgtccttctgttaatgaagaacaagaagatgacgaacgtgattaatatttcaaaagataagttgtgggatagaacaccaagtgagttctatcccactttttgttttatataaggatactcatcatttaagaataataaattgctttatattaaaataacacaatgaatagttcaaatttgttttatcagtaaataaaaaaggtattaaaatgttaataagtgaataatttctatgtaaataaggagagttaatgtactatgacaaatgatgtccaaattttaaataacggttatccaatgcctgcagttggattaggagtttataagatagcggatgagcagatggaagaggttgtccgtacagctttagatgcaggatatcgtgcatttgatacggcatacttttatggaaatgaaaaagccttaggtagtgcattaaaacattcaaatgttgagagggacgagttattcataacatctaaactttggaatgattatcaaggttatgaccaaacaatagagtactttaataaatcattggacaattta

SEQ ID NO: 3990 - DNA, 3245 bp, Artificial Sequence
  Description of Artificial Sequence: synthetic nucleic acid sequence
tgcttatggtgtgaataatcatattattcacaccataagcatgaagtaacttcactatagcgatacctgctgcacctgcaccatttaatacaacttttatatccgttaactctttatctacaatttttaaagcattgattaacccagccatagtaacaatagctgtaccatgttgatcgtcatgaaaaataggtatattggtctctttctttaaggtttcttcaatttcaaaacagcggggagctgatatatcttcaagattaattccaccatagtttggtgcaataagttttactgtttttatgatttcttgagtgtcagttgtatctagagctattggcacaccattaatacccgcaaaacttttgaacagtgctgcctttccttccattactggaatacttgcttctgctccaatattccctaaaccgagaacagcagttccatctgttacaacagcaactgtatttcctttaatagtgtactcatatacttttcttgaatcttcatggatttctttacaaggttctgcaacgccaggtgagtatgctaggcttaattgttgcttatttgtcactttaacatttggtgtaatttctagtttaccttggttctctctatgcatttctaaagcgtcatctcttaaagacatttaatcaacccctattttattttgtgagaagtcattgaactatatatattcaatacataagtcaatccatgaaaagaaaactgaatcattttaaatatacacgatttactagtaaatatgtagaacaatagtacaatcattgaaagtaaattgatttttagatgttgcaattcaaattatttcttctgctgataaaacagatttagtgtgttaaatcagaacaaaaaataattataaaagaaaaactgatgattaagaaataatcatcagttaactatatcataatttaaaaatcgttaaaagttaaataaatctaatatcagctggcgaataagtttgtattaatagatcaaaattttgacgttgacgttcaatttgtcccaacattgtcatcttatttgcactttcgtcaaaaccataaatatttaatgcatgttgttcattagattctacttttgaatgttcaaattgtggttctagaggaggtgttattcatgctagaaattcttgttcacatcacgaccacagtcatcaatggttgtattgttgcgttatttacgcattggctacgtaatcgcaacaataaataggcgactatagccacacctaaaaaatcccctcactactgcaatagtgaggggattggtgtattcacactagaattcttgttaaccatattataacactgattaatagaggaatgcaaaaacataagaaaagtaagtgcaattctataattagaattattgattttctttgatactataaaattgctaacattaaggctaattagttgaatacaaaatcaaggtgggagtattaaatggaaaaggttaaatcatatttaaaagacattcaaaacaacgaaaagtatcaaaaagatatagaatttcttgaaaagaaaagtaatggaagggaagacagaaaatttatattagatatattctttttatagataattcccttgatttcaatttatattacatattttttaagtttttccaatccatttgcaatttttatattaataattacagctgtgtcagtttcttataaaattgctaaaaatctattggatcacatgtacaaaaatgaggatagatttctagcattacatagaaactacgaaaaggaaaaactattatttcttactttacctattattggactcataactataataggaagttcatttctcttcgattatttaatatttaaactgaataatacgtctgtagaaatattagggtccattcctactgttatatatcaaattattatttgttttattcagtttatgttcacggctatgtttttaataatatttatttataccatttggttttttatatatggaaagtttacaaaataaatgattagagtacaccctaatcaaacaaaataagtcattgaaattattgtggttagtactttacttgttatatgagaataagtttatctaataaataagaagatagtaggctgttgaaatgatacaaagctccttttttagtaataagaagtttatcccaatttagtacattgattttggtttaatgataacatttgaaattcatgattatataccaaccattcgacaatttttgagtttgttaaagtcttatatactttaaaatttaaagtggtattattagtataaatatagaggaggttttattatgtctgtaaaaaatataattaaacaatcttgggaagatcttaaaaatttagagttaaattttaagaatgtaagtattttggttgttgtaacatttatacttagtaatatttttactccattagtcggcgttcctgtcggtttattaggcagtgcatattggattcaaaatagaaaaagaaaataaccttcttgtcttgatactatatagaaataaattaaaccaaaaataaaaagccgatacatcggctttttttagtgttcatgtgaatattaaaaaattatggagtgatgatacgtgaacacattcgttttcggcgtggtctaaatatcctcttaaaatacaacaactgttgaagatagtaagcgtgagacaaatttaatattctttatctataggattgaatatatccgtatttccacctcgttcttgcacaattttagatgctacttcgtttccccatatacaagctttttcaatactttggttatctagcaaacctgctataaaagctgctgtgtgtgaatcaccagcgcctatagtatcagttacaggaaccttttccccctctaaaatcttaactttacacttatttgctataagagtacctttgttgcctaatgtaactatcacaggttgattagtctgtttacttacttctaatgccgcatctttcacatgattctcactactcaattgtaatatttcaccttcgttggcatgtactattgtgtttatttcaagcaacttccttatactctcacagttcattttattaatccttggtgaggggtcaaaaataattgtagttttctcgtttaaacgactaaattcttctaataaaacttcgtctgaaggaggttcaaaagaataacctgacacataaatataatcatacttattaagatcaattt

SEQ ID NO: 3991 - DNA, 3116 bp, Artificial Sequence
  Description of Artificial Sequence: synthetic nucleic acid sequence
caccgactaaacctacaaatccatgtacaaacacgactggatattgatttttatattgagcttgcgcagtaagttgattgatatgtttagtttgttttgatttcacaacgcgtggtgaagttaatgatgtttgctttttttgatttgttttaactgttttatcagtttttgtattacctattttgtgtactttagaagatggttgttttactgttttatctctatctcctatagactgtgattgtttaggttgtgttccttttgaagatggggcttgagtttgatcagatgggtgttgctttttatctgatgaatcttgatcattattttggttttgagtattaggttgatgttctgtttgtgagtgttgattatctttaaactgttgtttgcctttatcatcttgattttggccttttggatatgtatcctgacgtgaatttggggtaacatgattgtcttttgattgttgcccctttaaagtttgttcttggtcatttaatggtgacgtttgtgttgaatcttgttgagtttgattattctttttttgtacattttcatcagattggttctcttgattagtctttgattggctagctgtgtcaccctcttgattcaattcgtatgataaatgagttgtatcttctttgtgttcaacttgttctgtttgttgtgactgttcgttaaaatctgatgatgattgtgtcatttcagcagcttgagcatgctgaccactgacaaatattgtaatcccagtaatgattgacacgactcccaccgtgtacttcctaatgctaaatcttcttgtttcattattatttttcaaaaaaatcacctctataagttttttcccctataaaagatgaaaatataactgttatgtatatattaacataaaaatataaattactttagtttatttattaaaactttgtaaactttacattttgaattattaaaaataatcaatacttacatataattattatgtgtatacacaatattaaaaatgattgataacatattgaaaatgtttttcattacacatgatgaagaagcatgagcacttgataataattagaagtgataattataaacatttgcttcatagtcgtgttaaaagtatagacatcatgtcactatatccatccattattccattataatttatatcaatttaattttgttcaatttatatttttaacgtataagtattataacttaacgtttaggaaataaatgaattatattttaaaataaatgttatattcgatgtgaaagagttgcaaaaacttttgtaaaggagtactttttatgaagaaaaaattaagttatatgattaccattatgcttgcttttacgctaagtttagcacttggcctatttttcaatagtgctcacgccgactcgttaccacaaaagaatggtgcaaaccaaaaaacaactaaagtcactgtcagtaataaagacgttccagatgcagttcgcaaacttgctgaagaacaatatttatctcgtgtagctttattagataaagcttccaaccacaaagcaacatcgtatacacttggtgaaccttttaaaatttataaatttaataaggaaagcgacggcaattattattatccagtgctcaataaaaaaggagatgtcgtttatgtagtaacaatttctcctaatccttcaaattctaaagcttcaaaacagcaaaacaattattccattaatgtttctccatttctttctaaaatattaaaccaatataaaaatcaaaagataacaattttgactaatacaaaaggatattttgcacttactgaagatggtaaagtgacacttgtgcttaaaacgccacgtaataatgaaaaaacatatgaaaatgccactgaatccactaaacctaaagatttaaatgattttaaacaaactgcatcagtaacaaaaccaactttagaatatcaaagtacacgaaatgaaatgtacgcagaatatgtaaatcaattaaagaatttcagaatacgagaaacacaagggtataatagttggtgtgccggctataccatgtcagcactattcaatgccacatataatacaaatcgatataatgcagaatcagtaatgagatatttacatcctaatttaagaggtcacgacttccaatttacaggactaacatctaacgagatgcttcgttttggtagatcacaaggcagaaatactcaatatcttaatagaatgacttcatataatgaagtagaccaattaacaactaataatcaaggtatagctgtattaggtaagcgtgttgaatcaagcgatggtattcacgctggacatgccatggctgtggctggtaatgctaaagttaacaacggacaaaaagtcattttaatttggaacccatgggacaatggtctcatgactcaagatgcacatagtaatatcattccagtatcaaatggcgatcactatgaatggtatgcatcaatttatggttattaatatagaaaggtgtgcttatgcataattacaacaacataaacatcgtaagtgacgattcaaaatatcaagaaatttgttggttccatacattagaaggtatttggcatcctgtagaagtagaaacttcaccattaaatattacatttaataaagatataacacctaattacgtttgtacgttaataaatgaagattccagaaaaataattttaagtaatgtagacaatccgaatatcattattgaaatgattcttattaattcaaaaaaattggtttttaatgctataagtaaagaaggcttaggtacctcgcctaaaatcacatttacaaaataatttataccctgtaactctttcattaaaaaaacaatatgatataactaaaaagctcccagtaaaggtcacattttaaatgctttctttactgggagtgtttattattacttatttttctatgatttctttaggtactgtttctaaaaaggaaacatattcatttaaatttatttcttcgtctacgaagataattcttcctccgtgacgcgtacctttttctttaatattaaagattctacgatatcctaacttaggcgacgcaaaatatccagtcgtgta

SEQ ID NO: 3992 - DNA, 3246 bp, Artificial Sequence
  Description of Artificial Sequence: synthetic nucleic acid sequence
atttactcatataataaatgcctcctttcaccaatagtacgttgtgccatcccaatttcatttgcatgaggaataagaaattttacatttgtaagcgctttcttattccttcgattccattctacttcaagtattttgagttttcaaacaattgtatgttgttaattattaatactttataaactttataaattactgtttatctaactcttaaactgatttaaaaaagtaatgatgtttgaacgttgtacgattataaaaagacctgtacatcagcgtgtgataagactatgattaaaatgtaaaaaagatttaggtaaaggaagatggtgtcgtgggaagtactgttaaatatcgtaagtttattctacctattgtcgttggtttaattatctgggcattgacgcctattaaaccagatgccttaaatgatcaagcttggtttatgtttgctatttttgtgtcaaccatcattgcttgtattacccaacctatgactataggtgcagtatcaatcattggttttacaatcatgattttggttggaattgttgatacaaaaactgccgttcaaggcttcggtaatagtagtatttggcttattgcaatggcctttttcatttcaagaggatttgtaaaaacagggctaggtcgacgtattgctctgcaattcgttaaattatttggaaagaaaacgcttggtttggcttattcacttgttggtgttgaccttatcttagctcctgctacgccaagtaatacagcacgtgctggtggtattatgtttccaatcattaagtccttgtcagagtcatttggttcatcgccgagagatggttctgagagaaaaatgggtgcgtttttaatctttactgagttccaaggtaatttaattacttcagctatgtttttaacagctatggccggtaaccctatagcgcaaagtttagctgaaaaaacggcacacgttcaaattacatggatgaattggtttgttgctgctattatacccggattgatttctctcatcgttgtccctttcattatttataaattatacccacctactgttaaagaaacgcctaacgctaaaaaatgggctactgaacaactagaagaaatgggacatatgtctatagccgaaaaattgatggttggtgtctttatcatagcattggctttgtgggtattaggaagcttcattaatgttgatgccacgctcactgcatttattgctttagcattgttactattaacaggtgtattagcgtggtcagatattttaaatgaaacagattctgcctaagttgcttacgtataagtcatacttctcgctgtacttccaaatttcatcttttgctacaactctttcgttaaactcttgtttcttattcactctcggcattgtgtccgtaaagaagcacttcaatttatcgttatatgtgccacgttccttttggtaccacaatgtattgagaggaatgcctgtaatgttgtgcaaatgagataagtctgtcttagtcactgtgtggctaaatggctcatacatatacaccataattaatcctccttattacgtcgtcttacaagtgcgataccagtgactagtgctaacaatccaaagacacctacattttcaacttgtcctgttttcggaagctctttttcctgtactttttcagcttctttcgactctttttctaattcttgttcattagccacgttacccgtaactctttcaactggtttatcaatatgttttggttgttcttttgatcgtgttacaacgaaagtcgtgtcatcttgtatttcttttggtgacacttcttctttattttctacctcaacaattttacttggtttttgaggtgtaataggtgtttcttttttctctgttggtgttttaggttcttggtgtttttctttaacttctgattgttcaggagtttgtggtgtttcaggtcgtggttgttttggttcttctgacttagtaggttgttctggtttgttaggttcttcaggtgtttcaggattgttcggttgttcaggtgtgtttggttcttccggaacgtttggtgttgttggttcttccggagtttcaggttccttaggttgctctggttctgtaggttgttcaggctctacaggtggaatgttgtcaccctcaccacctccaccagcgttagatacttcagattcaacattttctaatgtttctttgtatccgtcaccagtcaattcaacactgtttgtgtattggtgatttgtacctaataaaggtgttgttgtgtattcaatttcatacgctttattaatttgttttaagaaatcgattgtaaatccattagtggttggtgttaatttataatcatagaaaggacttcctaactcttgattatctacatcgaattcagtgacagttaatgaatcttcatcgaatgttaaaccgtcacccaatgtatcttctaaacgtccattattaatagtttgttcatcctggtttattcttacatcccaacgtactttgttgtcatcatctacatatccccatttttgtaacggacttttgttaatttcattttgtgcaacgtctactgtgtatcccttgtcaccaagtttgatgtcgtaactctcgccggctttgactttatctctgttgaacatagtctcaaaatacatccaacctttagtattttcatgtgtcgctaagtaatctgtcggatcagttaagcttacattcactaatccatctcttgtcgcattaactctgccaatattgacattatcaggtgtgtttaagtcaaagttttgttcattagcaagtcttaactgttcaggaagattaaagttaatttcatcaccctttttataacctgtagcgttccattcgtaattgacttgttgtttactccaaataggtgtttgtccgttttcgtctgtttgtgttttgaaatctgtgttagtgataaatcgaggttgctctgtcgcttgtgtagacacatcattttgggccgtttctttttcttggttgttttgtaccacttcttcattacttgcttgtagtgtgtctgtgtgtacttcttgtgttgtttctgcttgttctacattaggttgttctctttgaacttcgttttctgcagcgtgtgcttgtcctccaaagaaaattgctgtccctacaatgacactacctactgctgtgttaaactttctgattgaatatttattttgtacttttttcattttgtt

SEQ ID NO: 3993 - DNA, 3781 bp, Artificial Sequence
  Description of Artificial Sequence: synthetic nucleic acid sequence
cgttctatttgcaactgttaaagtcggacgaacgattttatataattcatttgctatacctttacttgctccacctgcacctaaaattaatatataagcgtcttctataccttcatatatttgttttaaaccattaacataaccaattccatcagtattataaccaatccacttaccatctttaactaaaactgtatttaccgccccaacagatttcgcttgttcattaatatcatctaggtacggaataatacgttctttatgtggaatagtaacattgaatccatcaatactcttttctgaaattatttttttaatgtcttgaaattgattaactggtacatttatcgcttcatacgtgttttccaaatttaaagattgaaaattagcatgatgcatcaatggcgataatgaatgagaaatggggtttccaattactgcaaatttcacttttatcacctctttttaaagaattgaatttcttaaaataacatctacatgttttggaacacgaactatcacttttgcaccagcatcaatagttatgaatcctaaaccagatatcatgatgtcacgtttagttttaccagtttccagtcttactgcttttacatcattaagattaaattgttgtgcatcttgaggcggtgaaagcaatgcgcctaattgggatttccataaatcattagctttctcggttttagttctatgaatatttaaatcatttgaaaagaaacaaacaagtggtcttttaccaccagatacataatcaatgcgtgccaatcctccgaaaaataatgtctgtttttcattaagttgatacacacgttgctttatttcatttttaggtataatgattttcaactcattttcatatacataatttgtcatttgatgtgattgaatgatacctggtgtatcaaacataaatgatttttcgtctaatggaatatctatcatatctaaagttgttcctggaaagcgtgatgtagttactacatctttttctcccacactctgttcaattaatttattaattaatgtagattttccaacattcgttgtacctacaatgtatacgtcatctttatttcttacatggtttatagattgcaataattcatcaatcccccaacctttatttgcagaaataagaacgacatcttctgcttctaatccatatttacgagcagattttctcaaccattcttttacacgtcgatgattaatttgtttaggtaataaatctattttatttgccactaatataatttttttattaccaacaatccgttgtattgcattgatgaatgacccttcaaaatcaaacacatctactacattgacaataattccttttttttcagatagtccagtaagtagatttaaaaaatcttcactttccatacccacatcttgaacttcattataatttttcaatctaaaacatcttctacagatgacatcttctcgaaacatattatgttctggaacatagccgggtgcgtctttattttctgactgtaggggtgcaccacatccaatacattttagtatttcattcaatcaattttcctcccatttaatataacctttttttctaaaatgatttaataatcgtctttcaattaatcgattaaactttgtaattaatccatcagtccgtttaacaggtactaccataattgtatataaaccattacaattgccaccaaacacatcagtaagcatttgatctcctacaacaacggtttctctcggttgaattttcatttttttaatagccatcttaaaggctttccccatcggtttacgtgctttgaatatataatctacacctaaattacttgagaaacttgatactcgacttttattattatttgacacaattgtgacagttattcctaaatctttagccttagcaaaccatgatttaacacccttagtaggttctttaacatcccaaccaacaagtgtattatctaaatcagttatgatacctttaacaccactatcggcaagtttttctatatcaatttcaaatattgatttcacatatgcatttggcataaataatttttttatgattcccactatcttttcacctttacctttataatgattctactaataatgaaactgtctcactagatgataaagctgctttatctaaaaattcttcaaaagaaatatcggctttaccgtttgctaaatcagaaacagctctagttacgataaatggtactttaaattgataacatgtttgcgcaattgcagttgcctccatttcgacagccatagcttctggaaattgttgcttaattttttgtcgctgttctgagctacctataaaactatcaccactaacaatcatacctactttaccattcagttgttgttgttctaatacatgcattgtttttttcaacaaagtaggatcagtagtataagttttaggcatttgaggtatttgtccatattcataaccaaacgctgtagcattagcatcatgatataatacatgattactcactaatatatctccaatagatagtgtttgatctagtgcacctgctgatccagtattaatgacgacttctggattaaatttttctattaacaaagtcgttgagatagaagcattaactttacctataccactttgtgttaaaaccacctctttgtggtttagcttgccaacataaaatttaacatgcgcaatatttatttcattcatatcattcaatttacgctttaaaatcgtcacttcttcttccattgctccaataattcctatcatatatctttttacacctcatttataaagcattagcataagtattttatcacattttaaatatctccacgatagctagttttaaagtatcaatgcttaaatcactatgattaaataatatctcttcttatttataattaaaaactaccctgcaattgatttaaagacagttgcgggtagtcatagaactttattatacaattaacctttccaaagacttgctaaatcttgtaatgaaaagataccagtcattattgtgacaattacggctataataccaaaaacaagcatccatgttgggtgttggtaattaccaacgatagattttttcctacttgcaatgagaattgcacctaatgtgattggtagaatccaaccattaatcgcaccagctattataagtaaactcaccggtttaccaataaataagaaaacaaaagttgaaattacaataaatgtaataacgataagattatttttattgagtaacgatttgtgtagtgtttttaaaaatgttgcgcttgtatatgcagaaccaattactgaggacattgctgctgcaaatattactacgccaaaaatatttttacctataggacctaatgcatgttggaaaactgatgctggtggattttctgaactaagcgtaacgccagttacaacaacacctagtacagctaaaaacaataaggtgcgcatgacaccagttgttaaaatacctgctacagcagatcgatttacgaaaggaaggtatgacttaccttttatataaatctttaccaacgtaaacagctttggaagcattaaatgcttgattagctagcgtattaggtgctagtaattgttggtttttagtaccccaagcaatagaatatagaccattatttgtaggttttactgaatatttacctatagactgagtttgttttccgatattttgagttgtcacatcattaatgtttacccatcctaatggagtattac

SEQ ID NO: 3994 - DNA, 3704 bp, Artificial Sequence
  Description of Artificial Sequence: synthetic nucleic acid sequence
aaagtaaatccacccttaatgagtcgtaaactctctttcaatgcctcttcaaatgtcggcgccttactacgacgaattaagtgcataatgacttcagtatccgaagaagaatggaaaatcgcaccttgttcttctaaattttgacgtaatgatttagcgttaattaaattaccgttatgacatatacctacgctcatatcataaaagtgatataaaaatggttgaatattttcaatgcctttattaccagaggttgcgtaacgaacatgtcctatcgcatgtggataaccttttatatttgacatatgttcgtctttaattgcttcagttaataggcctaatcctcgttcaccttttagcgtttcgtgatttgaaactacaatacctgcaccttcttgacctctgtgttgtaaactatgtagacccatatatgttaactgtgctgcttcaggatgattccaaataccgaaaacgccacattcttcatttaatcctgagtagttagacattgaactatagccccttcccatttttgtttgatatctgaaacgttttcttttatttttacgtctgaattagatatatcaaataactgctgatgagttaaatgcccaatttcttgagcttgatctatatccaaagtttgcccttctttaacaacaacaatatatcgtccttgagtttcactaaataattgtgcattggtaacatccaattgagcttgcatacctaaatcataatgggcactaattttagctaaagtaactaataagccgcccttaccaactgtttgtacatgagatgcaatgccattacgaatagcctgtttgattaattttccttttgaaacttcatcacttaaatcaatagattcaaactcatgattaactgatccatacaacaatttttccaattgactaccaccaaagtcatcacgcgtttcaccaactaaataaatcttatctcctgctttaggtttaaactcttttagatagctcacgtcttcaataagaccaaccatacctacgacaggtgtagggaagatagaggttccacgtgtctcgttatataatgaaacatttcctgaaactacaggagtttgaagcactttacaagcttctgacataccttttgttgaatctattaattgttgatagatttctttcttctctggagaaccatagtttagacaatcagtcatagccaatggtgtcgcccctactgcaattaaatttcgataggcttcagcaacaaccatttttccaccttcataaggttggttgaaaacataacgtgcttcaccatctatagttgaagcaatagctttttgtgttccttctacgcgcacaactgaagcttgtaaacctggcttaataattgtatttgctcctacttgttgatcgtattgttcatataaatgatgtttagatgctattgttgggtgttgtaataacttgataaatgtatcatgtacatctatattgctgtaatcgttttttgatgtattatattccttttcttctccttctaaaatatacactggtgcctcatcagcaagaggttgcacaggaatgtctgcatacacttcatcatcgtatgtaagcacgaatctatcagtgtctgttacttcaccgattactgcactatctagttcgtgtttattgaataaatctaaaaacttttgttctgtacctttttctacaactaacagcattctttcttgcgtttctgaaagcatcatttcatatggggaaattccaggttctcttgttggaacttgatcaagtcttaaatgtaaaccactaccacctttagctgccatttcagatgaagatgaagttaaaccagctgctcccatatcttgtatacctactagttcatcaaaagtaattgcttctaatgttgcttccattagctttttgcctacaaatggatctccaatttgtactgaaggtcttttactttcactttcctcagtaagttcttcagatgcaaatgttgcaccatgaataccgtcacgcccagtttttaaacctacatatataacggaattaccaacacccttagctgttcctttttggaccatatcatgatcaatgattcctacacacatagcattgactaatggattgccatcatagcgttcatcaaattcaatctcaccagccgtagtaggaataccaatacagttgccatatccaccaataccacttacaacacctttaagtaatcgttgattttgttttacagttaactcaccaaaacgaagactatttagtaaattaattggacgggcaccaattgaaacaatatctctaataatacctccgactccagttgccgcaccttgatatggttcaattgcagatggatgattgtgagactcaactttaaatactacggcttgattatcgcctatatctacaacacctgcaccttctcctggtcccattaatacgtgctctcctgtcgtaggaaattgttttaaaaatggtttagaatgtttatatgagcaatgttcgctccacatcactgagaaaattcctacttctgtgaagttgggttctctaccaagaatttcaaccactttgtcatattctttatcacttaatcccatatcttgataaagtttttcaagtttaatctcttcattacttggttcgataaatttagacattttgttccctccaacttttcaccattgattcaaacaatttcacaccactatttgttcctaataatgtttcaagtgcgcgttcagggtgtggcatcatcccacaaacgtttccctctttattaactattcctgcaatatcctcataagagccattagggttattcgtatatttaaggataatttgattgttatcgttgagttcacgatatatttcatcagtacaataataatgaccttcaccgtgtgctacaggataaacaacattctcatttttcacatataaatgcgtaaaaggtgtttgattattagtaatttttaaagtttcgtttctacttataaataaatgtgaatcattatgaagtaatgcgcctggtaacaatccaatctcagttaaaatttgaaacccattacatactcctaaaacaggcttaccttctttcgcaaatcgcttaacttctttaataatcggagcaacacttgccatagctcccgatctcaaataatcgccaaatgaaaaaccaccaggtattaaaacaccatcaaaaccatctaaagtcgtttcacgataatcgacatacgctgcatcaacacctgatttaatagctgcgttatacatgtctctatcgcagtttgaaccagggaacacaagaactgcaaatttcatattatgctttctccttttcatcgataactttatagctatattcttcaatgactgtattagcaaataacttttcacttagtgtcgtaataatattatcaacagcctcgtcagttggttcattaactgtcatatataaaactttacctactcgaatgtcattcacttgttcataaccgagatcgtgaactgctcggtttaaagcttgtccttgtgtatctaaaacttgtggttgtaaagtgatatgtagttcaatcgttttcattatttaagatcctccaatttatttaaaaatgtttgataagtttcaatcaacgagccagtgttgtttctatatacatctttatcaaagttagtatccgtatt

SEQ ID NO: 3995 - DNA, 4138 bp, Artificial Sequence
  Description of Artificial Sequence: synthetic nucleic acid sequence
cattatactaggtgctatttatccatttattaaagggacatggaatcggaataccgttgaaacaatttttagtttatttaaagttttgggagtcattataggcgttttgttaatttttaacattgggccaagttggttacttaatgaacaaacgggaatgtatgtttttaactatttggtaattccggtaggattaacagtacctgcaggaggcgcggtattagctttattagtaggatatggcttattagaatttgtaggtgtttatgcgcaaaaaattatgtacccgatatggaaaacgcctggacgttcagcagttaatgctttagcatcttttgttgctagttttgctgtgggtttacttataacgaataaagagtataaagaaggtaaattcacggaaaaacaagctgttatcatagcaaccggcttttctacagttactgtagcttttatgatagttattgctaaaaccttacacttaatggatatatggaatttatatttttggtctaccttgtttgttactgctgcagtaacagcttgtacagttaggatttggcctatcagtaaaattagcaacacatattatgatcagccatttatagaagaagatacaagcgaattaaaaggttaaaaaaagctactttttgcatgggaaaaagcaatggaaactgttgaatcatcacctaacgtgatgaaaaatatttggttgaatttcaaagaaagtctgattatgactatgaatatcttacccaccatattatcaataggtttaatttgcttgttactcgcagaatatacagtgattttcgattatttagcatatgttttttatccattaacttggatacttcaaataccagattcctttttaactgcaaaaggcgcagctattggtataacagaaatgtttttgccttcattaattgtagtcgaagcaccattaatcactaaatttataattgctgttacttctgtttctacaattatattcttttcagctagtgtgcctagtattctctctactgatatacccatccgcataagagatttagtggttatatggtttgagagaactgtattgagtttaattatagtaacacctatcgcatatatttttttataattcaataataaaatatcgtatataaaaaaatcaccttttttacaaatatttatagtgataaggaaagcaaggatatgaaatttccatcttaatttactgttttttattttaaactcaattatatatttagggtacaccctaatcatacaaaatgaattgttgaaattacagcaattaaaatgtatgattagggtgtatattaattatgaggtgaaactaaatgattgtgggctatgcgcgggtatcatcagtagatcaaaatttagaaagacaacttgaaaatttaaaaacatttggtgctgaaaaaatttttacagaaaaacaatcaggtcaatctatagaaaacagacccgtctttcaagaagcattgaactttgtgagaatgggagatcgttttgtcgtggaatcaattgatcgtttaggtcgtaattatgatgaagtcattaataccgttaattatcttaaagagaaagaagtacaattgatgattaccagtctaccaatgatgaatgaagtcattggtaatccattattagataaatttatgaaagatttaattatacagatattagcaatggtttcagaacaagaaagaaatgaaagtaaacgtcgacaagctcaagggattcaagttgcgaaagagaaaggcgtatataaaggacgacctttattatattctcccaatgcgaaagatcctcaaaaacgtgttatctatcatcgtgttgtagaaatgttagaggaaggcaaagcgattagtaaaattgcgaaagaagtgaatattacaagacaaactgtttatagaattaaacacgataacgatgatttgggttctgttgcaaagtaaaaaaatatagctaaccactaatttatcatgtcagtgttcgcttaacttgctagcatgatgctaatttcgtggcatggcgaaaatccgtagatctgaagagacctgcggttctttttatatagagcgtaaatacattcaataccttttaaagtattctttgctgtattgatactttgataccttgtctttcttactttaatatgacggtgatcttgctcaatgaggttattcagatatttcgatgtacaatgacagtcaggtttaagtttaaaacctttaattactttagccattgctaccttcgttgaaggtgcctgatctgtaattaccttttgaggtttaccaaattgtttaatgagacgtttgataaacgcatatgctgaatgattatctcgttgcttacgcaaccaaatatctaatgtatgtccctctgcatcaatggcacgatataaataactccattttccttttattttgatgtacgtctcatcaatacgccatttgtaataagcttttttatgctttttcttccaaatttgatataaaattggggcatattcttgaacccaacggtagaccgttgaatgatgaacgtttacaccacgttcccttaatatttcagatatatcacgataactcaatgcatatcttagatagtagccaaccgctacagtgataacatccttgttaaattgtttatatctgaaatagttcatacagaagactcctttttgttaaaattatactataaattcaactttgcaacagaacctccattttccttttattttgatgtatgtctcatcaatacgccatttgtactaagcttttttatgctttttcttccaaatttgatataaaatcggggcatattcttgaaccccaaaaaatatgtaatactaatattctatccataaaaagtatgcgcttaatattaattaaaacctattatcagtagtgtatatcaatatatattatgaaactgttgacataagaaaagattataggtagttaaaatgtatatcttatacataatcaataaaagttgaatttaatgtatttgacatagaggaatttttttacatttctttttcgttaactcagcatatcttgtagttcactatattggaaagtatttattataaaatatttctatgtttttgctaagtcttgtctttctatattttcgagtactaataaaaaaactttctcactaatatttaatgttttaaagatcactttactttcctctttaatcgacagtattatattatgttctatatcttgaaacaacatttactatctcttatttatctagatgacgatataaagttgctctacttatgtttgttttttcttttatttcatctagagtgtaatttttgctcatatacatttctatagcatctctaagatttttatcatctcgtttgggtctgcctaacttttttccttcttttgtataattttctaatccaacgcgtgtcctaaatttaacaacatcactttgaaagtctgtaatatcatgtagtatttctaaaaattctccttgaatatttttataaatatatcggtttaaattaattacatataaagatatatccttctgtgaaagaatagctatatcaaaggcatttagaggctatggtcttgggcaacttttacttaaatatgcatgaactatgcacgtttttcttgtgatgtgatgagtttagaagtaagaatagataatgatgttgcacaacatgtttataggaatttgggattccaaaatggtggaaaaagaaagaattattatggagaaggcgaggacgcattagtcatgtgggtgaatttgaaatgacaaataataaattaatcttagcaattgaaacaagttgtgatgaaacgagtgtaagtgtaataaagaatggcactgaacttttatctaatactgttttaagtcaaatagatagtcacaaacgttttggtggtgttgtacctgaagttgctagtagacatcatgttgaaggaataacagcaactatagatgaatcgttagtgagtgcaaaagtgaaaatggaagacattgacgctattgcagtaacacaaggcccaggattaataggagctttattgattggtattaatgcggctaaagctttggcatttgcttatgataagcc

SEQ ID NO: 3996 - DNA, 3555 bp, Artificial Sequence
  Description of Artificial Sequence: synthetic nucleic acid sequence
tcatgccaatgaaccccattccgcccatcatatgacccatacccatacaatttgtcaatcctttccttctttctcgttttacaattataccatagggggggtattagtatcccaaaaaagtgtttttaatattagtagcagacggcaattcattgtaccgcaaaatggcccgattattgattgaactattttttaataaaataattcctacgttcccagttccagaaagcaataatactaaaagcttcctcatctgctttttcctcatcatctgtcatataatctgtatcttttattggatattttccgtttcatcaacgggagattgaatatctgacttatgcttattttttggtttcacaatttttgagcgtaatattttcatgggaacgctccaaatcaatatctttatttggcgcatatttgcgttttaagagcttatgtatgtttttaggttaaaactatatgatctatacctaattctttaaaataccccctttaaattcaaaataagagcatttgaatttaaacaaaataaaaaaacagacctcctgccatctcagcaaggggcacttgaaaaccgtttggaaatcatcaagggacgtgtcgtattttttgaaaaaaccactcaaaaaatctccactcaaggcacgcataaaatatcagcgaatataccaaaggagtgaacatattgattccatattatctttgcctcaaagaaaacataattgaacaccgacacgtcggtgttttagtgttcatgtgaatattaaaaaattatggagtgatgacacatgaacacattcgttttcggcgtgattacaaagagattagaagaaaaaggacttaatgtacacgaagtattcaatatgagcgataaacaggctaagaaagaattatttgatgatttataccattatgtccgctatacaaagccatgcggtgcagaattaacaatggtggcattagatgctgatgaattaatgcattactttatatactgttacatggaacgttatgcttacaaattgaacgcttaaccgttacgacattttgcaaatgtcgttgaactaaaaaaagaggtgactatgtgtagtcacctctttttttacgttgtattcgattctcttcttcaataagtcgagtttttcgttctcgttctgccggctctttctcacgacgttttctatctcgttcaaggatatctgttgttcttccaaaatctcgccaatcttctgataatcctgtgttatccgctcgatttggtttgcgtttgccccaacatgcttaaactttggcaatcgattgtcgggtttctttatcaaattttggtacgatcaatcgactaccttatgcctttttcttaacgaaagcaggcacacttatatttaaagtttccgcagattgttgtaactttaaatattcgtcttcgctcactcgaaaactaatttgtttacgctccttaagattaggtttacggttttgcttaacagtatcgtcgctagccacttgtaaaaagaatttcaataaatatcgtgatgattgatgattaaaatagtgatactaaattttttaatttttttctagggataaatttagtaattgtaataaaataccaataatagtaattcctaaagcactatatattagtacatttgtactattagcattaaataaaataattcctccgattgctgatcccatagcactgcctaaataattaatagaactatttaaagcgacagcagagcctccatattcaggatgttttttcaataatatatgttgttgaggagcttgtgtagcccatcccatagctccccataaaataaagggaattaaacctaatataggcaagttaatagaaataggaattaaaccaaaacttaatgctagtaaaattaaaataattagcataacaaatcttgtatttttaaatctatctataataaatcctataccaaaacttcctattaatccgcctattccccacgctgtaaggtaatgagttaaattttttgtatctgtatttgttttaataatatcggctaaataagtatacaaacctaaactagcaatggcagcgcataatgtaaccgaaataactcttagtacatgcttgtttaaaaataattgaaaacgatcttttaaatttggaggagcttctattttaaatttaggcatcaatatagatatgctttttttgtaattaaatttaatattggtcgataattatcatctattaatccagtaaattcaacgatcaactcaatcgtaaagacaatgagaatgaacatcataagtgcacccaacggttgggataaatagaggataacactagataaactaaacataatcgctattgaataaataagtaaaacggtttgtctatgcgcacttttatttcaagttagtctattaaatgagaataaaacaaatcaaatagaacatgcatcaactatgaaagaaaagtctaatataaataatgtaaaaacaactaaaaataaaaatatggaaaaatcaacgcagacagacaaacaaaactctgtgaacttaaagcaaaacacaaaagatcaaaataataacgcaaatgatgaagcagcttctccaactagcgaacaaaatgcagctatagcacaagcaaagtcatatgcaaatacattacctatctctaagaaaagtttatacaaacaattaacttcggaatacggagagaaatatccggcagacatagcacagtatgctgttgaccatatcagtgtagattataaaatgaatgcactgagattagcaaaaagttacgtaaaaaatataaacatttctaatcaagcgttatatgatcaactcgtttcagaaaatggagaaggatttactcctgaagaagcacaatatgcaatgaatcatttagataggtaatcattaagaaagagttttaacattaaaggtttgttttcttagttgaaagcaaacctttaatatattcgtataaatataatctttatagactgtaaattcagttattataaaattttatagttacaattactttcaatcttttaaaatgtcatcgatatagagaaaattctccacctagtaggttaaactcaattttctatttaatttttataaagtagaatgttaaaaattgagaatttagtacatttgtttatagacattttctccctgaaacaagataatctgattcttcatcttttgtcattttatttgattgagtgcttactggtgagtcttgtcttaatgctttttcaacatttgattttaccatttgattaagtaagttagtaaatgattcaacatttttccttgttttttcagcatcagtatttactaatatattaacaatttgatcatcgaagttttctaaacctgactcattaagcattgaacgagtctcattcttcatttgagataaagctttttctgcttttagttcttcattttcttttaacagcttttccaactcatattgattcttttggtctttattcatcttggctagtttttcagcttcttgaattgcatctttcatacgtt

SEQ ID NO: 3997 - DNA, 3463 bp, Artificial Sequence
  Description of Artificial Sequence: synthetic nucleic acid sequence
agatatgcgtttaagacgtttaactggattagaaagagataaaatagaatctgagtataatgaacttctagaatatattaaagagttagaagagattttagctgatgaagaagtactattacaattagttcgtgatgaattgactgaaattaaagaacgtttcggcgatgaacgtcgcactgaaattcaattaggtggtctagaagatcttgaagatgaagacttaatccctgaagaacaaattgttattacattaagtcataataactatattaaacgtttaccagtatctacatatcgttctcaaaatcgtggtggtcgtggcatacaaggtatgaacacgttggatgaggacttcgttagtcaattggtaacaatgagtacacatgattatgttctgttctttacgaataaaggtcgtgtatataaactcaaaggttatgaagttcctgagttgtcacgtcaatccaaaggcatacctattattaatgcgattgaactcgaaaatgacgaaacaataagtacgatgattgcagttaaagaccttgaaagtgaagaagattatctcgtatttgcgacaaaacaaggtatcgttaaacgttcatcattaagtaacttctcccgtattaacaaaaacggtaaaattgcaattaactttaaagaagatgatgaattaattgcagtacgtctaacaacaggtaatgaagatattcttattggaactgcacatgcatcattaattagattctctgaatctacattacgcccattaggccgtacagcagcaggtgtgaaaggtatttctctacgtgaaggggatactgtcgtaggtcttgatgttgcagattcagaaagtgaagatgaagtattagtagttactgaaaatggttacggtaaacgtacacctgttagcgaatatcgtttatcaaatcgtggtggtaaaggaatcaaaactgcgacaattaccgagcgtaatggtaacatcgtttgtatcacaactgtaaccggtgaagaggatttaatggttgtaactaacgctggtgttattattcgtcttgacgttcatgatatttctcaaaatggacgtgcagcacaaggtgtacgccttatgaaactcggagatggtcaatttgtttctactgttgctaaagtaaacgaagaagacgataatgaggaaaatgcagatgaagcgcaacaatctactactactgaaacagcagatgtagaagaggtagtcgatgatcagacaccaggcaatgcgattcatacagaaggtgatgcagaaatggaatctgtagagtttcctgaaaatgatgatcgtattgatatcagacaagattttatggatagagtgaatgaagatatcgagagtgcttcagataatgaagaagatagtgatgaataattaaaaagggagtaagacagaaacacagagttcgttgttctgcccggaactcttaattaaactatctgtagattttatgaacaaaagtttatatagggaagtcggactagagttgtaatgaggttattttctaactcagtcatcgacgtccaatacgctaaaatgcatgagacatagctatgcctcatgcattttttaatttcttgcttatattaaattgatttgtcctttatgacttctgtagcaccatgcattgaggataaatgaataatcatttccatacatttagacccccttcaatagagggtgtctaaaatataactgtctctttcaacaatgtactttctcaatttaccactactgataaacacagtaattaattctgatatctgttaaccttcaagttgtttcatcacatatggtatttcactaatcagacgtgaaggtggaacaacatacattgtgtcagataatttttcaccgataaaactatgcatgtaagttgcacttgtaacagcttctttaaaattatcaaattggcctacgaagcttgtaatcatgcccgcaagtgtatcacccataccacctgtagccatagcaggtgtgccaataggtaatttatagacatcatcattgcagaaatagatttccgtaccatgttgttttaatactactgtcgcgccaatacgttctaccgcttcaaggttacgttcatatgtctgttcttcaataggtataccgctcaaacgctcccattccttttgatgtggagtgaatataacacgacatgtaggaatttgaggtttcaacttactgaatattgttatagcatctccgtcaacaattaaattttgatgtggttgtatattttgaagtaaaaacgtgatggcattattacctttgaaatctactccaagacctgggccaataaggatactatcagttgcttcaatcatttttgtgagcattttagtatcattaatatctataaccatcgcctcaggacaacgagaatgtagcgcagcatgattatttgggtgtgttgctacagtaatgagcccacttccactataaacgcaagcgcgtgcagcaagcatgattgcgccacccatattggctgatccaccgattaataaaattttaccatagtcacctttatgtgtttcgtcttttcttataggaatattaacagaatctaacgttttcataacgacataacctcccataacatgttatttcttaaaatgttgtaagtcttatgtttgcttttatttcacgaatctttttatttatttcaaacaattgtttacatgtgattttaaatcatctcttctaaatacaattaagaatactatacctgtatctgacattcgtcaatagttaaatgaaactcttttcacatcgtcatgtatcattcattattttagtagactgatagcataatgtagcagttttatttatttaattaaaaatattaaatggaaatagaacgtaaggtgacattacaagcagttaattataataatgttgaaattctctcgcctctcatccgagaaaaattgtatgtatatcgtcacaatgtatctactattacacagaacaaaatatttagtttcaacaagttgtagaagcgggacactaattatttaaaaagtgttgcatataagcacatctaaatatgacgtaattgttgcaaatttaaaataacttgaaatgtgataatgactttgctatattaaaattaagttaataaagtattgttcgtaggacaagtaacatagatagttcgatttcagagagcttgtggtaagtgagaacaagtaatcgacattcatgtgaatctacctactatatgtgaacaatcggtaataaccgttattttagttaagcgcaatttgaggtaaatgtttttaatttacttgaaattgttaaatagggtggcaacgcgtagaccacgtcccttgtctgggatgtggtctttttttattgttttatcacacgaagtcatccataaaattgaatatattttatttgggaaaggatgaaggttacatgtta

SEQ ID NO: 3998 - DNA, 3454 bp, Artificial Sequence
  Description of Artificial Sequence: synthetic nucleic acid sequence
agcttttgttaataatgcatcaccagcaagaatggctttccattcaccataaactttatgatttgttaattttcctctacggtaatcgtcattatccattgctggtaaatcatcatgaattaaagaataagtatgaatcatttccaatgctaaagcactatttagtccttgttgataatctttgttaagcatttttagtgttaataataatatgactggtctgattcttttaccaccagcatttaatgaatatttcatactttcttctaaattagtttttaatggtgatgattgtattgacttattcagtgatgtattaattatatttattaatttattcatctgtagtttcttcatttcctttatcaccaacttcttcttgcattaattcattcacttttttctctgcttcttttaaagttgaatcacaattagcagatagtttcataccacgttggtataaatcgagggattcttctaaagaaactgcttcattatccaatttttgaacgatattttcaagttctttcatcatttcttcgaaactttgcttttctttactcatcattacaccttactttcttaaccgttgcatcgacacttccgtctttcattgttaaagatatttggtcgttttcattcaatttatgtgtgcttgtaaccacttcattgtctttattgacaattgcgtaccctctaagcatcgtattggtggggcttaaattattaagactttctaatttgttttttagcactgtttttaaattagtaatgttattggacattattttggacaatctagaatgcaattgataaatagattgcttttcctgagtaatctgctgatttaaatttttaaaattaaaactttgttgaagtaacttgaggtgatgttttgacttttcaactttagtatttaatagatgatttaattgtctttctaattcatctcgtttttgaatttgttgatcgtacaataaactcggttgcttaaatttgtaatatgatgatatgtgattaagttgtttcttctgatgttcgatatattgttttatatatcttgataatgtatattcatactgtttaatttgttgtaataactcatattgatcaggtgttgctataacagcagcttgagtaggtgtcgcagctctaacatctgctacaaaatcgctcaatgtaaaatcagtctcatgacctacagctgatataataggtgtttgacaattaaagatggttttaacaacatcttcttcattaaagttccacaaatcttcaattgaaccaccaccacgtccaactattattgtatcaacatctaatgaatcagcatattgaatcttttctattatatcttgtctagcttgcgtgccttgaacaagggtactgatttgaatttgttcgaccaaagggtagcgattgttaatcgtactatgtatgtctctaatggctgcacctgtgctcgctgttaaaaccgctattttctttggatactttggtatgagttttttgttactttgatcaaaatagccttcttttttcaatttcttttttagtagttcaagcttttggtataaattaccaataccatcgagttgcatcttattaacatatatttgataatttcctcgtctttcataaacagaaacgcgagcttcaattaaaacctcatcaccttctttaggctcaaagcctaacttagaagcatttcctttaaacatcattccactgatgacactttctttgtccttgacattaaaatataaatgtccgcttgaatgctttttaaagttagataattctcctttaataagaactgactgtagatgaggatcttggtcaaatttatattttatatatttagttagtgcagaaacacttaaatattcagtcatagttatcactcattttaatcatttatattacttaaaacaccattaacaaatttataatgatcatcatcactaaactgttttgtgagttctacagcttcattaacaactacttttttaggtgtgtcgctgtgcaatatttcaaaagttgccattcttaaaataatacgatctgatttcagtaaacgatcgatagaccagtcttttaaatggggtttaattgtttcgtctaaaacgatttgatgatctttgactccagtaactaaccagtatataaaatcaaagtctaaatcagaatgatcatctttaataaattcaattgcttcttgaattgttaaatctgtctcttttatttcaagttgaaataaagtttgaaaagcttgtactcttgcatctttacgactcatattttactccttcaaatgtatttataaaattataggtacaactttctagtaaagtgcacctataatttaaattatttatttttctgcgacgatacttctgatgtgaatattaatttgctgtggttcaatagctgtcattgtcgtaattgaattgaaaattgcttcttgaatttgatttgcagttttagaaatatttacgccatgttttaaagaacaaaatacatcaatgtatattccgtcttctttagcttcgatttttaaatctctgtttaaattttttcgactaatcttctctagatttgttttttttagttcagcaaaatggcctgtaataccttctacttctgatgtcgcaatggatgcgataacagataatacttctggtgctatttcaatttttcctaaattagattgagaataatctgctacattgaccattctttatcctcctattggttattatcgtccataatattatacttttctaggaattttgtattaaattccccacttctaaaaatatgattatttagaagtcttaagtggaatggaatcgtagtgtcgatacctaaaacaagatattcacttaaagcacgaatgcctgtcataattgattcttcacgtgtaggttcgtgaactataagttttgccaccatggagtcatagtaaggtggtatcgtataattagtataacatgctgattcaattctcactccaaaaccgcctggagcaagatattgggtaatcttgcctggtgatggcataaagtttttgtaaggattttcagcattgattcgaaattcaatagcgtgaccgttaatggaaatatcttcttgtttaaaaggtaacgcctcacccatagcaactttgagttgtaattttactaaatctactcctgttaccatttcagttactgggtgttcaacttgaatacgtgtattcatttccatgaaataaaattggttatcatctaaatcatatataaattcaattgtacctgcgttttcataatttacagcttttgcggctctaattgcagcattacccatttcttggcgtttatcttcacttaaaactggtgagggtgcttcttcaacgagcttttgcattcttctttgaattgtacaatcacgttcacctaaatgtataacgttt

SEQ ID NO: 3999 - DNA, 3135 bp, Artificial Sequence
  Description of Artificial Sequence: synthetic nucleic acid sequence
acgtccatggaaattaccattaaaagcgataatttcagctttgttcggctcaatacccttaacatcataagcccaacgacgagcagcttttaaagctgtttcaaccgcctctgctcccgtattcataggcaatgctttgtctttacctgcgagtttacatattttctcataccattgacccaaattatcactatgaaaagcacgtgatactaaagtgactttatctgcttgatctttcaatgcttgaataattcttgggtgtcgatgaccttgattcactgccgagtaggccgaaagcatatccatatacgtgttaccttccggatctttcacccatacaccctctgcttcagaaataacaattggaagtggaacgtagttatgcgccccatagtgatttgttaagttaataattttttcagattgagtcataaaatctccccttcgttttcgaataaaaacttattaacaatatcataactgatttctatcgactctcaaacttattttttaatataacaataaaatgaatcaatatcgtcataatcgaaaaattgaattgtatgaaacagactaaatgttgatgcaaaacatatatgtaagcccttacatttataatgacataacgactctatcattgacaagttatatcgctaataaacaattaatttcaataaaataaaaacatactaagattagctatgaagaaatctatgacgatagattttttcatagctattttttatagttatagagagaagtagactgtccagactcttggattttaaatccgtataaaaaacaagtcagctttactctcgccttttgaaattcgtttgtagtatgttgggttcttgaaaccgtgtataggaaaatgaaatgagaaaggttaagtaaagtttttagcttctcaattattcaaaggaggtttttttatcgattacttaggtgttgatattagtaaaagaagtagtgtagttgcacattataaaaatgaaaaattccaaaaagagtttttcatccaaaataataaaaatggttacaactatttactcaagtatttgaatgacttagaccacccacaactcatttttgaatctacaggtatctattcaagaggtatggaacgattttgttgtgtaaatcaaattaactatattcaaatgaatccgttagaagccaaatttaaaacgagcgctctaagatcatggaaaactgatcaggcagatgctcataagcttgcttgtttaggaccgacgcttaaacaaacagacaacttacctatacatgagttaatattctttgaattaagagaacgcgtccgttttcatctagaaatcgagaatgaacaaaatcgacttaaatttcagatccttgaattactccatcaaacattccctggtttagaaagattatttagtagtcgatattcaatcattgcactcaacatcgcagaaatctttactcatccagacatggttcttgatatcgacaaggaggtactgattacacatatattcaattctacagataagggaatgtcaatggataaagctacaaaatatgcacttcaattaagggtgattgctcaagaaagctatcctaatgtcgatagacattcctttctagtcgaaaaattacgcttacttattcaacaattaaaacaatctattcatcatatcaaacaattagatgatgccatgattcaattagcacaacaactcgattattttgaaaatattcattcgatacctggtattggtaagctaagcacagctatgattattgggaagattggtgatattaagcgatttaaatcaaataaacaactcaatgcttttgttggcattgatatcaaacgatatcaatcaggtcatacacactgtagagataccatcaacaagcgtggtaataaaaaagcgagaaaacttttattttgggtgattatgaatataataagagggcagcatcattatgacaatcatgtcgtcgattattactacaaactaagaaagcagcctaatgagaaacctcataagactgccatcattgcttgtataaatcgattattaaaaacaattcattatcttgtaatgaattataaattgtacgattatcaaatgtcaccacattagccaaacgtacaatcaaatatagtttaacaccttattcaaaaaaattaaaatgaacggtttagttaagtaatgcttattttaattataagtacttgactaatcgtaggaaagagtccggaacataaagttccaggataagtaaataaagacaatttctattgaaataatataaaaattgtcttttttatgattttttataattttcagctcgttgagctggtacttttcttatattaagtgtcattagcacaagtcctagttctcttttgtctttatttatccctcgaacggactttcgagtgaaactcaaaataggcttcataattccaaaaacagactccacatcaatttttctttgactgtagatggtttttgcttttcgttctgaaagcttttgattaatttggacattgaaatattcccaactataattcttcatttttttttatttgtttttgaatcgattaatcgttttataagaaggcttttgattttatgatagccacatcattcggatattatcattaagtaatttttctatcttacgtcctgaaaacacagattgtgtgtaggcatataaaactacttttaacatcatttttggatgatatgatgttgcacctcgatgatgtctgaattcatcgaattcagtctcgggaattgtttctataatatcatttacatgtcgtgaaatatcatttgtggggataagaactgaagtttccattggtagagtaagttgagtcatgttatagtctttatacataaggcacctcgttaattttgtttattggtatttattaaattatacgaaagaccttatttttttaagtatttcattgtgaaattacatataaacacaaagtattttggcgagactcttgagggagcaggacaagctgaagctgtcccctaagaaagcgagccaacaatacgaagtattgtaaataaacagccagtaaatgaatttatgaaaactcatttactgactattttgcta

SEQ ID NO: 4000 - DNA, 3394 bp, Artificial Sequence
  Description of Artificial Sequence: synthetic nucleic acid sequence
atttggcgaaaaattgaatcgctaccgcaaagcatctgatattatagaaaattcagatttagattacacaataatacgtccaggctggcttacagataaaaatgaaaatgtatatgagatcacagcaaagaacgaaacatttaaaggtactgaagtatcacgtaaaagtgtagcatctttagcagtacaaattgccaaaaacccagaactacactctaaagaaaatattggtgtgaataaacctaatacagaaggtaataaacctgcttggttcaattagtataaagtttgtatctacatgcatgggttttcaatcaatattatgatagaatttgaaatagataaataagcttaaatttagggcaagtcatcatggctgccttatttttttgaatttattgctaattatcataaaataaattgtacaatattacttaaattcaaacaggggattatctttcattcaattataaaaacaagatagaattcatttattatacttctaatatctttgatgaaagtcacaataatcatttagctacagatacttttcatttaaatttaatttacctttcaaataattttgaattctgattttgttactttaatcgagtaaaaatactgtgatttatcactgaactaaaggggtaatacttatggcaataaatgaacaattagatactttatataaattaaaaaaagaattggaaaaatctaataacagacctttaattaataccattaatcaagtaataaaaaaagtttatttaaatcaatacaccgcaacatttgtaggacatttctcagctggaaaatcaacgttaattaatttgttattagaacaagatatactaccaagttctccagtaccaacaacgagcaatacagctatcgtttcagtagccaaggaagacgaaatcattgccaatcttacgcaacaacaatatacaaaattaaaaacgtacaacgatgttaaacaaatgaatcgacaaaatgtcgatgtagaatcgatagaaattaattttccatcaaacaaatttaatctagggtttacatttcaagatacaccgggtgttgactctaacgttgcaacgcatcagtcgagtacagagcaatttatgtatacaagtaacttgttgttttatacagtagactataatcatgtccaatcagcgttgaactttaaatttatgaaacgtattaatgaagttggtataccaattatttttgtgattaatcagattgataaacataatgaagaagaaattacatttgaaacttttaaatcaagagtcgaaaaatcaatcaaagactgggatatcaaacttcaagatacttattacgtttcaaagtttgatcatccacagaatgaaattgacaaactttcaaattttctagtatttatggatcaacatcgtgaatcaacagaagactatgttaatagaaccattcaattcattaccgacgcacaatacatatacattcaaaatgaaatgcaatctattcttgacacccttcaaattaatgaagaacaattcgaggaagcatatattcaatttcaacaaaatcaagaagtcagcgcagaagcacaattgctcaatgactctaatcaattatttaattatttaaaacagaagcgtaaagatatattagataatgcttatatcatgacgtacgatatgcgtgaatctttacggaattatttagaaagcatggcaactgattttaaagtgaatggattttttaataaaaggaagaaaaaagaagaagaacaaatcaaacgacttaatgaggcgaccactcaattgcaagagaaagttaatcaacaagtacgacaaccacttcgtgaagatatgtcatttttaactagattcataaataaacatgctgtgaatgaaaaaatactaaatcaagaatatgacgtcgttccgtcacttatatcagagctatatcaaactcaaacgagcattagcaacacatacgttttaacattttcagatgaagttataaaagctttgaataaaaaaatagaaaatgagtcaacaccactatttgaagaagctgtcaatcatgtacaagttaatgaattatcgagtgatgaaaatgaagataggtatgaatatgatagatacattgaacttaacacattaaaggattcgcttacatcccacaactacaaacattactatatccatttagacgattctttagataaattaattggaagaacagagactcattttgaacttaaacaagaaaattcaactgcttatcatcgtaaacatgagacacaacatcgtaacgagtttgttacatctaatcaagatattaagcgtgcattagatatcgttaaagatgtaccattatttgatcgcactaaacaagatatcaccgataccattctgagactcgataatcaaataacaaaagttggtgtttttggtacatttagcgcaggtaaaagcagcttaatcaacgctctactaggtgaaaactatttagttagttctcctaatccaacaacagcggcaacgacggaattatcatatggtaaagagagtcaaatcacattaaaatcgaaagaacaattactagaggaagttaatcatgtactagaattttatgaaatatcgtttaacacattagacgactttattgagagtgatttagataagttaaaattgaaactagaaaagaaccaacttgcatttattagtgcaattgagaaacattatgaaatgtacacatctatgttagaacattcacttatacacacagtatcgcttgaagaaattaaaaaatggagtgccgaggatgagtatgctactttcgtgaaaactgtacaccttaagctacctttagattggctcaagggtaaaatcattattgattcactcggtttacattccaataatcaaagacacacgaatgaaactgaacaaattctcacttcttctgaccttattttgtatgtaacttacttcaatcattcatttacagataacgacaaagcctttatcgaacatatgaaagatatgaatcaattaaatgaaaatcaagcttttaaaatgataattaatgctgttgacctagctgaagataaacaggatatacaagctgttgaggattatgttgcagatgcactggggcaagttaacatacactctgaaatatatagtgtttcaagtcgtcaaagtttaaatgggaataacattggcataaatgaattaagagaaagtatacaatactttgcaaaggttgaatccagaacaattttagagcaacaaatgacttatcaattgcaacaaatgaatacgtcctttaaaaacatgattaaagattttcatgatgacaacgcaaaattgtcagcgagacaacataaattaaatcacta

SEQ ID NO: 4001 - DNA, 3030 bp, Artificial Sequence
  Description of Artificial Sequence: synthetic nucleic acid sequence
ctcgcttccaaatcgaacaggtgtaaaaccgtaacgtttgatttccatatcaacaagtgaattggttgaactcacatatatttttttatgatcatactgtctcttaatagcaagagcaatatatttaggatctccactaaaattcttgccatggaaagactctataaatattgaatcgtcgtctacaggtatttgatttaaatttttgatatagctcatatgcgttcttttttcatagtacgttttacatttattaaataaatatttattttttctaattaaattcatccaacgactctcttttaaacgacttgctatatctatttgtttttcactaccgagatgtcgatgaattttcttcacttttacatgttgagatgaagagaaagtttcaacattatttaaaaattcctgtccataattaatgcatttaaacgtacttttcaactgtcgataatctttttgtcgatcacagtgactatatttatagtttagaaagtctttaattattttactatctttaatcatatctttggttaaaaaacgtatcgcttcatatggtgcatagatatcctttaacacgttatcatcaccatagtaaactagagctttattaccctgtgcaatcgtttctaatatagaatagccgagcgtttcatatggcgaactagatacataaatataactctgtggttctttttcattaatatgaatataatcattaagatgatagtaatttatcaaatttttgtaaagcatttctgaaggaccatatcctattaaataaagttgagcatcatcaacaatttggtttttaatgatgtaattaaacaatttaataatatatgaaatatctttaacttcatcctcaaaacgtgctttaattaaaaaatttcgtttagtatttatcggctctgattttaaatcgatatgttgtgcatttacgtattgattaaaaacccgatgatagtcatatttagctataaattcatttttaattctagctgtactcactcgaacacaatcaatacagtctaatgctaaatctatattctcattaatatattccaatggaccatgtatttcaccaacaatcttaatcttgctatttaattttttaactagatatgcatgattaaaaaaggtttctctagtaattataagtaggtctccatgagcaagttcttttccactattaaattgatgaatatgaagatgctttgtgctcaaaccttcgtaaataattagttttgtgatatcacttttattatagtcctgataattaaagtagtgtacctcatgtccaatttctaataagcttttcactaagttaatattacttcttgatgttccgcccttggcgaagatattatatccaaatatgttaatcttcatttaatatctcacttcccaaatacattaaattatttcatctttaatatgtagaactcgcgaaagatattatacttaatatttggaattttatctactttgtatataattaaaataattttgaattttaaaaataaaaaagacacgacatggtcgcaatcgacctagtcgtgtcttcatataattatcattagtgaatcttaatattcaatgtttggagcttggtttacatgattttggtattttttgaaaccatagaacgctgcaccagctaatgctaaaataactgctaattttttcatcttaataacactcctttcaaagatgcggttcttgaacaaacaaaatgttcaatagttagttactattatacacgttttatagttgtttttaaaaacttgaatttcaaattatcgtaattttttccttattttctaaaattcattattaattttgaaactacatagatttattttacaacttaaattacgatttattcttatactatttcactacaaattatatatatatcgtaaattcataccgcataatcacttaaatgtagtcaacatagaaacactattttaagtcaaattgttactttcaccataaattaagaactataaaatataacataatcttaaaacatctcgtccttatcaagattttttaagtaagatattgttgttcatcatttattaaaaattttttatgaatacgtttgattgataccttcatataatgcattaataaatgcttccattgttggtgtccaattttctttattggtacgattttttgtactagtatctccatttttaaagaatgcttttcttaaagcagtcgttaattctaactgaacgccagtgttattgtcttctttattaatgaagtttttattattttgaccacctagatactctggtggaactttaactgtaaatccacgtcctacaagttgcttctctatagcatttcttaaatctgaacggggcccaccaagatagataatctcctcagtacctgatgcgccatgaatcgaaatagttgcagtacggtttttaatcatttgatttaatgtcggatcatcataatgtgtagacgtcacatgtaattcagagttatttttaggtcgaataccttcaaatgaataataatcataattacctttatctgctaatgctttagttaattctgttgtaccttgttcaatacttccgccatgtggagccacaatgagtacttgattccctgtgttttttgtatcttttctccaatctacaccttcagttgtttctttttctaactgagtcatcgattggtatttatctattttacgttctgtagatgctaaacttactaaagctttactgctatcagttttagaagtagttggcgttgaaagttgctttgctttagtagttgtactaacttgagtcgataaagtaggttgtgcctttgtcgtagaggattgaactgttttagattttgttgacgttgacggagattttgttttacttagttgtgtagtgtttttcttaactgaagttgtatgacttttagttgattgttgtgtctttgttgatattttagctttagaagttggcgacacagtagttgctttatgagaagttgtgc

SEQ ID NO: 4002 - DNA, 3305 bp, Artificial Sequence
  Description of Artificial Sequence: synthetic nucleic acid sequence
tagatattgtactaaaattcaacgctacaattatatctaatattaatgctaaatgcgaacaatattaaacataaccctagctcatttatattttatgattgaactataaactttgtttatagtttgttgtaagatccaactccataatcaaatcatttctttttcttctttcttagaatcctcatcatcgccatgacctttaaattgcatttcttctgcatcaggtgcatcaattttaacgatgacatctcctactactgccactgttccttcatctactaacacttcttcaacagtaccacttactggagaaggaatttctactacagatttatcattttgaacttctgctaatacatcatcttcttcaattgtatcgccggctttaataaaccatttaacaatttcaccttcgtggataccttccccgatatcgggtaatctaaattcaaatgccacgttcttgtcctcctaagatttacgtatttaaattattgaaaatttatacaaaagttgtaaggtaaggaaaaccttacaactaaatgtaaactttatttgattgatatttttacgtttgcttttttaataattagaattctaaagttgccttagcttgctctataatatcttttttatttggtaaccaaacgttttcagcttgagtaaatggataaattgtatctgatgcggctactcgagctattggagcttctaatgaaagaattgctcgctctgctaattctgctgccacttgtgcacccacaccagcttgacgttgtgcttcttgtacaactacagcacgtccagttttctcaactgatgctactaaagtatctatatcaattggttgtacagtacgtaagtcaataacttcaactgaataaccatctttttctaactcttcagcagcttttagtgattcttgtaccattgccccgtaagatattagagtaatatcattaccttcttttttaacattggcttttccaatgtcaattttgtattcttcttcaggaacctcttcacggaaagaacgatataatttcatatgttctagatatacaactggatcattactttgaatagaagaaattaataatcctttagcatcataaggacctgatggaataactactttcaaaccaggtgattgagctaagataccttctaaattatcagcatgcaactctggagtgtggacgccaccaccaaaaggtgtacgaattgtaacaggcgctggtttagttccacctgaacggaaacgagtacgagcaatttgaccagctacttcgtcaaatacttcataaacgaatcctaagaattgaatttccataacaggacggaagccagtcactgctaagcctagtgcaagcccaccaattccagactctgctaatggtgtatcaaatactcgatcttcgccaaattctttttgtaaaccttcagtaacacggaatacaccaccgttaacaccaacgtcttcaccgaaaactaaaacgtcttcgtctcttttgagttcacttttaagcgcatcgttaatcgcttgaaccattgtcatttgtgccatggcttacttcgactccttctctttgtaaatttcatattgttctgctaaattttgaggcatttcttcatacatgatatccattagagaagtaacagtttgtttttctgtattgtcagcctctttaatagctgcttttatttcagattttgcacgttcaaccacttcattttctttgtcttcattccaaagacctttagcttctaaatattttctgaaacgtactaatgggtcttttttctcccattcagcatcttcatctgaagttctataacgagtaggatcatcaccagccatagtatgtggtccataacgataagttaaagtttcgataacagtaggaccttctcctgctactgcacgttcacgtgcttctaatgttgcttgataaacagctaaagcatccataccatcaacttgaattccagggataccaactgaaatagccttttgtgctaatgtttctgcagctgtttgtttactacgtggtgtagagatggcatagttattgttttgaattacaaaaattgcaggtgctttgtatgcagatgcaaagttaattccttcatagaagtcaccttgtgatgaaccaccatcacctgtataagtaattgcgactgcatttttgccacgttttttaagtccaaacgctacaccggcagtttgaatatattgtgcaccgataataatttgagggctaagtgcattaactccctcagggaattggttacctttgaagtgtcctcttgagaataagaatgcgtctgtaagaggtaagccatgccaaataatctgaggcacatcacgataaccaggtaaaatgaagtcttcactttctaaagcatactgagatgctaattgtgaagcttcttgtcctgctgttggtgcatagaaacctaaacgtccttgtctatttaacgaaatagaacgttgatcaagaattctagtccataccattctttccattaattccactaattgttcgtctgttaaatcaggtactaagtcttcattaacgacatttccgtcttcatccaaaatttgaaccatttcaaatttcgattgagtctcatttaaaactttaactgcatcgaattgggcttgtaacttaggagccattcaattcaccatacctttcccatgtaaatagaaattcattttatcctccttaattgtatcacaaataaaaatctctgttaaacgatttcataaagttctgttccacataaaaataatacagttacatgacctgttgtattaaaaatcacgtaactgtattaacccattatttattttaattggtctacatcttgtttttctctttttactttctcaatggcttttgagtaagcattaaatttattattcatttctttatatgctttagaaagatctttcgattttccgtctacttccgattgtgttgcattatcttcattcaaataagaaaacagttctttttccttattaagtgcttttttgtaagcctttgcataagcatcatgtgatttatatttttctttaatagcactatcaagttgttcaacttcttttttctttgctttgttttctacatgttcaagatattgcttggcttgtttaaatgctttttcagaattatctagagccttctcttctttttcaaattctttttgtctttgttttacattttcaactatatcttcagctgcttttttacgtgtgctttgatctttatcatttacctttttaaataattttt

SEQ ID NO: 4003 - DNA, 3599 bp, Artificial Sequence
  Description of Artificial Sequence: synthetic nucleic acid sequence
tattcatacccttattattgaatcccatacgattgatgagtgcatcatcttctagtaaacgatacatgcgtggttttggattacctggttgaggcttaggtgttataccgccgagttcaattgcaccgaagccaatgttttcaagtgcttttggaacttcacaagatttatcaaaacctgcagctaacccgataggattatcaaaagaaataccgtgaatgtgttgcgttaatattggattgttataagtaaataacttattaacgataggtaaaatgggtgaacatttttgaacacacttcaacgcattgatggtcaaaccatgtgctcgttcaggatctaatttgaataataaaggcttaactaatttgtacatataaatgctcctatttcattatatttgaggcttactatccccagttaatatgtttgaaattcattcttttaatagactagcattttcatgtaaaatttcatagttaaatattagaaagttaaaaaattgacttaatttaataatataaagaatttaagattaatgttttcattataggtaatataataatgtagatataatataaagttaagagggtgagaaaatgaatgaacaatggatgagcgcattgccacttgacaatgtgaaagacatttctccagtaagtggcggagatgtaaatgaagcatttaaagtcactacagttgaagaagatattttttttctactcgttcaacgtcaacgatcagaagccttttatgccgcagaaattgcaggactaaatgaatttgaaaatgcaggtataacagctccaagagtaattgcaagtggagagataaatggagatgcatatttattattaagttttcttgaagaaggtagtcaagggagtcaaagagagcttgctcgattagttgctagaatgcatagccaataccaacaagataataaatttggattccgtttaccacatgaaggtgcagatatttcctttgataattcatggactgagacatggaaagagatttttataaatcgtagaatggatcacttacaagatgagttattacgtgtaggattgtggaaacaagaagataaaaaaatgtatgaacgtgtaagaaaagttattgttgatgaactttcaaatcatactagtaagccctctctgttacatggtgatttatggggaggtaactacatgttcttaacaaatggccaacctgctttatttgatcctgcaccactatatggagatagagaatttgacataggaatcactacagtatttggtggatttacacaagagttctatgatgaatataatcaacagttaccactagccaagggatcacaaaagcgtatagaattttatagattatatttacttatgatacatttacttaaatttggtggtatgtatgctgatagtgtacaacgctctatgaaaatcattttagaataaagaacatcgacctcactaaagatatcaacgggctttagtgaggtttttaaacataagattgattgaaaattttaaaaatagggtatatttaaatttgtaatacgatttttctgtgattaaaagaaatttattataaaaaaaggggtatgacgtacgacataattttcagtcagtgatttactctatgaaatggagaagaaaagattatggcagataaactgcaaagagaattaagcaatagacatatacaattaattgctattggcggggctattggaacaggtttatttcttggtgctggccaatctattcatttagcaggcccatctatcttactaacatacataatagtaggttttgttctctttatgttcatgagagctatgggagaattactgttatccaatttaggatttaaatcgtttggtgacattgctcatcatcatattggttctatggcaggttttatggtggggtggacatattggttaacatggattatttcaggaatggcagaagtgactgctgttgccaagtatgtttccttctggtatccaacaattccaaactggttaacagctgcagcgactattttagttttagttgctttaaatctattcagtgctaaattatttggagaattagaattttggctatctattattaaagttttgactattttagctttgatagccgttggtgttgttatgattgtatttggaatgaagacaagctatggccctgcaacggtaacgaatatatggaaagacggaggctttttccctaatggtgcacaaggtttcttcatgtcattccaaatggcaattttctcatttattggtattgagttgattggaataactgcaggggagactaaagatcctcacaaaacaattcctcaagcaattaataatgtaccgtttagaatattattattttatataggatcgttggcagttatcatgtctgttgtaccatggcaacaattgaatcctgctgacagtccatacgttaaaatgtttggattagttggaatcccttttgcagcaggtattattaactttgttgtacttacagctgcagcctcttcttgtaatagtggtatatttgctaatagccgtacgatgtttggattagctggaagaaagcaaggtccagcattcttacatagaaccaataagcacggcgtaccacattatgctattttagtgacatgtggcttattaagtatttcagtcgtgttaaatgcaatttttaaagatgcgactaaagtgtctgaagtctgcaactgttgttttaacaggtacatatgaacctttttgtccagtaaattgttctgcaacgtggaagttttgtgataagaagaattgaattctacgtgctcgttccacagtttgtttatcttcatctgataattcatccataccaagaatcgcaataatatcttgtaactctctatatttttgtaaagtagattgaacttcacgtgccacatcataatgctcttgacctactactgaaggttccaaagctctagatgtagaagcaagcgggtctacagctggataaatacccatttctgttaatttacgctctaagtttgttgttgaatctaagtgtgcgaacgttgttgctggcgcagggtcagtatagtcatcggctggtacgaaaacagcttgaattgatgtaactgaacctttatttgttgaacttatacgttcttgtaattgacccatttctgtagcaagtgtaggttgataaccaacagctgatggcatacgacctaataacgcagaaacttctgaaccagcttgagtgaatctgaaaatgttatcaatgaataataacacatcttggccttcttcatctcggaaatattcggccattgttaatccggataatgctacacgcatacgtgcaccaggtggctcattcatttgaccaaagaccattgcagttttcttgataacaccactgtcactcatttcatagtaaagatcattaccttcacgtgtacgttcaccaacaccagcgaatactgagataccaccgtgttcttgagcgatgttattaataagttcttggattagtacggttttacctacaccggcaccaccaaataatccaattttaccacctttt

SEQ ID NO: 4004 - DNA, 2857 bp, Artificial Sequence
  Description of Artificial Sequence: synthetic nucleic acid sequence
gttcttcgcgttgcttcgaattaaaccacatgctccaccgcttgtgcgggtccccgtcaattcctttgagtttcaaccttgcggtcgtactccccaggcggagtgcttaatgcgttagctgcagcactaaggggcggaaaccccctaacacttagcactcatcgtttacggcgtggactaccagggtatctaatcctgtttgatccccacgctttcgcacatcagcgtcagttacagaccagaaagtcgccttcgccactggtgttcctccatatctctgcgcatttcaccgctacacatggaattccactttcctcttctgcactcaagttttccagtttccaatgaccctccacggttgagccgtgggctttcacatcagacttaaaaaaccgcctacgcgcgctttacgcccaataattccggataacgcttgccacctacgtattaccgcggctgctggcacgtagttagccgtggctttctgattaggtaccgtcaagacgtgcatagttacttacacatttgttcttccctaataacagagttttacgatccgaagaccttcatcactcacgcggcgttgctccgtcaggctttcgcccattgcggaagattccctactgctgcctcccgtaggagtctggaccgtgtctcagttccagtgtggccgatcaccctctcaggtcggctacgcatcaattgtggtgcgttattatttttcatgattttaggtcaggtcaattatttttatggtattattatggcttctagcatgatgataggtgcgttgttaggtgctcaatttgctttgaaaaaaggggtaggatatgtaaaagctttatttttagtggttactgcaatattaattataaaaaatctctacgattttattgtgcagtaaataattgttagattaagaggttcaaatgaaattgtagacaaactttaagtgagtgtgtattgcttatcttgtcgagttaatgtttgcaaatttgtttggcctcttttattactatattacaaaagaacgatgtttttttggaaaggttttcatttttttgatagataatggctaaaaaattgaaaaccatacgttctttatcgtatcattataattaactaagttgataggaggtcgttacgatgactcaaattacatttaaaaataatcccattaaattatcaggttctgaagtgaatgaaggtgatatcgcaccaaatttcacagtgcttgataatagtttgaatcaaattactttagatgattataaaaacaaaaagaaattaattagtgttataccatctattgatacaggagtatgtgatagtcaaactcgaaagtttaatgaagaagcttcagcagaagatggtgtagttttaacgatatcagtagatttacctttcgcccaaaaaagatggtgtgcatcaagcggattagataatgtaattactttaagtgatcataaagatttatcttttggtcgaaattatggacttgtgatggatgaattacgcttacttgcacgttcggtatttgtgttaaacgaaaacaataaagtagtatataaggaaattgtcagcgaaggtacgaattaccctgattttgaagctgcattaaaagcttacagaaatatttagtcattttgaactattgacagtaaaaagtattagtgtccatacttgttcgagtagtaaattaattatttagagttaattcatactatcaatcacggatggacacttttttaaatagaaagggatattttatgtctgaagaaaatactattatggaacgtctatttcataaattagatgataaagctaaaacgttaaacaaagaaaatggacagagttttatcgaaaatttagggttagctatggaagatatttatacaaaccaaagagaacttttagaacaagcaacgcttcaagatagaaggaaagcttttcaatttgcatatttaagtttattacaagaagaaaatattcaagctaatcatcagatcacgcctgactctataggactcattctcggttttcttgttcaacgctttttagaacataaaaaggaaatgcacattgtagatattgcaagtggggcaggtcatctaagtgcagctgtgaaagaagtactttctgataaaacaattatgcatcatctgatagaggtagatccagtgctatcacgtgtaagtgtgcatttggctaattttttagagataccgtttgacgtttatcctcaagatgcgattatgccattaccattggaagaggctgatgtcgtgattggagatttcccaataggatactatcctttagatgaacgtagtagagaaatgaagttaggctttgaagagggacacagttattcccatcatctgttaatagaacaatctattaatgcgctaaaaggggcaggttatgcatttttagttgttcctagtcatctccttgaagatgataaagtgaaacagttggaaaatttcattgctacagagactgagatgcaagcatttttaaatttacctaaaacattatttaaaaatgaaaaagcacgtaaatctatattgattttacaaaagaaaaaatcaggcgaaactcgaccagttgaagtcttattagccaatatccctgattttaaaaatcctcaacaatttcaaggtttcatttctgaattgaatcagtggatagtcacaaatcatacaaaaaaatagtctgtaacaatatagtattcaaactgtgttaatgataaaatgattatgtgaaaaatataactaaacaaatgatggaggacaatgtcttatgtcaaaattaattttggcggtaaatgctggtagctcatctttaaagttcc

SEQ ID NO: 4005 - DNA, 3117 bp, Artificial Sequence
  Description of Artificial Sequence: synthetic nucleic acid sequence
catatcgtgttgcgtatgccaacgcctcttgctgtgcgccagtcattccctcagctttgggggtacgtctaacatctgcacccaatgctttcataattgaaattttttcttctgcaaatccttctggagcaaagatgatacattttactttgtgccgattagaagcaatagcaagtccaatgcctgtattaccagcagtcgcttcgactattgtatccccttctttaagtcgtccttcatctattgctttttcaattaagtacttccctagacggtctttgatgctaccaccaggattaaattgctcaagtttggcgtatattttaacattctcgtcactaaagctttctaataaaactaatggagtttgtcctatcaaatcgtatgcaatcattatttttggttcagatgacaacaatgagtatcactgaacttaacccactttctttatttatgttagcgctaattcttacttatcagatatgaattataacttatcggcattgtttttgcaatttctgaaaaacgtacaatcaatttgaaatttaaacattatttaaaataagtatttttataattgattacgtttatatgagaatacataccgaaagtgttatgataggggtaaataagctagcacatcgataaaagttatcgaattacatacactagaaatgataaggagctgctttaattatgacgaaacaagatttatctttatctgtatttaccaatgaaaattataagaatcttcgttacacatcatctagttttagaaattctatgtatgatgaattagaggttaataaaagtcgttttaaaaactgtaattttaatgaaggtatttttaagaatatagaagcaatttgtaattgtaaatttacaacgtgcgggtttaataattgtattttcgaagatgttcatttttacaaaaaccaatttaaagattcaacatttgtgaatacaccatttgatcaatccgtatttaatagtactttattccaaaatgcaatgttcgatagcaatctcattcgtagcgtaaaatggactgatatcatttttaaaaacgtttctttcaaaaatgtagaaattgaaggaacaacatttaaagatgtaaaattcaaaaattgtgagttcaaaaatgtaattattactaattcaactatgtcgcaaaagttaatgaatgaattacaaaaacaagatgttactttagaaaatatagacacttctatttaacattcattatcttccgcttaagaaaacaatttaagatcatagttaaacattcgctcgtttaatggtgttagatatttcgaatcaactacataacattctttatatagtaaaacggtcaactccactaaaaaatggaattgaccgtttgttttagttttatcaataacgtctcaatgacttaaaataattgaactataaatactaaaataataacaataggcatgatgaacttaattaaataataccacggtaaaaataggttgaatttgtctttcccaaagctttcttttaataattttttatctagtaattggccaaccactaatgttgttcctagtgcccctaatggcataagaatattagatacaataaaatccatattatcaaatatcgtaccagcgccaaaacgcaaatgacttagactactaaaagataatgttgctgggatactaatgataaatacaagtatactacctatgattgccactttttgtcttttactattatcatttttagtaaaattagatacatttaactctaataatgatatagaagacgttaatgccgcaaataagaataatagtaaaaatataaagtaaaagaatgtaccaaaagtcatttcgctaaatactagtggtaaaaccttaaataataagccagggccttcttggggttggtaaccaaatgttttaagcgcaggaaatatagctaatccagccaagacagaaattaaaatattcattacgacaattgaaagtgctgaagactttatcgtcatatttttaggtgcatagcttgcataagtaatcattccggttgtacctagggacagcgtaaaaaacgattgtcctatagtgaatgaagaccctgaacgtaaaatcattatcgtttcagctccaggcaaaaggcataatgacgacattaaaactactgatttattaattcgtctctatgaaaaagtacttaataaattaaattatgaaagtaaaaaacaagaaattatccaaagatatgctgatatagtagaagaattaggtataggaaatgacattttaataacaattaatgacactttagaggaatacattaaacatctttctgacaaacctaaccgtttatatgatgctttattatcttgtggcgaaaattttaatgctcaattaatagcccagtataataatagtcaaggtattcctactcgttatatttctcctaaagaagctggattaactgtaactgatttaccacagcaagctcaaattttagattccgcatataatgaaatatacaaattgcgtgattatgatgaaaagctaattattcctggttttttcggagtttcaaagcaaaattatatcgttacgtttccacgcggtggttctgacataactggtgctatcatagcacgtggcgtccgagcctcactttatgagaacttcactgatgtatcaggaatatataaagctaatccgaatatcataaataatcctgaactcatagaggaaataacttatagagaaatgcgagagctatcttatgcaggatttggagtttttcacgatgaagctctacaacctttatacaaagatcgaattcccgtagttatcaaaaatactaatcgtccaaatgataaagggacctacattttacatgaccgtgaaatcgattctaaaaatgtcattagtggaattagttgtgataaaggctttactgtgattaatattaaaaaatatttaatgaatagattagttggatttacacgaaagattcttggcgttttagaagaatttaatatatcatttgaccacatgccttctggtattgataacataagtattatcatgcgtacaaatcaaattcaaggtaaagaaagtcaagttc

SEQ ID NO: 4006 - DNA, 3245 bp, Artificial Sequence
  Description of Artificial Sequence: synthetic nucleic acid sequence
cagaagatggttcacttgctgcattattaggtgcttcacctggtgcttcgactgctgttgatatcatgtttgatgtcttgcaacgttgttacaaatcagagtttaagtcatgggaaccaaaaattaaagaaatggtcccatcatttggtttaaaattgtcagagcatgaagatatgtaccattcaataaacgaagaagtaaaaaaatacttgaatgtaaagtagtatttaaaaaaccaccattaaatgattaaaaataagttatcatttaatggtggttttatatgtggtgtatagtttatttaatgaaatgttttaaattcatcatattttgttatgaatccaattgatagtttaaagaatacttactaaataaatagttttacaataaattgtgttttatcatctgaagtgagagtaatgctaccatgatgaagatgaatgattgattgggtaatggctagacctagaccattactactagattcgtcactcagtttataaaaacgatcgaagatatgtttcgcatcttcttctgcaatcgatccatcattttcaatattaaatataatcaagtgatttgtactagttagagtgatattaatcatgctattttgaggagcataattcattgcattaatgatgaggttattgaaagcttgatgtaatagtctttcatttcctcggaaatacaaatcttctaattcagtaaacataactaaatctttttcatcagttcgaaattgttcatgtctaataatatccttttaggtggtttgagtaagtcccattctgcaacaggtattcgaatcggctttttacttggtcctgaatatttaattgaaaaattaacctttatgcacgcttacaattgtatttgtgcaaatgtaccagctcaaattgcttgtactaccgctttaaatgaagggataaatgtccctctatacatgaatcgtgaatatcatcattttatttcagaaggtaaagaagtcaacagactcattaatgatatgatttactttgttagagatacaattatgaataaaacgtctaacgaatccgttcattttgaatcacttattcatttcgacttagatatgttatacaggatgatagatatcatcaatgatacactagtatccattaggttcagtgtaaatcaaagtgttcattttgaagtgttgctagttaaacttgcagaaatgattaagacacagcctcaaactgtacaaaatgtagcaacagcatcggtagctaatgaaccagataatgagatgttattacaacgtttagaacaacttgaaaatgagcttaaaaccttaaaagaacaagggatcaaaactaataaagttagtcaacaacctaagaaaccaacacgtacgattcaacgatctaaaaatacgttttctatgcaacaaatagcgaaagtattagacaaagcaaacaaagatgatatcaaattgttgaagaaccattggcaagaagtgattgatcatgcaaaaagtaatgataaaaagtctttagtaagtttgctactgaattcagaaccagtagcagctagtgaagatcatgtgttagttaaatttgatgaagaaattcattgtgaaatagtaaataaagatgatgaaaagagaaacaatattgaaagtgtagtttgtaatatagttaataaaactgtcaaagtagttggagtgccggctgaccaatggctgagagtgagagcagagtacttacaaaatcgtaacaccaatgaaacacatcaaagcgaaaaacaaagcacacaacagtctcaacaaatagatattgctcaaaaagctaaagacttatttggtgaggaaactgtacacttagttgatgaagactgatacatgacaagcgatatcttggtatgtataatgtaataaaagctaaatttttatagaaattgtttactattaaggaggaaatgaaattatgcgcggtggcggaaatatgcaacaaatgatgaaacaaatgcagaaaatgcaaaagaaaatggctcaagaacaagagaaattaaaagaagaacgcgttgctggaacagcaggcggaggtatggtgactgttactgtaacaggtcataaagaagttgtggatgtagaaattaaagaagaagctgttgatccagaagatattgagatgcttcaagatttagtattggcggctacaaatgaagcgatgaataaagcagatgagttaacacaacaacgtttaggtaagcatactcaaggcttaaacatccctggaatgtgatgaaatatgcattatccagaacctatatcaaagcttatcgatagttttatgaaactgccaggcattggaccaaagacggctcaacgtctggcttttcatactttagatatgaaagaagacgatgttgttaagtttgctaaagcactagttgatgttaaaagagaacttacctattgtagtgtttgtgggcatattacagaaaatgatccttgttatatatgtgaagataaacagcgagatcgttctgtcatatgtgtagttgaagatgacaaggatgtcatagcaatggaaaaaatgcgtgaatataaaggtttatatcacgtgcttcatggttcgatttcaccaatggatggtattgggcctgaagacatcaatatacctgcattagttgaacgcctcaaaaacgatgaggtgaaagagcttatattagctatgaatcctaacctagaaggcgagtctactgcaatgtatatatctaggttggttaaaccaattgggattaaagtcacaagactggcacaaggtttatctgtaggcggcgatttagaatatgctgatactccttagaaaagatatatacatatactatcctatttttacaggtaataaacataacttgctcacaggtcgatttaaataaatgctattttctaaaatgcacttaatataatttgagatatcaaattatatttttcaaatttgattttgaaccaaaaagagcctgagacattaatgtcccagactctcttaacttataggtaagtcaatcactaaattaaaattgcgcttaaatcggtctttttgtactctattccaacatcctaaattcgattgattcataagattatttttcagacattacaagtttagggtttgttgtaaagaaacaacgtatttaacatgaattctgatacactcactatttcatatcactcaaatataaatgttgttaatttaaaaattgtgttaagaatt

SEQ ID NO: 4007 - DNA, 997 bp, Artificial Sequence
  Description of Artificial Sequence: synthetic nucleic acid sequence
tatgaggatttaaaaaacttaacaattaattggtttaacgtactcagtttaactgtaatcatatttattttaagtaacattgtcacaccacttattggtatacctgtgggtttactcggtggtgcatatatcctaaagagacgtgaagagaaaaataaataaccataatacaaaagccctcaacatagaggtcagtgtgacctccctattgagggcttccttacactataaatttatttatttgtaataccgtctgcttcttcgattctcatgatattatccataatacctagatagaattgacctaattctctacctgtatgtgttaaatcaaatgcatccatacctactaaatctaaatggtcccaatcatgttgaacgggtctcacttgccaaacacctttatcagtagctggtgtatgatcatcaacttttttaaaggcttgattagaaggatgttgtgatgatataactggaactacaccatcattcggtctaatttctttgtttgcatctttaccaataatacggctggttaagttcaacaaaagaatttcactagaattaggtaattcattaccaagaggtcctgtgtgagtcgctgaccctgtataagtagtgtagacaatattaggatttagacttgtttgttgattaattttttcagcaccttgcgttgtcagatcattaacagcttgatcttcagtattccaaatcttacttttggatacacgttccgcgtaatcaatgtagctttcatttggttgttgttttaatccccattgagaaaaacctaaatctatatctacatctttaccaccacttaatctaccaatacgattaatcgtttcttttacaagtttacgtgtgccaattttatctgcagcaggtgtaccattatgtggtgtgccaagtgtagtaattgaagcaaccatattatctttaccacctgtaaataaatcggatatagtacccccatgttgacgttgatattcta

SEQ ID NO: 4008 - DNA, 3561 bp, Artificial Sequence
  Description of Artificial Sequence: synthetic nucleic acid sequence
taccattcatttctgctggagaaaatggcccattacacttagaaattagtttaactcgttctaaatttgaggaattagctgattcattaatcaaaaaaactatggaaccgactcgtcaagcattaaaagatgctggtttatctacttcagaaatagatgaagttattttagttggtggttcaacacgtattccggccgttcaagaagctgttaaaaaagaaattgggaaagaaccacataaaggtgttaacccagatgaagttgtagcaatgggtgctgctattcaagctggtgtaatcacaggtgatgttaaagatgtagtattacttgatgttacgccattatctttaggtatcgaaattatgggtggacgtatgaacacattaattgaacgtaatactactattccaacttccaaatcacaagtttattctacagcagctgacaatcaaccagcagtagatattcatgtattacaaggtgaacgtccaatggcatctgacaacaaaactttaggaagattccaattaactgacattccacctgcaccacgtggtgtacctcaaatcgaagtaacatttgatatcgataaaaacggtattgttaacgttacagctaaagatttaggtactaataaagaacaaaacattacaatacaatcaagctcatctctatctgatgaagaaatcgatcgcatggtgaaagatgctgaagaaaatgctgaagcagataaaaaacgtcgtgaagaagtagacttgcgaaacgaagcagatagtctagtattccaagttgaaaaaacagttaaagacttaggcgaaaatattagcgatgaagataagaaaaatgctgaagagaaaaaagatgcacttaaaacagcattagaaggtgaagacatcgacgatattaaagctaaaaaagaagaacttgaaaaagtaattcaggaattatctgcaaaagtttatgaacaagctcaacaagcacaacaacaaggccaagaagaacaaggttctcaagatagcactgttgaagatgcagactttaaagaagttaaagatgacgaagataaaaaataagtttagtatctaacttataattatctattaatttttagtaaaaaaagtcaaagtcaatcgatcattgactttgactttttatttggatattaagaaacaattagataaactattcttgttaaacgtataaaaggagaggtaattatggccaaaagagactattatgaagtcttaggcgtaaacaaaagcgcttctaaagacgaaattaaaaaagcttatcgtaaattatcaaaaaaataccatccagatataaataaagaagaaggcgcagacgaaaaattcaaagaaatctccgaagcatatgaagttttaagtgatgaaaacaaacgtgcaaattatgatcaatttggtcatgacggaccacaaggcggatttggaagtcaaggctttggtggcagtgactttggtggatttgaagatattttcagctcattctttggtggcggttcacgtcaaagagatcctaatgcacctcgcaaaggtgatgaccttcaatacacaatgacaataacatttgaagaggctgtattcgggacaaaaaaagaaatatcaataaaaaaagatgtaacatgtcatacatgtaacggtgatggggctaaacctggtacaagtaaaaaaaattgtagctattgtaatggcgctggtcgtgtttctgttgaacaaaatactattttgggtagagtgagaactgaacaagtttgtcctaaatgtgaaggtagtggacaagaatttgaagaaccatgtccaacatgtaaaggaaaaggtactgaaaataaaacagttaaactagaagtaactgttcctgaaggtgtagataacgaacaacaagttcgtttagctggagaaggttcacctggtgttaacggaggaccacatggtgacctatatgtggtgttcagagttaaaccatccaatacatttgaacgtgatggagacgatatctactataatctagatattagcttttcacaggctgcactaggtgatgaaattaagatacctacattaaaaagtaatgttgttttaaccattccggcaggtacacaaacgggtaaacaattccgacttaaagataaaggtgtaaagaatgttcatggttatggctacggggacttatttgtcaacataaaagtggttacaccaacaaaattaaatgaccgtcaaaaagaattattaaaagaatttgctgaaattaatggtgaaaatataaatgaacagtcatctaatttcaaagatagagcgaaaagattctttaaaggagaatagtcaatgaattggatggaactctcaattgtagttaatcacgaagtagaatacgatgttacagaaattcttgaaagttatggctctaatggagttgtaattgaagattcaaatattttagaagaacaacctattgataagtttggagaaatttatgacttaaaccctgaagactatcctgaaaaaggagttcgattaaaagcttactttaatgagttcacttataatgaaaacttaaaatccaacatcaattatgaaatattaagtcttcagcaaattgataaaacaatttatgattaccaggaaaaacttattgccgaagtagattgggaaaatgaatggaagaattattttcatccatttagagcttcaaaacaatttacgatagtaccaagttgggaatcatatgttaaagaaaatgataacgaattgtgcattgaattagatccaggtatggcttttggaacaggtgatcatccaacgacaagtatgtgtttaaaagcaattgaaacttttgtaaaaccaactgattcagttatcgacgttggaacagggtcaggcattttaagtattgctagtcatttacttggagttcaaagaataagggggatttgaaacaaccatgacataagcgactactaaaatcattacgatacctagaatcatactaataacatccattattttctgaccacttctactaacaaagataagtatcgcaaaaatagctgttattgcagcaccccattttacatcaagaccaaacattgcatttaaacctaaacctgcaccagcaatattacctatgttaaatgcgagaccaccaaatgcaattagtatggagataatagtaccaagtccaggtaatactttattagatatttcttgtccacgtaatccagttaccactaatattctccaaatatttatttgagcgcctatatctataataatagaaattaatattgcaaatgcaaaactagcataaaattgtgcagtaaacactgcagtttgagtcagaaatgctggaccaatagctgatgtagccattaaaaaaactgaaccatataataatcgtctatgtttttttgtgaatttaaaattttgtcctttttgattgaaatcttgttttgtattttcccccatcttttgaccccctataaggattgaatatcaatgccttctttcattaattcatttctaatttgcgtaacaaattctaatg

SEQ ID NO: 4009 - DNA, 3062 bp, Artificial Sequence
  Description of Artificial Sequence: synthetic nucleic acid sequence
aataataaaacgccatacattgaattttctaaccataaagggactgcaactacagctgtcaatgactcactaagaatgattggaaatttaactttctcttctggagataaagctgtatctacatcagcaataaccatacgcttaccggttttcatcaccattccagcaagccctctaccctttctcaaaatgataagtttatatctatcatttgtgttacctgaaacatattgccatttaattggtgatgaagtgtgatgataatcatataaagcgataccaccaaaatcataaccctcttgtgctctcaacttatctaaattcatttgtaaatgttgattatgttttaaagattctggttccacactttcacctcataataaattaaattttgtttttgcgataaacaatatatcttctgttcatataagacagtggtacactccaaacatgtactaaacgagtaaatggccaacacgcaaacactgtaaaccctaataatatgtgcagtttaaacgaccaaggcacgtttaacattaagtcagcatttggagaaaacatgaataaatgtctaaaccatatcgcaatggtttgacgataatcaaattcaggttgaatcgcattggttacaagcgtagaataacaacccattattaaaataatcaacaaaacgatattcacaaatatatctgaaaatgaacttaatcgtctaacgtttttgatggatagtcgtcttaaagttagcaacaacattcctattaatgttattataccaaaaacactacctatataaactgcacctatatgatagatatgattatttactcctatcgcctctaaccaattagcgggaatcaataatcccacaacatgaccaaagaataccggaataatacctaaatgaaaaagtaaacttccccattttaatcgtttcttttcaatcatttcactcgactttgctgtccatgaaaattgatcatatttatatcttgcgatatgtccaataacaaatattgctaaacataaatatggataaataacccatacaaattgattaagcatgattttccacctctttcaaaggcacgatacacgcttttaacgtttttcttaatgcactgacaacatatgcatagggattattgttttcagctagggtatttgccatttcatacgtaccatcttcaataatcataatgacaagttgaaggttttcctgtgctcgactatcatttttaaaatcagcaacttgcaaaaactgtagcatcaatgggagaaaatcagataattcattatcaaccatttttagtccaaacatttcgtataaaacctttaatttagctagcatttgaccccgttccttttgcgtgtcaaatttattaaatgtcatatagagtgggtgttttttactaaaatcaaatgtatctgtatagatagctttaatttctgacaaagtataattcatcatgacttctctatatgcaagcaaatcttcgtagccggggtgagacttagaaatagtttcttcaaatatttttggatgaaatgtcattttttctggaaaattcatttgttgaccaagatagcctaagctatcttggtatagacttaattgttcaaggttaatcacggaagatccctccatagaaattttcattataaatttcttgtccagttttacctgattgaactgcaacaccacaaccttcacaattagagccaaagtactctccaccgtaaccttgacttccttgcgctttataagtatctaaatatgtttctttatgggaagaaggcacaacaaaacgatcttcatatttagcaatacctagtaagcgatacatttcagtcatctgtctttcagtaagtcctaatcgttctaatttagaagtatcgaaaggttggtttgttatttgagaacgcatataacttctcatcatcgccattttttgtaagccctctttaacaggttttgtgtcgccagcagttaataaatttgctaagtattgaataggtaaacgcatttcctcaatagctgggaaaatcatatctggattttgacctgcattttcaccttcgaaataactcataataggacttaaaggtggacaataccacaccatcggcatagttctaaattcaggatgcaatggaaaggccattttatattctattgccaatttatacactggtgagttttgagctgctgtaatccattcttgatttattccatctttttcagcttgtgcaatgacttcctcatcaaatggatcaaggaataggtctaattgtttttcgtataagtctttttcatctttagctgaagccgcttcttgaacgcgatctgcgtcatataataaaacacctaaatatctcatacgtcctgtacaagtttcggaacaaacagttggcataccagcttcgattcgtgggaaacaaaatgtacatttttcagctttattcgttttccagttaaaatatacttttttatacggacatccagtcatacagtatctccaacctcgacaggcttcttgatcgacgagtacgataccatcctcatctcgtttatacatagctcctgatggacaagatgctacgcaacttggatttaaacagtgttcacatagtcttggtaaatacatcataaatgtctcatcgaattggaatttaatatcttcttctattttctgaatatttggatcctctggtcctgtaatgtgacctccagctaaatcatcttcccagtttggcccccatttaagattcaatctatcacctgaaattaaagagtgagctgtcgccacgggagagtgctgtccttgtttagcattggttaagtgttcatagttatatgtccacggttcataataatcttgaatgagtggcatgtctggattatagaagattttacctaaagcaatttttgaccatctgttaccagattttaattcaagctttccttttttatttagcacccaaccacctttatattgtccttggtcttcccatctttttggatatcctacacccggttttgtttctacgttattaaaccacat

SEQ ID NO: 4010 - DNA, 3393 bp, Artificial Sequence
  Description of Artificial Sequence: synthetic nucleic acid sequence
atggttaattataataaactttatacaacttattcaatcttcgaaattttgttgatcacttagtaaggtgattctaaaatgaataaactttattttatattacaaattgccattttgctacatacttaattgatttattaactttatgatttatatatacttgtatttaatttactagataaaatttctatttttatatttgtgtctaattcgaaaaaattagaatagttattgttaagatgagtgataatgtctaatatgaaaaacggagcaaaatttttatatgaaaggaggggtgttggttttaaaaataatgtctaaacatagtgctacgttagttattatgtttttaataactttattgcctatttttcaatatcaagcttctgcacatgcgactttagaaaaatcaacaccacaacagcaaggggttattaaagacaaaccagaagcaatcaagttagagtttaatgaacctgtgaacaccaaatactcgagtgtgaccttatttgatgataaaggtaaaaagattaaagaccttaaaccaataacaactggatggtctcagacagttgtattttcatctgagcaaattgttaatggcacgaatactattgaatggcatacggtatctgcggatggacatgaagtcggagatacgtttgaattttcagttggaaaagtgaggctaaagatgtagatacatcttcacctttttatgaaaagtctaaattttggtttggattattaagatatgttactgaaggtgcaaactttctacttattggcttgttttggttaaatggtattgctaggaaacgaggattaagacaatttaatgtgttacccaaacaatcaggaattgcatggattatggctatgtcattactcgtgagtcttgtggtttatatgatgacactcacatctgatatattagaagatattctatcatttaaattagaagtgataatgcaatttccgtatatattaagctctatttcactaatcattttgtttatacttttcattttaaaagatatggaaaaaatatggtactggctcatttcaatagttatgattgctgtgataagtatgtctggacacgtgtggtcacaacaagtgccattatggtcaattatcataagaacaattcatcttatagggctaacgttatggttaggttcactcgtttatctcatttgttatgctattaaagtgaaaattaatcagttgacgagtgtaagacgtatgcttttaaaagttaatatcattgctgtgattatgctcgtttttacagggattttaatggctattgatgaaacgaatactttaacactttggaataatgtgagcgcttggtctatttatcttgtcataaaaatcgcaggaattattgctatgatgctattaggtttctatcaaacgatgcgtgctttgagacaacgacaacaggtccatcgttttgcactgatgactgaattgttaattggtatgatattaattttgcaggtatcatgatgagtcaaataaatatacctagttgaggagggaaatgacgttacgcaaattactgttgttaacttttatagtattttgggagatcggatttttttagtatgctgatgcacatgtcacacttaatcctaatgaaagtgaacctgaatcatatgataagtatgatgtaagggtgcctgttgagcaaaatgatcatacaatgaaagtagaattagatgtgccaaagggattaaacgttgagagtgttaaaactattgaaggttttaaacatcattttttaaagataaaaagggaacattactaaaataacatggactgctacagataaaggtattggtccccatgagtttattgaatttcctattgtagtggctaatcctaaaaaggaaggcacattcaaatggaacactactcaaacttatgataatggagatgttgttaagtggactgggaaggaagatagtgcgcaccctgcaccaactacaactgtaaaaaaaggtgcaaatccaaatgacactcattctgactcgagtcaaggtgattcaatcgctttatggatagttgctatcgtggcaattgtgatttcgttgattgctctttttaaacaagcgcatccaaaaaaatttaattgaatcgttttgaatatgaatagtattttctgatgtaaaggttctacgtctttagataataattcaatatacatttctattaatttacaaaaacaaataagagtgaggctaagaatttacctaaatttctggctagcgttttattttatagtcgtgattttgtcactttaataaaaatgaatatgttttataatataatcttaaggaggattttttatgcgtagattattatactcttttttattttatatggtcataggtttattaagtggcttttactacagagaattaactaaagcgcatgactttgtgggtgacacgcaattgtctttagtgcatacacatacacttatcttaggcatgtttatgtttttactcttattaccacttgaaaaagtatttaaattaagtagttattacttatttaattggttctttttcgtgtatcatttaggtgtgttaatcacgatttcaatgatgacagttaaaggtacattccaagttattggtaaaaaattttcacccgaaatgtttgcgggatttgcaggcataggtcatacaggtatgcttgcaggtttactgttactgtttttcttattaagacaggctattcttacagaacccaaaaaataaagtcgaaatactaaaaaatgtttggtagagtggatttagattttcaataactagacaggtgatagataatgactaagattcactttgaagcacctagtcccgaagattactgtaatttaagagctaatgctggaatgagtagtaaatcgattgaagcggcaataaaggggcttcctcatgcatgttttaatgtgaccctttatgagaatgatatgttgattggtatggggcgagtgattggggatggtggtacagttttccaaatcgtcgatattgctgtgaaagatatatatcaaggtttgggtcatggaatgacaattatgcatgaaataatgaagtatattgagagtgttgctgaagaaggtacatatgtgagcttgatagcagattatccggcagatcaattatacgagaagtttgggtttaaaagtactgagccttattcaaaaggtatgtatatcaaatattaaagtaaaaacgtcataaaatgcatttgcttttgcatccaatgacgttttttagttatttaaacattgaaatcaatgacaatacgtccagtattattatgattgatgacttgatcgatggcttttgggatttcatcgaatgaaataac

SEQ ID NO: 4011 - DNA, 3643 bp, Artificial Sequence
  Description of Artificial Sequence: synthetic nucleic acid sequence
cagttctttaatcattctcactctttagctgtaattggctcacgtaatgccacacaatatacaagtcaatctttaaactatctttttccttcatttagacaattaaatatggcgattgtttctggattagcgcgcggtgcagatagtgtagcacatcaaaccgcacttaaatacctattaccaactattggcgtacttggatttggccattgttatcattatcctaaagcaaccttaaatttaagaactaaagttgaaaggaatggcttagtgataagtgaatatccaccattttctcctataagtaagcataaatttcctgaaagaaacaggcttataagtggtctgtccagaggggtacttataactgaggctgaagaaagaagtggtagtcaaatcactatcgattgtgctttagagcaaaatagaaatgtttatgttctacctggttcaatgttcaacaaaatgactaaaggtaatttaagaaggataaatgaaggtgctcaagttgttatagatgaaagtagtatattatatgattatctattttagtaaatgatagatttactttctgaattaattatttatatcctttaatttagttaaagtttaatgaatcaaaaataataacaattcttacaaaattggaaattaaaaattaaaacgttgacaaatacaaaattaaccgtttatcatttatctttagtaattcaatttgcaagggggaataaactttggcagataatttagtcattgttgaatcgcctgcaaaagctaaaaccattgaaaaatatttaggcaaaagatataaagttattgcttcaatgggacatgttcgtgacttaccaagaagtcaaatgggtgtcgacactgaagataactatgaaccaaaatatattacaattcgtggcaaaggtcctgtagttaaagatttaaaaaaacatgcgaaaaaagcaaaaaaaatatttttagctagtgaccctgaccgtgaaggtgaagcgattgcttggcatttatcaaaaattttagaattagaagatagcaaagaaaatagagtagtatttaatgaaattacaaaagatgctgttaaagatagttttaagcatcctcgtggtattgaaatggatttagttgacgcgcaacaagcacgtcgtattttagatagactcgttggttataatatttctccagtattatggaagaaagttaaaaaagggctttctgctgggagagttcagtcagttgctttacgtttagtcattgatcgtgaaaatgaaattcgtaattttaaacctgaagagtattggtccattgaaggtgaatttagatacaagaaatctaaatttacagctaaatttctacactataaaaataaaccttataagctaaacaacaaagacgatgttcaaaggattactgaagcattaaatggtgatcaatttgaaatcacaaatgtgaatcgtaaagaaaaaacacgttatcctgctcatccatttactacatcaaccttacaacaagaagctgcacgtaaactaaattttaaagcacgcaagacaatgatgttagcacaacaattatacgaaggtattgacttaaagcgtcaaggtacagtaggtttaattacgtatatgcgtaccgattctactcgtatctcaacttctgcaaaatcagaagcgcagcaatatataaatgataaatatggtgaacagtacgtgtctcagcgtaaatcatcgggtaaacagggcgatcaagatgctcacgaagctattagacctactagtacaatgcgaactcctgatgacatgaaagcttttcttactagagatcaacaccgtctatacaaattaatttgggaaagatttgtagcaagtcagatggctccagctattttggatacagtagctttagatgtaactcaaaacgacattaaatttagagctaatggtcaaactattaaatttaaaggttttatgacactatatgtagaagcaaaagatgataaagagaatgataaagaaaataagcttcctcaactagataaaggagataaggtaactgcgacaaagattgaaccggcacaacactttacacaacctcctcctcgttatactgaggcgcgtttagttaaaacgcttgaggaacttaaaattggaagaccttcaacatatgctccaaccattgatacgattcaaaagcggaactacgtcaagttagaaagtaaacgcttcatcccaactgaattaggagaaattgtttatgagcaagttaaagaatacttcccagaaattattgatgtagaattcactgtaaacatggaaacattacttgataaaattgccgaaggtgacatgaattggcgtaaagtaataggagacttctacaacagttttaaacaagatgttgaacgcgcagaatctgaaatggaaaagattgagattaaagacgagccagctggtgaagattgtgaagtctgtggttctccaatggttattaaaatgggaagatatggtaagtttatggcatgttcgaactttccggactgtcgtaacaccaaagcaattgtcaaaacgattggtgtcacatgtccgaagtgtaatgaaggagatgtcgtagaacgtaaatcaaagaaaaatagaattttctatggttgttctagatatccagaatgtgattttatttcttgggataaacctgttggaagagattgtcctaagtgtcatcattaccttgtgaacaagaaaaaaggtaaaagtagtcaagttgtgtgctccaactgtgattatgaagaagaagttcaaaaatagatgagtgattttaggaggggcaaaatgacgcaaaaagtaaacgttgtaggagctggtttagctggctctgaagctgcatatcaattagctcaacgtggaattaaagtgaatttaattgagatgcgtccagttaaacagacaccggcgcaccatacagataaatttgctgaattggtatgttcaaattcattgagaggtaatgcacttacaaatgctgttggtgttcttaaagaggaaatgagacatttagactcgttaattatcacatcagcagataaagcacgtgtgccagcgggtggtgctttagcagtggatagacatgattttgctggctatattacagataccttaagaaaccaccctaacatcactgtattaaatgaagaagttaatcatataccagaaggttatacgattattgcaactggccctctaactactgagcatttagctcaagaaattgttgatattactggtaaagatcaattgtatttttacgatgctgccgcaccaataatagaaaaagattcaattaatatggataaagtatatttgaaatcacgttatgataaaggtgaagcagcgtatcttaattgtcctatgactgaagaagagtttaaccggttttatgatgcagtattagaagctgaagttgcaccagtcaatgagtttgaaaaagaaaaatattttgaagggtgtatgccttttgaagtcatggctgaaagagggcgaaaaactttgttatttggtccgatgaaacctgttggacttgaagatcctaagactgggaaacgcccttatgcagttgttcaattaagacaagatgatgcagctggaac

SEQ ID NO: 4012 - DNA, 2818 bp, Artificial Sequence
  Description of Artificial Sequence: synthetic nucleic acid sequence
agtatggcagggcgtggaactgatataaagttatcaaaagaggttcatgatatcggtggcttagcagtgattattaatgaacatatggataatagccgtgttgatcgtcaattaagaggacgctcaggtcgccaaggagatcctggatattcacagatttttgtatcacttgatgatgatttagtaaaacgttggagtaactctaacttggcagaaaataaaaacctccaaacgatggatgcatctaaactagaaagtagtgcactctttaaaaaacgtgtaaagtcaattgttaataaagcgcaacgtgtatctgaagagactgctatgaaaaatagagaaatggcaaatgaattcgaaaaaagtattagtgttcaacgagataaaatttatgctgaacgtaatcacatacttgaagcaagcgattttgatgattttaattttgaacagcttgcacgagatgtgtttacaaaagacgttaaaaatcttgacttaagtagtgaacgtgcacttgtgaattatatatacgaaaacttaagttttgtcttcgatgaagatgtatcaaatattaatatgcaaaatgatgaagaaatcatacaattcttaatacaacaatttactcaacaatttaacaatcgtttagaagttgctgctgattcatatttaaaacttgttattgaaaatcttaataaagttaaacacatcgttaaagaataaatgtacaattatcagactatatcaacattataatattgattaattaaataacaattgcaagtataatttaaatatttctctaatatacagtgtcaatttattttattcacataagaaaatagccatgaagaaatctatcaatttaaatttcttcatagctaatttttttcatttaaatttattgacggcttgaaaaatgagtcaaaatcatcaataacatcaaattgcaaatatattcctttggtaatggattgaccattaaacttaattcgaattctattcttttctatacaatgaaacgggtgtcatacatcatcggtaactaattatgatagatatgaacttgtggttctttatcgtctttagttttactaatgagagcacgtggagtatttccatctttgattctaatttcatactcatctagtttatcaaaatatttttcggcttgctctgtaacatattgtgtaatacctatcgtttctgcctgtccgtaataatctataggcaaatcaactgtaagttgtttagcttttttatttacgaatttaaccttaccaactgcttgtgtgaagtttgaaaaatacgattgcaaattatcattaaactgtttaaagttattattcaacgtttcatcataatcagctgcagttgacgaaggaattaaggctgctttttcattaatattatcccatgagttaattttagttttaccctcttcaaccgtagtaccaactataaattcacctggtgtaatggaatcttgacttgattgtttattatatcttaaactctttgttattgtttaaaaaatttttttagtgaaaatatttagtaatatcaatgttttaaaaatattgatataatataaaaaacattccgcgacttaataaaaatattgtttttttcaaaaataagttagtataatttttatattaataattcataaggagaattgatatgaaagtcaaaagtatttcacggttcttttcaatgaagaaagtgacgctaagtttcgttactttatttattggagtagggacaataggttcatacaatcagtttgctgatgcaagtacgaaaacgcaacaaacacatgtaactaagacatctccaactcaaaagacgacgtccaattttaaacgttcagttaaagatacgtctgttaaatctagagctacatcaacaaaaagagctacatcaaccaaacgagctatatcacccaaaacatcatcaactaaaaaaactacaatagcaaaaaaatctaccacagtaaataaaacgcgcacaacaaccaggactcagcctaccattcgtaagagttcaacaacttcaacacgttcaaaaacaatacctacttctgtgaaacgcacaacttctcataaagcaactactgtgtcgccaacttctaaagctaaaatatcaacaaagacacaacaatcaactaaaagtcatacaacttcagttaagaaaaacactacacaactaagtaaaacaaaatctccgtcaacgtcaacaaaatctaaaacagttcaatcctctacgacaaaggcacaacctactttatcgactcaagttagtacaactactaaagcaaagcaactttcaacgccaactacttctaaaactgatagcagtaaagctttagtaagtttagcatctacagaacgtaaaatagataaataccaatcgatgactcagttagaaaaagaaacaactgaaggtgtagattggagaaaagatacaaaaaacacagggaatcaagtactcattgtggctccacatggcggaagtattgaacaaggtacaacagaattaactaaagcattagcagataaaggtaattatgattattattcatttgaaggtattcgacctaaaaataactctgaattacatgtgacgtctacacattatgatgatccgacattaaatcaaatgattaaaaaccgtactgcaactatttcgattcatggcgcatcaggtactgaggagattatctatcttggtgggccccgttcagatttaagaaatgctatagagaagcaacttgtaggacgtggatttacagttaaagttccaccagagtatctaggtggtc

SEQ ID NO: 4013 - DNA, 3840 bp, Artificial Sequence
  Description of Artificial Sequence: synthetic nucleic acid sequence
aaacaagcaaatgcgacgacagttggcgtgggtattgtggttgaaaaaagtttccaaaatggtcgccaacgtttagaagatgcaggcttatatgtatcttcactttgtaaggtagcttcattaaaaggcaataaggtaactcttttaggtgaagcgtaatgaaaaatttcatattaagtgtgcaacatttgttagcgatgtatgcaggggctattcttgttcctattattgtggggacaagcttaaaattttcagctgaagaaattgcttatctagttactgttgatatatttatgtgcggggtagcgacatttcttcaagcaaataaagtcacagggactggattaccgattgtactaggatgtacgtttactgccgttgcacctatgatactcatcggtcaaacgaaaggacttgatgttttatatggttcgcttttaatatccggtatcttagttgttttaattgcaccttttttctcttatttagttaaattctttccacctgttgtaacaggaagtgttgtgacaattattggaatcaatttaatgccagttgcaatgaattacttggcaggtggtgaaggagcgaaaaactatggcgatactaagaatttaatattaggtggtgttacactactcattattcttattttgcaaagatttacaaagggcttcttgaaatcaattgcgatacttataggattagcaataggtactgctttagctggtatatttggaatggttgatatcaaacaagtgggtgatgcacattggtttggtttccctgtgccattcagattttctggcttcggatttgatgtcagctcaatacttgtatttttcattgttgcagttgtaagtttaattgaatctactggtgtctatcatgcactgagtgaaattactggtagaaaactagaaagaaaagattttcgaaaagggtacactgcggaaggtctagcaatcattttaggttcaatatttaatgcgttcccttacactgcatattcccaaaatgtaggtcttgtttctttatcaggagctaaaaagaacaatgtgatatatggaatggttattcttttactaatttgcggttgtatacctaaattaggtgctttagctaatattattccattgccggttttaggtggagcaatgatagcaatgtttggaatggttatggcatacggcgttagtattttgggtaacattaatttccaaaatcaaaataatttattaattattgcaatttcagtagggttaggtgctggtattagtgcagtacctcaagcatttaaaggattaggagaacaatttgcttggttaactcaaaatggtatagtgcttggcgcaatttctgcaatcatcttaaatttcttttttaatggtataaagtataaacaaactgaagaaaatgtgaaataatgtaactaagtataaataaaattggaggctgtttttaatgtgggaaaataaatttgctaaagaatctttaacattcgacgacgtgttactcattccagctgcatcagatgttttaccaagcgatgttgacttaagtgtcaaattatcagataagatcaagttaaacattcctgttatctcagcaggtatggatacagtaactgaatcaaaaatggcaattgctatggctcgacaaggcggtttaggtgttattcataagaatatgggcgtcgaagagcaagctgatgaggtacaaaaggttaaacgttcagaaaatggtgttatttctaacccgttcttcttaacaccggaagaaagtgtgtatgaggctgaagcattaatgggtaaataccgtatctctggtgtacccattgtcgataatcaagaggatcgcaagttgattgggattttaacaaatcgtgatttacgttttattgaagatttttcaattaaaatatcagatgtaatgacgaaagataatttaataacagctccagttggtacgactttagatgaagccgaggctattcttcaaaaacataagattgagaaacttccattagtagaaaatggtcgtttagaaggattaatcactattaaagatattgaaaaagtacttgaattcccatatgcagctaaagatgaacatggcagattgttagctgcggcagcaatcggtacgtctaaagatactgaaattcgtgcacaaaaactagttgaagctggcgtagatgcattaattattgatacagctcatggtcattctaaaggcgttattaatcaagttaaacacatcaaggaaacatatcctgaaattactgttgtcgctggtaacgtagcgactgcagaggcaacacgtgctttatttgaagcgggtgccgatgttgttaaagtaggtattggtccaggctcaatttgcacaacacgtgttgttgcaggtgtaggtgtgcctcaaattacagcagtttatgattgtgctacagaagcccgtaagcatggtaaggctattattgctgatggtggtattaagttctcaggtgatattatcaaagcattagctgctggtggtcatgcggttatgttaggtagtttgttagctggtacagaagaaagtcctggtgcaactgaagtattccaaggtagacaatataaagtttatcgcggcatgggatctttaggtgctatggaaaaaggttcaaatgatcgttacttccaagaagataaaacaccaagaaaatttgttcctgaaggtattgaaggtcgtacagcttataaaggaccattacaagatacaatttatcaacttatgggtggcgttagagctggcatgggttatactggttcagaaaacctaaaaaaattacgtgaagaagcacaatttacacgtatgggaccagctggcttagctgaaagtcatcctcataatgttcaaattacgaaagaatcaccaaactattctttctagtgttaaactttgggtgatgaattaatcatttgtaggaacgcgcttaatttttaaaacaacaatgcttaatgatacgttacaatacttaaagctatcatttagggcattgacaggcgcgtttctcttacttttacataaaatcaaacaataaaggagattcatgactatggaaatggcgaaagagcaagagctgattcttgttttagactttggtagccaatataaccagttaattacgcgtcgtatccgtgagatgggcgtttatagtgaattacatgatcacgaaatttctattgaagaaattaaacgaatgaatcctaaaggtatcattctttcaggtggtccaaattcagtgtatgaagaggggtcatttaccatcgaccctgaaatttacaatttaggtattccagttttaggtatatgttatggtatgcaattaacgactaagcttttaggtggtaaagttgagcgtgccaatgagcgtgaatatggcaaagctacaattaacgctaaatcagatgaacttttctttggcttaccttctgaacaaacagtatggatgagtcattctgataaagtaattgaaattcctgaaggatttgaagtgattgcagatagtccaagtactaattatgcagctattgaagataaaaaacgtcgcatttacggtgtacaattccatccagaagtacgtcacactgaatatgggaacgacttactaagaaacttcgtccgccgtgtttgtaattgtacaggtgaatggacgatggagaatttcattgaaattgaaattgagaaaatccgtcaacaagtaggtaatcgtaaagtattatgtgcaatgagtggtggagtagattcatccgtagttgctgtacttttacataaggcaatcggcgaccaattaacatg

SEQ ID NO: 4014 - DNA, 3986 bp, Artificial Sequence
  Description of Artificial Sequence: synthetic nucleic acid sequence
tcgccccctataaaaaagccaatcaatcctttgagaaaacaaaaaatacctattaaaagaatgaagttatgacttatatatttaaaaatgtttttaaatgtttcatttgggagttcccttatctcttttttagcatgtgctttaggatcatggttgaaaaactccatcgcaagcattccagtatcacctgcacgaattaagtgtttcaaagtacggtttaacattaattctgaatcgtgagggttaactcgtaagtcagcacgcacatatgtcatgtaattttcaaatatttcacgatcggtattgttcagtcgcaaagctttgacattattctcctttgttaattgcgcagtggatttcataataaaatactcccttaaattttaaattcataaataaatactactttaaaaaggataactaagttaaagtatcatttaaaaacatgatgattagtatgataaacacaatcatatcataattatcacatgtatatcattactcttatacaagttcaaaagggctattagacaaaattataggaattgtaaatcttttttctatttcacacaaacgtcgtttaattttgataaaatagcgcgaatgatatcataactaaaaagataactttaataaaagtaaaacttttataaataaagagtaaataatttaccattaaatatatatgttactttgtgaaattaaatgtaatgaaatgatattttatgttaaaaaatgattaaatcaaaaaaccatgttaaaataaagagtatcgataagtaactacaaaggagtctatcatgagaaaatggttaaccttactattaattacaacattggtgttaactgcatgtggtaaaagtaacgaaaaagcttctttagaaaaaagcattgatcagttgaaaaaagaaaataaggatttaaaaaaacagaagaaaaagttacaagagcaaaaggataagcttaaacacaaacaggatagtctccaagaagatgtaaatgacttgcctgctaaaagcacatcccgagataagaaaaataaagataatcatgatgcaaaagaaaagtcttcagataatcaatcgacatctgctaatcatgatgatcaaactaacaaaataaaaagcaatcaagatgaacatgacagtcaatcctctaaaccacatacacagcagaagccctcacagaatgatagaaaaaataatcatcgacaagaacgataggtagttattcctaacgtttaaatacgaaacgggaagggtattatatgttgcgaataggtattagtgagtttaacaaacatttagattggaagatagcgaatagttgatagctttaagaggagagaagaacgatgcatgaacaagattttaatattctagaaggtaaaaagatgacattagtagaattaggtcgtgagttagagaatctaactggtcgtactattaaagatacaacaagtgatattaaacgagtcattgcacatttgcctaactttgaatcagatacagatacatttgtagcaacataccaccttaatcatcaaaatgattttattgatgcaacatttgttgcacctaaaaatcaaagtgatcgtttgaaagaaataccggtacacattaagttgattagttatatttctaaaaactaataaatataaaaaagaatatatgtttaaataacgcgatatgagtagagttaaaaacttcataacgcgttaattttatattaaaatataggcaaaataagcattttcgattaaatggagtgtttaagatggttatttatattgaaactgaacgtttaaacttaagagattgggaaaccaaagatttattaccttttcaaaaaatgaatgctaatgcccaagtacgtagatacttccctagtttacttagttatcgtcgttctgagatagacatggaaaatatggatagcataatacaagagagtggcctaggtttatttgctgtagagttgaaagagacgggagaatggttagggtttataggtgtgaattacgtttcaaaagatagccattacccttttaaagagttaccgttttatgaaataggttggaggctaattccagaagtatggggaaatggtctagctacagaaggggcagaagccgtaatgaaatatgctagagataaaggaattaaagaattatatagttttacttctgaaaataatttgccttctagaaaagtcatggaaaaattaggaatgacttttttagacaattttgaatatccgaatcttagtaaataccatccccttaaacgtcatgtaagatattataaagagctacttccttcttgaaaggaaagttagtagttcttgtacaaatgaaattgtgattcataaaagcaccttcacggatggggatttgtagtttttgtataattggaaatgataatccatataataaaaaacttgaaaataataagtcaataatataaactacaaagttattaaataataaatgattatgtttatttgatacttaattttaagatagattttaataaacatgaaagagtttaatagttttattgaaaaatacccacaaatgtttctttagatgaaatcatttgtgggttctctaccttttactttattaatcgtatgtacgtacaccaagtggtttgtaatgtttaagtccttcgatgagtgattctttagtatcatataaaggtgcaagcttttgatatttctcatcaataaatccttctttaatcatatggtcgattaagtgttgtagtggctcaaagaatccatttaaattaaatacacctataggcttttggtgtataccaatttgagcccaactatacatttcaaaaaattcttctaatgaaccagcaccgcctggagccataataaaagcatcggcaagttcagtcattttattttttcgttcatgcatagaatctactaatataagctcacttactttttggcttgttatttctcgttcatctaacattttaggcatgacaccgatagctttaccgccatgctcaagtatgccatcttgaatagctcccataatgccgactgatcctgctccgaatacaagctcgtatccttgttcagccatatattttcctaattcgtatgcctctttaacataagatgggtttttccctttacttgcaccacaataaacagcaattcttttcataatatgcctcctatatttgattaatgatttttctaaaagcatgctcgaatttaagtctatcctctgttgtgaagggaggagggcctttgtgacgaccacctcgtcttcttatttgagcatttagatatctttgatttaataagctttggatgttgtttgagtgataaatatttcctttatgatgcatgacagtatgtactttgtctatcagtagactagcaagtccataatcttgtgtgatgacgatatcattattgctagcaagttcgactattttatagtctaccgcatcgggaccgtcatcaacgtatacaatttttacatgttcgggttgtatttgttgtgaaaaatggctaaaacttcttaaaattgtaacaaaaatgcctgtccctttcgtcaattcaatgacagaattaacaacaggacaagcatctccatctataattacgttagtcttcatggttaagaatgatttgattccttatgttgttttacgacactgtcagccacgtaattttcatattttttaaattctttttttctagctttctctgcttcttcacgctgtttttgttcttctttatgacgtttttcaatattcttttgaagctttttatctaattttttaatatctttacgattatctttttctagtttttcgccttttttctcaatttcgtgatctattttaccaggagttaagccaacttgctcttcgtatttttgagtttttttcatgtctttaatacgttgtttctgattagcttcacgttgtttttgttcttctttatgacgt

SEQ ID NO: 4015 - DNA, 3926 bp, Artificial Sequence
  Description of Artificial Sequence: synthetic nucleic acid sequence
gttgaggtagcaccagaaagttagtggtagatgagaactaacaccgtctttagtgaaattgggttttgtggaacaacttaacataaattgaacaagtgagctatgaatatattatattctgctaataaaggtggtaccgcgcgtcagcgtccttataacgaaggaggctgatttttttcggaaaaggaggaaatcaatggatattgtatacaaaaaggtgaatgctcaaattacgccagaagctttagcaaaattaaaacaaaaaaagatcatttttgaaagtacaaatcaacagaaacttaaaggtaggtactcgatagtagtattcgatcattatggcaaaattacattagataattctcaacttttaattaagttagacaatcattgtgaaatagttaagaatcaaccgtatcaacgacttaaggaatttgtagataaatattattttgaaatcaaagataaatatttaaaagatttaccttttatttcgggctttatagggacatgtagctttgatttagtacgacatgaatttaaaaaattacaagatattaaattagaagatcatcaaactcatgatgtccaattttatctagtggaagatgtatttgtttttgatcattataaagatgaattatatattatcgcaagtaacttattttcttatagaacaaaagagagattaaaggaatctattgaacgtaaaattgaagatttaaaaaacatacatttttcggttgaggatataaattataaatccatccctcgacatataaccaccaatatatcagagcaacaatttgttcaaactattagaattttaaaaaagaaaattactgaaggagatatgtttcaagtagttccttcaagaatttatagttataaacaccattttcaacacaatttacatcaattaacttttcagttatatcaaaatttaaagcgacaaaatcctagtccatatatgtattatattaataaagatgtaccgattgtaataggaagttctcctgaaagttttgtaaaggtaaaagatggaaaagtttatacgaatcctatagctggaacaattaaaagaggtcaaaataaaaaagaagatgaaaataatgaaaagacattaatgaaagatgaaaaggaattgagtgaacatcgtatgctcgtagatttaggaagaaatgatattcatcgaataagtaaaacaggcacttcacaaattaccaaactaatgacaatagaacgttatgaacatgtcatgcatatcgttagtgaagttattggagaattaaaaccccatctatctcctatgagcgtcatcgcaagtttgctaccaacgggtactgtctcaggtgcacctaaacttagagctatacagagaatatacgaatcttatccttataaaagaggtatctatagcggtggtgttgggtatatcaactgtaatcatcatttagattttgcattggctatacgtaccatgattatcgatgaggaaaaagtcagtgtcgaggcaggatgtggagtagtatatgattctattccagagaaagaacttgaagaaacaaaacttaaagctaaaagtttattggaggtaactccatgatattaataatagataactatgattcttttacctacaatcttgtagatattgtagaaaaacaatgtgaaacgattgttaaatatcccgatgatacagatatatgtaatctgaaaggtattacagcagttattatttcaccaggacctggacatccattcacgagcaccgtcgatgatatcaccatttccagttggtattaatgtgatttcatcaacatcgagcacttcttctaatgtttgtttaagatgactagaatgttggattttgatatcttcagctttatcatcatattcgataataaagatattcatgtttccttctgatttaagaattgctgaatgtgtagtgaatttgtcgtaatcaatcattgtacaaacagtatctaagtgcataaatgttcgactagttggaatctcaatcgccaccacctttttaaaagtagataacggatctttaaaaatacgtcgtgctaaacgttcaattgcttgtgcagaagtacgttcagatatccctattgcaagtacatctttagataacaccagttcgtctccaccttcgatgttgaacggacagtcacgatccacccataaaggaatattctcatctttaaatctaggatgatgttttaaaatatatgaaatgaaaatcgattctctgcgtctcgctctccaaaacatacgatttactgtcatacctctaccaattgaagcttgaggatcacgtgtgaaatatagattaggcattgggtcaagataaaacggatatttatcatccatgtactctacaagatgtgtcgattcaagttgtatttcttctttgcgtacgccagccataatcttattaattaatgcttgatttgacaaagttgaaaagagtttttttatttctttttcatgacctaggatagtttttctagattctgctaaaacgtcatctataaattgctctctgacatttgaatcttctatactttgtgctgctaatttttctaaataaagcacttctattccttcatcttgaagaacttgagcaaaatgatcatgctcttgttgagctacctttaaaaatggaatatcatcaaacaataatccatctaagtaatcaggcactaagttttctaattccttccctggtcttttaagtaataccgtctttaatttgccgatttcactgttaacttgaataggtccatttgtcatactcatttcctccttttcttcgctacattatcagtataaaactgatcaataacttagttcgtgatgattatcacatgctaaatgtaaaaagtttcgcaacatttggttattcaatacataattgtgtttgaatatacattactattgcatactttcgttgaaaaaatgaatatttgagtaatatgaacctttacatctttatgaataaaagttttttattcataaatttgaatacttagtcaaataacaacactcatatttattgaattaaaaaaacacctgataaacgatgtatacgcttaccaggttatatttataatggacaactttataaatttttatgaataattatgattaaatattttgtaatagacatattcagctatagactgggaatgtgtaagaatcataattgtatcattaccacttatcgttcctataatctctttcagttgtaactgatcaatataataatttatgctttgtgcaaatcctggtgtcgtctttattagtatatacgattctttaatcatagtgttaataatttctgtttctatataatcatttagtcttactcttgagtctaattgagattgttgcgtaagtaatttgtattcatattgatttgccttcacaggcaggcgataaatatgaagttctcttaaatctctcgcaatagtagtcatgctataacgtacaccaaagtgatcatcaatgtaatcaataatatctgcttttttataaatgtgattttgcttaacaatcatagttactaaatcttgtcgtttactctttttcattgaatgatcaactcctatagataactaatttattttaatttataaattaaaatttctttttatttaattatactttatcattttattgttgataattataagaatttttatgtcgtttgtgacaaagtacgtaaacatacattcaaatttaaaattaatttgtttatttaactatcattttatctatatttccccttttattcttattaggttttttatactcattactatgcagtcacacttacgctagacaaaccgtagtcttacctcaaggtaaagtaagcggctttgtattagtttaaaaattcctgaagattttagttc

SEQ ID NO: 4016 - DNA, 3302 bp, Artificial Sequence
  Description of Artificial Sequence: synthetic nucleic acid sequence
ttattcttattattctaatcggaataaaaatattttatcccattattacataatagtcaataaagagttacttgctaacaagtgttcagaaagttcaaactctattaactattattttaaactatttacaaatcgtaataattactatttacaaataacttaatttctttcataatagtgttatacaaggaggaagataaaatgaaacagaatttacaaacagcaagacgcaacctcaatagtcctaacatcaaaacacgaaaacgtgctttaaaaataataaaacagcatcaacgttcgaaataaatgtaacattcgtcaattattttaatttaattcgctcaataacttaggtttcataaatttatctataatttaattgttttaaatatcacttcacgcaaaaaacaagccattcaatgaaatcaatactgaccattgaatggtttatttattatgatatgaaaatgttttaaactatatacatcttgttataaataatatttatccttaacaactaaatcatctgtgagttcatatactagcggtgcacccgttttaatttcatatccgacgatatcttcttctgataaaccttccaaatacttaattaatgcgcgaatggaatttccgtgggccgaaacaagtacagttttatcatctaataggtgttgtgaaatatgatcagtccagaacggaacaactcgttctaatgtatctttcaaactttcacaataaggcatcatacggtgatcaatatgttgataacgacgattttttaaatatgcttctcgttgttcttcactttctctaggcggacgtacatcatatgagcgtctccattgatgcacctgatcttccccccatttttttctcgcatcatctttatttaaaccttgtaaaccaccataatgtcgttcatttaaacgccaacttttataaacaggatcgtaacaactgctaacactgacgaggaagctcgtgaattgttaacaaacttcggtatgccatttcgtaaataatctctaaaaggaggctaataaagtggctaaaacttcaatggttgctaagcaacaaaaaaaacaaaaattcgctgtacgtgaatatactcgttgtgaacgctgtggtcgtccacattctgtgtatcgtaaatttaaattatgccgtatttgtttccgtgaattagcttacaaaggtcagattcctggcgtacgtaaagctagctggtaataataagagtctgaaaggaggcaacaatcaatgacaatgacagatccaatcgcagatatgcttactcgtgtaagaaacgctaacatggttcgccacgagaaattagaattacctgcgtctaatattaaaaaagaaattgctgaaatcttaaagagtgaaggtttcattaaaaatgttgaataagtagaagacgataaacaaggtgttattcgtttattcttgaaatatggtcaaaacaatgaacgtgttatcacaggtttaaaacgtatttctaaaccaggtttacgtgtttacgctaaagcaaatgaagtgccaaaagtattaaatggcttaggtattgcattagtttcaacttctgaaggtgttatcactgataaagaagcaagaaaacgtaatgttggtggagaaattatcgcatacgtttggtaataaataataaggaggtgccataacatgagtcgtgttggtaagaaaattattgacattcctagtgacgtaacagtaacttttgacggaagtcatgtcactgtaaaaggtccaaaaggtgaattagaaagaactttaaatgaaagaatgacatttaaacaagaagaaaacactgttgaagttgtaagaccatctgattctaaagaagacagaacagatcatggtacaactcgtgctttattaaataatatggtactaggtgtttctcaaggttacgaaaaaacacttgagcttgttggtgtaggttaccgtgcacaaatgcaaggtaaagatttagtacttaatgttggatactctcacccagttgaaattaaagcagaagaaggcattactttcgctgttgagaaaaatacaactgttaaagtatctggtgtttctaaagaacaagttggtgcgattgcttctaacattcgttctgtaagacctccagaaccttataaaggtaaaggtattcgctaccaaggtgaatatgtacgccgtaaagaaggtaaaactggtaaataatagataacactctaaagaaaggagtattgaaatgatcagtaaaattgataaaaacaaagtacgtttgaaaagacatgctcgtgttcgtactaaattatcaggtacagctgaaaagccacgtttaaatgtgtatcgttcaaacaaacacatctatgcacaaattattgatgacgttaaaggcgtaacacttgctcaagcatcatcacaagataaagatattgcaaacacatcagcttcaaaagttgacttagcaactactgttggtcaagaaattgctaaaaaagctaacgataaaggtattaaagaaatcgtcttcgatcgcggaggatatttataccacggacgtgttaaagctttagctgatgctgcaagagaaaatggattagaattttaattaaaggagggacacattcatggctcgtagagaagaagaaactaaagaatttgaagaacgcgttgttacgattaaccgtgttgctaaagttgtaaaaggtggtcgtcgtttccgtttcactgcattagtggttgttggagataaaaatggtcgtgtaggtttcggtactggtaaagcgcaagaggtaccagaagctatcaaaaaagctgttgaagcagctaaaaaagatttagtagttgttccacgtgtagaaggtacgactcctcatactataactggtcaatatgggtcaggtagcgtatttatgaaaccagctgcacctggtacaggagttatcgctggtggaccagttcgtgccgtattagagttagcaggaattactgatatcttaagtaaatctttaggatcaaataatcctattaatatggttcgtgcgactatcaacggtttacaaaacttaaaaaatgcagaagatgttgctaaattacgtggcaaatctgtagaagaattatacaattaaggagggaaaataagttatggctaaattacaaattaccctcactcgtagtgttattggtcgtcctgaaacacaacgtaaaactgttgaagctttaggtcttaaaaagactaatagttcagtagttgttgaagataaccctgcaattcgtgggcaaatcaacaaagttaa

SEQ ID NO: 4017 - DNA, 3298 bp, Artificial Sequence
  Description of Artificial Sequence: synthetic nucleic acid sequence
atgacagtagcgtcgtttatatgagaatgataggtacttatcaaagtgataaaaactttgaaatgatgaagacttttaagcattggattcagactaatcattattggaaatatgttgagaaatacggtgtgttaggtatagcattagataatcctctccacgttcaaagtaatcaatgtagatatgacgttgttttgagaatagatgaaacagtaaatgatcagacaatatctaaaagagattttacaggtggcatatatgctgtgtttaaagttagtcatacaaaaataaatatagagaagttctttagcaatttagaaaatattttaaatgaaagtcatttgcgtatgagaaatgaaccaattatagagagatacattgaagaagagggaacagataaagtgtgtgaaatgttagtgcctatctatgaagtaaattaaaaaacatagacaatttcgataattttagtattcatactaaaaacctttatagcaacaaaacacattttatttataataaagaaaatataagtttaataaaaaaactcccacctgtctggcgagagtttaatgattggtaactttcattacctagtaaaatctggaacatcttacaatatttcaattttatacgtaatgatgataaacaaactgaagataagttgatatacaatcatttctataatattgaaatagactaacgtatttcatacgtgcgttttattaaattcctttgccaataccgaatccgaagtataggattgctataaaaataactaagacaattctataaatagcaaaaggtactaacttaactttattaattaagtgtaagaatgttttaattgcaattaatccaacaataaatgccgctaaaaatcctaaaatgtagaatggtatgtgtgctaaatgaatatactcataatgttttagtaaagataatccacttgcagctaacataattggtaccgacataataaaagtgaaatcagatgcagctttatgattcaatttcataagaacacctgttgaaatcgttgaaccggatctactaaatccaggccacatagctattgcttgagagataccaatgacaaatgcttggaaataattaatttgatctactgtttgaggatgctgaacagttttagaatacttatcagctataatcatataaatggcacctataaataaaccaattaagactgttggtacactaaataagtatttttcaattaaatcatcaaataaaaatcctaaaatccctgctgggaccatacctactaatacatgtattaaattcagacgtcgtggttttgaacgtctgtctcccgaagtggaaggttcaggtttatgttggccaatatgtaaaatttctaagaagcgttctctaaatacccaggcggccgcaaatactgaacctaactgtataacaactttaaatgtgaatgctgattgagaaccgagaaaattagttgactttaaccacatatcatcgacaagtatcatgtgcccagtagatgaaacaggggcgaattcggtaagtccttctacgatacctaagatgatgccttttattaattcaagtaaaaacatactttacccactttcttatctctattaatttattactagtactcaaaataccatattatcatagcatagaaaatcatattgatggtgtttacaatctaaatactagaccaaagtcttataaatgtattaagttgtgactagaattattctgtgagcgaattgattttaattttttgtaaacactctataatatatgtaggtgatattattgtgaaaaaactaacaaaaatggttttaagttataaattataccccacactcatgttaatcatgagcgtttttttatcttttacggtcgttgcgcaaaacatttcaatttcacactttttaaatcacttactgtattatcaacaacaatctttattattattgttatcagttatttttatctctcttattttaagagcaacatttaatatgctgattcaatttttaggagatcatttggcatttaaagtaaaacatatgcttagagaacaagtgattttgaaaaaaagtgtccgttcaattggtgaagaaataaatattttaactgaaagtattgatggtatcggtccgttctttcagagttatttacctcaagtctttaaatcaatgttgattcccatcgttattattattaccatgtgttttgttcatttacctactgctattattatgatagttaccgcaccttttattccattgttttatgttatttttggacttaaaacaagagatgagtcaaaggatcaaatgacatatttaaaccagtttagtcaacgttttttaaatacagctaaaggtcttattacatttaaacttttaaatcaaacgaaacaatctgagcaacaactttataaagacagtacacgttttagagatttaacaatgcgtattttgaaaagtgcctttttatcaggacttatgcttgagttcataagtatgttagggattggattggtcgcattggaagcggctttaagcttagttgtatttaaccatatcaactttgtgactgcagcgatagcgattattttagctcctgaattttataatgcgattaaagatttaggtcaagcatttcatacaggtaagcaaagtgaaggtgctagcgatgtggtgttttcatttttagaatctgaagataaagctgattctcctacattaaaagtggatgagcaacagtttgaacaagttttaattaagcatgttgattttcaatacgctaatagtaatcatatggctttgaaaaacatttctttttcggtaaataaaggagaaaaggtcgctattgtgggaccgagtggtgcagggaaatccactttagctaagttgcttagtcaatcagtaacacccacacatggaacactttcatttaaccaagcatcattaaatatcggatttctaagtcagcgcccacatatatttgcagattctatcaaaaataatattgcaatgtatgatgatgagatatgtgatgagcaagtgattcaagtgcttgatgaagtggggttaaaagagaaagtactttcattaaaatatggtatctatacttctattggtgaaggtggggaaatgttatcaggtggacaaatgagacgtattgagttaagtcgtttattattattgaaaccagatattgtaatttttgatgaaccagcgataggattagatattgaaactgaaaaggtcatacaacaagtattagagcatcatttttc

SEQ ID NO: 4018 - DNA, 3350 bp, Artificial Sequence
  Description of Artificial Sequence: synthetic nucleic acid sequence
aatggattcattaaaggtgacgcaattaaaaaactcattgcagggccaaatggaactttagaatttaataaacctgcaagtataggaattgtagaacaagaacaaaatggtgtcatcgcaccaaaagccattcccaaaatataattaatagcttgattaggtttacttaaaaagtgttttattttttcttctgaaactatctgctggattatacttacaataaagctcacgatgatgaatagtattaataattcaaaaaacaacatcacaaatgtttttataaattccataattgaatctaacattagtataatgcctccaaatttaattaatcaatatttcttgatgtattaatcaaaaaaaattgattaatactatattaaaaaagatacttaaagtatcttacaacaagtatcttcatttaaaacaacctgtatttgttgctcattaattttataataattccatgtcccatgcttttcagcaataagaacatttgcatctactaatttttttaaatgataagaaagtttagattgttttatatctaataactcttctaaatcacatacacataatgatttattgaagctttggctaatttgatttagtatttttaatctgattttatcggcaagtgcattaaacatattttcataaaagtcaaattgttgatcttcactcatatcagtctttgttttaataacttccataaaagaccatcctttttataatatttcattgattttatattatctttacttcaattcttgaattgcttgtttatagttattttttgttgattcgccatactgattaatgttccctttaaagaactccttttccatatatattgtagcttcttttaaattgatttctcttgatagcataacaagatttaaataacttacaaaataacccacagttaaagtacttgcatggtttactcgctatcaagcacgcctccttattgtcaacgtagttttatatcatttaatacatcaattttttttgatgtattaaatataaatcaatatctatattatcgcaagaaaaaaactatgattttacataaacttaggtatttctcacagaaatattaaaataattttttataaattgtattattaagaattaaatttagtaaaatttttaaaactcaaacaataacatagacaccaatctatatagatgttaatctataatagcaaattaattaatgaggtgagtataatgttaaatattgaaatatacgaagaagctatgtgctgttctactggagtatgtggtccagaaccggatgaaacactaataaaagcgaaccaaatcaatgaatatttaaagcaaaatcaaatagaagttcaacgttataatatgaataataatccgaatgaattcattaaaaatcaagaagttattcgtttaattcaagaaaaaggtgatgaagttttaccaatcacttttatagaaggcggtatagctaaaacgggcgcttatattacccaagaagaagccgatgaaattattacagttaatcaaatgagaaatggaggatgctgtggtggagatggatgctgttaaatacttaaataaattgaatttagataacattgagttaacaaaatatttgttttttactggtaaaggcggcgtaggtaaaacgacgatatcaagttttattgctttaaacttagcagagaatggaaagaaagtagctttagtaagtactgatccagctagtaatttacaagatgtatttcaaatggaattatctaataaattaactaaatatcaacctatacctaatctctctatagccaattttgacccgattgttgctgcagacgattataaagcacaatctatagaaccttatgagggtattctaccagaagatgtgctttctgaaatgaaagaacagttaagtggttcatgtacagttgaagtagcagcatttaatgaatttacaaattttttatccgataaaactttagaacaagaatttgatttcattatatttgatacagctcccacaggtcacaccttgagaatgcttgaattaccttctgcatggacagattatttaaatacaacgagtaatgacgcttcttgcttaggtcaattatcaggtttaaatgaaaatagagttaaatataattcagcacttgaaaaactacgtaaccaagatgatacgaccatgatgttagttgcgagacctactcactcttctatatatgaaattcaaagagcgcaacaagaattcatcatccactggtggtgtgactacttcgcctgtatcaggatttttaactcctggtttacctggaacgtcctcttggctacctttcggtgcatttggatcaaattcatccttatggcctggcttgatttcttcgccaccataatgaacgatttcatctactggttgttttgttactttttctgttggttcaccttcgccaactttttcccctgttaatgggttcttagttgttggtgttgtaattgtttttgttcctggttcacctttttgaacgactttctctgtacctggcgctaagtttggatcaaattcgcgttttttatcaaacggaatttcttccgttgacgtgatcggatctccatcaactggaccatattttgtcacatcatccactggtggtgtgactacttcgcctgtatcagggtttttaactcctggtttacctggaacgtcctcttggctacctttcggtgcatttggatcaaattcatccttatggcctggcttgatttcttcgccaccataatgaacgatttcatccactggttgttttgttactttttctgttggttcaccttcgccaactttttcccctgttaatgggttcttagttgttggtgttgtaattgtttttgttcctggttcacctttttgaacgactttctctgtacctggcgctaagtttggatcaaattcgcgttttttatcaaacggaatttcttccgttgacgtaatcggatctccatcaactggaccatattttgtcacatcatccactggtggagtaactacttcgcctgtatcaggatttttaactcctggtttacctggaacgtcctcttggctacctttcggtgcatttggatcaaattcatccttatggcctggcttgatttcttcgccaccatattctgtgatttcatctactggttgttttgttactttttctgttggttcaccttcgccaactttttcccctgttaatgggttcttagttgttggtgttgtaattgtttttgttcctggttcacctttctgtttaacgcgctctttacctggttttaaatcaggattgaattcacgtttt

SEQ ID NO: 4019 - DNA, 2945 bp, Artificial Sequence
  Description of Artificial Sequence: synthetic nucleic acid sequence
cagcatcaatccataaatatcaaaaaatgtgtatctcattattctgacaatatataggtacattgcacataaaataaactcatgatagagtagaacttaagcattttaacactttagcgctttaaagggagttggtaatttgagtggtcattcacaatggaagacgtctaccggttttatattagctagcgcaggttctgcaataggattgggtgcaatgtggaagttcccatatatggcaggtatatacggcggtggcgcttttctattaatgtttttaatttttactatatttgtaggactaccactgttaattatggaatttacggtaggtaaaatgggtcgtacatatacaacgcaaatatacataataaatataatttaaggccatcggatgtggttgaatgattttatcataatcttctgtgtaaacaatgggcctaggtgttgataaattaacataatgaattaaatgattaggaaaatcatctcgtttagggttattacaaataagcactaaatcgacatctaaatcaataagttgaagtacatcactttcaacttccgaagtgtagtatggtgaaaataacagtaccctatctgttgtatctatatcgttaaaattttgtaaatcttcaagtggtaagctagacgctaatttttcatggctttgtaatatgaatgactcatagaattttaaatcatcgtagcctttgatatagacatgtccttctccaccaattgcttgaatgagacattgagctgccatttgaatatccaactcttgtttttcaagccgattaaaaataccagttaattgtgtgtttaagatttttgacattgtaaacctccaatctctttactgaaatattgtaaataatcctagatagatatgcaatatgtgaacatttttcgaaatgtattcgcttccaaaaacgtaaaaacaactaattataaaaaatatcaatattaaataaaatattcgaatgcaatcagtatatatttttgatataatgacgttgaaaaaaacgtgcactgttgcactcaaggaggaactttaatgcctttagtttcaatgaaagaaatgttaatcgatgcgaaagaaaacggttatgcggttggtcaatacaatcttaataacctcgaatttacacaagctattttagaagcgtctcaagaagagaatgcgccagttattttaggtgtttctgaaggggcagctcgttatatgagtggtttttatacagttgtgaaaatggtagaaggtttaatgcatgacttaaacatcacaatcccagtagcaattcatttagaccacggttcaagctttgaaaaatgtaaagaagcaattgatgctggattcacatctgtaatgattgatgcatctcatagtccttttgaagaaaatgttgaaatcacttctaaagtagttgagtatgctcatgatagaggcgtttctgtagaagctgaattaggtacagttggtggacaagaagacgacgtagttgctgatggcgttatctatgcagaccctaaagaatgtcaagaattagtagaaaaaactggaattgatactttagctccagcattaggttctgtacatggaccatataaaggtgaacctaaattaggatttaaagagatggaagaaattggtgcttcaactggattacctttagtattacacggtggtacaggtattccaactaaagatattcaaaaagctattccttatggtactgctaaaattaacgtgaatactgaaaatcaaattgcgtctgctaaagcagttcgtgaagtattaaacaacgacaaagatgtgtatgatccacgtaaatatttaggaccagcacgtgaagcaattaaagagacagttaaaggtaaaattagagaattcggtacttctaatcgcgctaaataatttaaatatctttgctattggtcattgaacataagttcagtggcctctttttatgctataataatgacagaaatttacattttatggttacaatattcaatttcgggaaggttttatataataaaatagcttacaaacgaataattaacaaaataaatgattaattgaaaagataagtggtattagttcattgacgtattcttagtcgtaattagcaatctttataaaaaacaaaatgatgctataaataaattgtatttatttattgtaaaaataagtattttacaaataaagtaaaattatcttataatgctaataatgtgatattttaaaaagaaggaaacaaaggagaaaagtgatatggctcaagaggtaataaaaattagaggtggacaagcactaaaaggagaagtagaaattagtggagcaaaaaatagtgcagttgctattatccccgcaactttattagctcaaggacaagtaaagttggaaggccttcctcaaatctctgatgtcgaaactctagtaagtttgttagaagatttaaatattgaagcaagattaaatggtaaacaattagaagtggatactacacaaatagagaatgcacctctacctaataataaagttgagtctttacgtgcttcttattatatgatgggcgcaatgcttggtcgttttaaaaaatgtgtaattggattgccaggtggatgtccactcgggccaagacctattgatcaacatattaagggattcaaagcattaggagcagaaattgacgaatctagcaatacatccatgaaattagtagcaaaagaacttagaggcgctcatatatttttagatatggtaagtgttggagcgacgattaatattatgcttgcggcagtccatgccaaaggtcaaactgttattgataatgcagccaaagaacctgaagtcgtagatgttgcaaactttttaatgagtatgggtgctgatattagaggagcaggtacaacatcaataaaaatcaatggtgttt

SEQ ID NO: 4020 - DNA, 4025 bp, Artificial Sequence
  Description of Artificial Sequence: synthetic nucleic acid sequence
aggtaaatggacttcaattaacgcactagaattaggtgttcctttaacaatcattacagaatctgtatttgcgagattcatctcatcaattaaagaagaacgtgttactgcttctaaatctttaaaaggacctaaagcacattttgaaggcgataaaaaaacattcttagaaaaaatacgtaaggcactttatatgagtaaaatatgctcatatgcacaaggtttcgctcaaatgagaaaagccagtgaagataatgagtggaatttgaaattaggcgaattagcaatgatttggcgtgaaggttgtattattcgtgcacaattcctacaaaaaattaaagatgcctacgataataatgaaaacttacaaaacttattattagacccttacttcaaaaacattgttatggaatatcaagatgcactacgtgaagtagtagctactagcgtgtacaatggcgtgccaacacctggtttttcagcaagtataaattattatgatagttatcgctcagaggatttacctgcaaacttaattcaagcacaacgtgattactttggcgcacatacttatgaacgtaaagaccgtgaaggtattttccatacacaatgggtagaagaataatttacgctataaaatctcactctaaattgggtgagattttataaaaattttaatgtaaacgttttctcttagtatagtttttatcaaaattaatgagtccttttatttaaacttattaattttgtttatataaattatttagttttttaataacataggaggagatattatgaaaagaaattggtggaaagaagcagttgcatatcaagtatatccacgaagttttaatgatagtaatggagatggaataggtgatctacctggattaattgaaaaattagattatctagaaaatttaggaatagatgtcatttggttaagcccaatgtatccatcaccaaacgatgataatggatatgatattagtgactacaaaggcattatgagtgaatttggtacaatgaacgattttgatcaattgttatcaagcatacatcaaagagggatgaaattaatattagacttagtggttaatcacacatcagatgaacacccttggtttattgaatcaaaatctagtaaaacaaatgcaaaaagagattggtatatttgggcagatcctaaaccggatggatctgaacctaataactgggaaagtatctttaatggttcaacttgggagtttgacgaatcgactaagcaatactatttccatttatttagcaaaaagcagccagatttaaattgggaaaatccagatgtaagacaagctgtgtttgaaatgatgaattggtggtttgaaaaaggtattgacggatttagagttgatgccattactcatattaaaaagaattttgaagcaggagatttacctgtacctgatggcaaaaaatttgctccagcatttgatgtagatatgaatcagccaggaatacaagaatggctccaagaaatgaaagataaatcgttaagtcggtatgacattatgactgtaggcgaggctaatggtgttactcctaatgatgctgaagaatgggtaggagaagaaaatgggaaatttaatatgatattccagtttgaacatcttggtttatggagtactggcgatacgaaattcgatgttaaatcctataaacaagtcttaaatcgttggcaaaagcaactagaaaatgtaggttggaatgctttatttatcgaaaaccatgatcaaccacgtcgtgtttcaacctggggtgatgataaaaattattggtatgaatcagcaactagtcacgctactgcctactttttacaacagggcacaccttttatttaccaaggtcaagaaataggtatgactaattatccatttgaaagcattgaaagtttcaacgatgtcgcagtgaaaactgaatatcaaatagtcaaaaaagaaggtggagatgtcaatcaattactagataaatataaaatggaaaaccgagacaatgcaaggactccaatgcaatggaataattctatcaatgctggattcactactggtaagccatggtttcatgtaaaccctaactatacagaaattaatgttaaacaacaactaaatgataagttttcgatactttcttattataaagcgttaattcaactaaaaaaatctgatttgatttacacctacggtaagtttaatatggtcgatgctgaaaataagcaggtttttgcatatacacgcacatttaaaaacaatactgtattaattgtagccaatctcacaaatgaagtatcagaactaaacctaccttttgaattagatatttcatctgtagatataaaattgcataattatcacttaaatgatataaatttagaccatattaaaccttatgaatcattcgtcgttgaaatataataccatgacgataattcaaaaattaaaaataaacacgccagtgattttaaatacgtcactggcgtgtttcactatacattggtggtattggtagtccataacttaattaatttgaaaaactcatttatattaagtttgtcccaactaaatttaggtgaacacaactcgaagaatttcattctaaaattcaacaaatctatcgagttgaaattcgaaacacgattcatataatactgataatctcataactctatgtcacatcttaattttgataaccttcatctaaatcatagatttcttgtttaataggcaaccataattgaatcttagtgaatgggtcattaaatgaaatatcaagtggataaatctcaacatataaactatttcgctcataaggtaaagtaagttgcaagctagactcaatataataccaagcctcgtttgtagcataatcaatttcaccttgtaaattaaacaatgcataatggcgaccaggtaaaaatctgctttcaagatgtgaagggtaacgttcactcggaacaccaacaaatatttctaaaccttgttccagaggacagctgactacaaataattcatacgggctcgtatcattataacgtttaagttctttaatataaccatctactaatagatcctctaaaaagtctggaatattaaatggatttgataattgctcagtaggaataaatcttgaatagccaactaaagaaatatcatcagtctcttgaagtctgtatgtatagggtgcattttcagtcgttgataattttatatacagtcgttgctgtatttttagttcatctttttttgttgtagcttgaataggtgagataccatgaaaatcgctaaaatcatttgcgaaatcattagaattcgcataacgatatttcttagcaacatccattaatcgactagctccattaactacatcgtttgctgctattgtcattttacgtgcacgcgcatattcctctggggactgaccaactatcatcttaaaagattgatccaaatgatacggagaaagaccaacgtaatcacttaattcttgcaaattaaaaggctctaacaaacgatcctcaatatatacaattgcctgttgtatttgcttgataacgtccaaaactttcactccaattaaattcaatcataatctttattgtacattatttttaaatattatacatcttaaagccagattaattttttgcaaaatataaaaaatgtgaatgattaagtcctaaatcactacaagttcttttaaacgttgcgtaatttaagatatcatcattcacactaatctatatttatataaaatccatattagtggatatcatcccaccaatgatttccatcacgacttaataaaagatcactttcaagaggtccattcgtacccgcttcatagttagggaaacatggttcaaccattgtccattgatcttggattgcatctacaaatttccaagtagattttaattcttcccaatgtgtaaaattagtcgcatcacctttaagacaatcaaacaataagttttcatatgcatcaactgt

SEQ ID NO: 4021 - DNA, 3895 bp, Artificial Sequence
  Description of Artificial Sequence: synthetic nucleic acid sequence
gtagctcataagcaggaattctattttgcaatgaacaatctaatatgtaattaccattgtcggttataaacggtacatcttcattaactcttctgcttacatgaatatcataagtacgctcaatttttttggcaacttggtaccaattaaatttatcgacttcaactggtaatgcaaatgtttctcctaaatagttgacgagtttactttcatctacaacaacgacaaatcggtcagccatttcatctatgaccttttccctaaataaggctccaccaccgcctttaataaggttaagcgcactgtctacttcatcagcgccatctattgctaagtcgattttctcaacatcatttacatcaactatattcatagctaattctttagctaaaaatgctgttttattagaagtacagacgccggtaattgtataattcttttgctgaattaattcagcaatttggggaattaataattcaattgtgctccctgttcctattccgattgtcataccattttcaatttgactaagtacatcttctaaggtcatcaattttagctcttttgcatctttcatgtgtcgttgctctcctcttcataaaagtatctaattatattctacatgagattcaaatttttaacatacctcattttttatttcatattaatcatttcattttattgttaaactatttatatcaacacttgataataacttataaattaaaaggtcgtgatatacatgattaaagtgaatgccatatctattggcaaaatagaaacattgtcttatggaaactataaaccaatgcaatcagcgttaaacaaaattccttttaaaggtcaaatgtggctcaatcgacttgggttcgtggacgatgaacaagcctatcataaccatggtggtatacataaagcgatatgttgttttagtaaatctaattatcaattatttaaagatgacttagatcaattacctgaatttgcaatgtttggagagaatttgacagttgaacatctagatgaagcagatgtttattttggtaatcagtatcaactaggcgatacaatcatagaagtatcagatatacgagaaccttgttggaaaattcaagctaaatatgcaatacctaatttagttcaaaaaatgtcgcaatctggtaaaactggattttattttagagttataaaagaaggatatgtacatcagagtgataatttaaaactcattaaaaaggcagaatcaaacacacgtctatctgtgaaagacttaaatcatctattctataatgagcgaaataatttaagattaatctatcatgcacttcgaaatccttatctttcacctgatcgaaagaaaaaactacagaaaatgaaaacgcgtgccgaaaatagaaaattcattaaatctgacgataaatagtttaaaaagagtctgaaacttttaagctcagactctcatatgtattgcaatgaatgatgataatcatcaatactacttttcatgaatttgaaaacttgttttagatgtaaataatgtatctgcctctaaaatagactgagctttggcgccgtacatatttatatcattaggcatatattgagtttcgatggaaaatccagaatgcgccttataaatattaaaatcattgttccaaacttgtggatcattaaacgtaaacattacaaaatgaggcatatcagtcttaatattaagttcaaattcagaattatcaatggtaagctcatttccaccaaattcgaaaggatgatcaatgccattataatgattaatttgttgttgcaaagtttcattgtcactttcaaaaatatcttttaaatagactttatttgtatccaataatcgatgtaaatcaagagattgcccctctttaacaatatgtttattatttaacatatacatttttaatgctgaactatttatacagtggttatagacaacattgttatcacgattcaaattaaaataaacatgatttgaaggattaaatactgttttttttgttgattttgcctcatattgtacggaccatcgatgattggcatcataagtgtgaataacctttaccatcatatctccaggataattgtcctcttcttctttaatcgttgttgtgaatataatctttacttgtccaatatcatcaactatttcataatcaaaaatacgtctatttaatccatgactgcccccatgcaaatgatgttgaccatcatttgattctaattgaaaagtatcatcatctaatttaaatgatgcattttcaattctacccgcatagcgacctatcgtagcaccaaaattaaaaggttcttcaaaataaaattcatccgcttctactacattccctaaaacgatattgttatcatggtatttccaagaaacaattcttgcaccatagtttgtaaatacaattttcgtatcgtcattatcaattttaattaaatctaaaccgtgtctttgatgttcaactttagatatcattacataatctccctttcaaccttgtaaaattaacgctcctctaactatatttcaatgactaaaacctctaccacacctgtcctaattccctcatcaccttatttaacagtgtttataataacttacttatatcaatttaagttgtatttataatcgccagcctcgcgattgatttaaaagttaataatgatataagaacatctgcttttaattggacaaatttttaaatagaagaacgtttaaagtcttaaattactttcaatcccctgattttttaagatgtctgccataaaggggtagctttttggctaaacatatcaaacactttatacttgaaaatagcaatataagactttttaaattcaacttttatcagcagtgtttcacttacatattgttacactttttcttgtaatattccatagatttcggcaattaacgtaaataaattgtatgtaagatgattcgaaaatataattatcatttttgtaaacacttacattcatgtaaactatacttaaacatcaaatcgtcgactcagaacaatatgatttattacaattacgctatatataggaggcatacacatgagttatagtataggaattgattttggaaccgcttctggaagagtgatattagctgacacatccaacggacatatcatatcaagatatgaggaagactatgcgaacggaacttatatgaactcattatatgataaaccgttacctgaaaactacttcttacaaaatgctgacgactatttacaaattcttgaacaaggcgttcaatttgtattagaagatagtaaagttaataaaaacgatgtggttggaattggagtcgactttacaagcagtacaattatctttctcgatgaacaatttgaaccgcttcatcgtcatgaagatttaaagacaaatccacacgcgtacgtaaaattatggaaacatcatggagctcaagatgaggcaaactatatgattcagatgagtaagaataaaaattggttagattattatggctcaagcgtaaatagcgaatggatgataccgaaaatcctggaagttaaacatgaagcaccagaaatacttagaagagcacggtatataatggaagctggagattacatcactagtatactaacaaattcaaatatacgatcaaattgtggtattggttttaaaggtttttgggacaatgaagctggatttaattacgacttcttccatagcgtggatcctgatttacctaaaatcgtcaaagaaaaatgtgaagcgccaatcatatcaattggagaaagtgcaggtcgtttatgtaaagactatcaacaaatatgggggctttctcaatatgtccaggtttcaccttttatcatagatgcac

SEQ ID NO: 4022 - DNA, 3549 bp, Artificial Sequence
  Description of Artificial Sequence: synthetic nucleic acid sequence
tgtagtgatgttactttacacaggctggctaagtacacaagcaacaagtttaaatggtaacttatggcttacaggtgcagtgactcaagatgcattcggttttattggccttgcagtattagcagtggcaattattatggggatttttactggattaaatggatttttaatgagttcgagtcgcttattattttcaatggggcgctctggcattatgccaacagtatttagtaaattacacagtaaacataaaacaccatatgtcgctattatcttcctagtagctgtatctttaattgctccttggttaggtagaacggcattaacatggattgtagatatgtcatctacaggtgtttcaattgcatattttattacttgtttatctgctacgaaattatttagttttaataaacagagtaatacgtatgcaccagtttataaaatttttggtattataggatcgattgtatcctttgtgttcttatgtttattgcttattccaggttctcctgcagcactttcgataccatcatacatcgctttaggaatttggttggtaataggattaatcttttttatcattcgcttgccaaaacttaagaaaatgaataatgatgaattgagtcgattgattttaaatcattctgaagacgaagttttagagatggttcatgaacctggtcaatctaattcaacgaataaatagatttaaaagttatttcgtgacaattttataaagaggctggaacaaaaaggtccaagataagtaaaaaaagacaatttctattgaaataatatagaaattgtcttttttataattttttttgattattttcagttcgttgagctgttacttttcttatattaagccacgatgatgtctgaattcatcgaattcagtatcgggaattgtttctacaatatcatttacatgtcgtgaaatattatttgtggggataagaactgaagtttctattggtagagtatgttgagtcatgttatattctttatacataaggcacccggttaatttagtttattggtatttattaaattatacgaaaaggccttattttttaaagtattttaatataaaattacatataagcacaaagtattttggcgagactcttgagggaacaggacaagctgaagactacaggctgaagctgtcccctaagaaagcgagccaacaatacgaagcattgtaaataaaaaagccagtaaatgaatttatgaaaactcatttactggctattttgctaggaattatgttccaacctctttttatttatcatatattttttaacaatatttaactataaatttaattggttagagtaacgttaattttttagcgaatgattttattgatattacaatctttttctggtacgagcaaaacctgaaataacgattttagaaatttgatcagcaaataataaacctaaagcaatagcacctgctattaatgtcacttcaagcattgtgttaatcgcctttccaaagtgtaataacactaaatttttagtggcatcataagcaagtcctcctggaaccagaggtataatacctgtaaccataaaaataattacaggctctttttttcgacgggccatataatgactaagtaaacctaacgctaaactaccgaaaaagcttgagtaaatcgtatggagttcaaagccgttaaataatacagtataaaccatccatccacaagcgccgacaaagccacaagcaaaatacaacttcctaggggcatcaaatatgacacagaaaaagagtgaagcaagaaagctaaatataaaattaaatatccaaaacatatgagtgcactcctagactaaaattaatattgaacttacaccagcgcctataccaaaggcggtgactaaagcttctaaagattttgtagtaaacattaacatatgtcctccgaatagatcttggatagcatttgtaatcagtactccaggtacaatcggcatgaccgctgcaatgataattgtagctaaatctccgctaggaacaaatgcatgtccaattacagaaataatacctattaccaaagaacctatgaattctggaataaattgtgcgtgtagctttcgatctaatatttctactactaagtatccaatcgttccagctaatacagctgtgatgatatcaaccagacgacctccctgtagatagaggaagctcgtagcgataattgctgcggcaattcctttaaaagggagactgctatctcttttagcaacatatatttcctctaattgatacttagcttcttcaagcgtcattgtgccatttgtaatttgacgtgagatttcattagcttgagaaatttttattaagttcgtatctcgagttttaattctatacaaccgaggatatgcttcattatgtaaaacaaattcaattacagtattagtcacgaaactattactttcaggatagcccaattttgtagcaatacgtgccatggtatcctctacccgtgtaccttcagctccagattcaagtaatatacgagcagcaatcataacaacatcttttatcaatgcttcacgagatgtttcaattgtatccttattcatttcatcaccaaatttttttaaaattaagaataaatcattattataattatagtaaaggttttaggaaaacgccacaacccttgaggtttacatgacgtgcaacttgttatttaaagtcattttcatagagttaagcagataaaataatgatttataggtgaattttataataaatattaaaaaaaactttatagttgtacatttacctttctataatgtttcaaaaaggttaaaataatattagttaacgatgacagtgaatatattgagtagcgacggtatattctatgaggttaactatatacgtagtagtgatttaaagttctcccaaggatactacaacataagagcctagtacatcttaattgtacaggctcttaaattttttatagtcattaaatttaagataaggtgttatctttttacatattaaaaaccctacacactagtagattataatcctagtgtgtagggttaatttttcactttaacttatatactaaaaaattgtttgaagtcttcgatgtttagaatgtgaccaatatagaaactaccaaattcgccataacgagcagtcgtttcatcaaaacgcatttcatagacaatttttttgaattgaagtacatcatttgaaaataatgtaacaccccactcatagtcatcaaaacctactgaacctgtaataaactgtttgattttaccagcatatttacgacctatcatcccatggttatacattaaagttttacggtcttcgataggtaacatataccagttataagtttcattgcgtcgtttatccattggatagaaacatatatattcagaatgtggtaattcagggtataatcgtgccttaacgtggggattttcataaggatcctcatcagatttgcctgctaaataattacttaattctatcactgacacataggaataa

SEQ ID NO: 4023 - DNA, 4168 bp, Artificial Sequence
  Description of Artificial Sequence: synthetic nucleic acid sequence
gtactcattgtatgtgtgattgtgatgatgcttcttctaagttcaattctaccttcatacctagcaattttaatagccgcaattgttgctgcattgttaggggtggtgatggacaaatgacgacagatttacatacattagtacttattattttatgtggcgtggtcacattactcgttcgagttattccatttgttatgatatcgcgtgtcaacttaccagcaattgtaattaaatggctttcttttattcctatcactttatttacagctcttattatagatggtgtaattcaacaacatgatcatacatttggttatacgcttaatttaccttatattattgcaatcgtaccaactgtgatgctcgctattttcacacgtagtctaacagtgacaattatcggaggtatatttgtcattgcttgcttacgtttaatcttttaatctttgaaaatcatatcaaatcattgaacttacagaaaaagttagttaagattaaaataattagaaaatttagactattcgagacgaaatgcatatctatatcacaatacaattaaattacctaaccttattttgagaagctgagggatttggcccatagaagcttcagcaaccgactttaaatagcacggtgctaataccaacgagcaactcgaatgataagtacgataagtgcctttacatcatttgagtaaggcacttttttagttgaaggaggtaggaactattatgacgaattacacggttaatacattagaactaggtgagtttaaaactgaatctggtgaaacgattgatcatttacgtctacgttatgaacatgtaggacttcctggtcaaccccttgtcgttgtttgccatgcacttactggcaatcatttaacatacggcacggatgcacaacctggctggtggcgagaaatcattgacggtggctacattccagttcatgattatcaatttcttacattcaatgtcattggaagtccatttggttcgagttctaaattaaatgatgataacttcccagaacatttaacattgagagatattgttagagctattgagttaggtatacaagcattagaatttaagaaaattaatattctcattggaggtagtttaggtggtatgcaagcgatggaattgctttataatcgtcaattcgaggtggaaaaagcaatcatattagctgctactgataaaacgtcctcttatagtcgtgcttttaacgagattgcaagacaagctatacatataggcggtaaagaaggtttaagtattgcacgtcaactcggctttctcacgtatcgatcgtctaaaagttatgatcaacgttttacaccagatgaagtagtgagctatcaacaacatcaaggtgataagttcaaagaatatttcgatttaaattgttatttaacactgctagacgtcttagatagtcaccatttagatagaggaagagatgatgttgatgaagtctttcagtcgttggaaacgaaagtactaacaatgggttttattgacgatttgctttatcctgatgatcaagtgagagccttaggagaacgttttaaatatcatcgtcatttcttcgtaccagataatgtgggacatgatggttttcttctaaattttaatgattgggcgcctaatttatatcatttcttaaatttgaaacaattccgacgtaaataggaaagttttataatagaacacaatctccatgagcacacataagaaatactaaacagtgcagaataggtaaatttttctttagcataaaaatagtcatacagaggattatataagcgaaccctatttcatatgtcgtacttatgcataaacctgtcactaagtagtatgactttactttattgttaaattttagcaaagaggttaaaataggacttatagtcaaaaagtatgggagtggcgtatgtgttttcaaaaatacaacctaaagcaactattttagcaattatttcattattagtagtcgctttagtaacacatgtattacctgttctcggcttgattttatgtttatttgcaacgattcccggtattgttttgtggaatcgttccatacaatcattcggaattagtgcattagtaacagttgtacttacaacattattaggtaatacatttgtcttaagtatgatggtcttaatcttattattaagtgcgattatcggacaattacttaaggaaagaacatctaaagaacgaattctttatatttcaacagcttcattaagtttagttacacttattggatggatgttattacaaacattcgataaaattccgacggcagctgtattaattaagcctttaaaaaatgcaatgcatgaggctttcttaaaaagtggaatcgattcaaactatagacagattcttgaggaaagtttccgacaaatgacggtccaactccctagttttctaattatagttattttcatttttgtcttaattaatctgattattacatttccaattttacgcaaatttaaagtagcaacacctatttttaaacctttattcgcatggcaaatgagccgtaatttactatggttttatcttatagtacttatttgtgtcatgattgcgagtgaaccaagtacgttccaaagcatcgtgttaaactttgatgttgtgttatcattagtgatgtacatccaaggattaagtgtcattcacttctttggtaaagctaaaagatggccgaactttgcaacaattcttgttatggtagtagggacgcttcttacaccggcaacgcatattgttggattacttggggtaattgatttatgtattaatttaaagaaaataataaaaaaatgatgattaaaaagtgattagaggtggaagaatgaaccgtcaatccactaaaaaagctttgctcataccgtttattttaatggtgctcactgctatagcacttgtcgccgtgtggtttatttttaaccaactagtggcaggtattgctacagctatacttattgtgatgattattattagtggcgtgttattgagaaaagcatttctaaaaatggataattatgtggatgatttaagtggtcacatctcggcaagtagtaacaaggcgattaagcacttgcctatagggatgattgtgttagatgaagataatcacattgagtggatgaaccaatttatgacagatcacattgaaacgaatgtgatttctgaaaatgtcaatgaagtcttccctaacatattaaaacaactggaaaaagttcaagaagtagaaatagaaaacaacaattattactatcatgtacgatattcagaaaacgagcattgtttatacttctttgatatgactgaaactgaacgtacaaacgaactatatgaagattcaaaaccgattattgcaacaatatttttagataattacgatgaaatcactcaaaacatgaacgatacacaacgttctgaaattaactctatggtgacacgtgtgattagtcgttgggcacaggattacaatatttacttcaaacgttacaactcagatcaatttgtagcttactttaaccaaaaaatattggctgaattagaagattctaattttgaaatcttaagccaattaagagaaaagagtgtgggttaccgcgcacaactaacattaagtattggtgtaggtgaaggtactgagaaccttattgatttaggtgaattatcacaatctggtttagacctcgcgttaggtcgtggtggtgaccaagttgcaattaagaatatgaacggcaatgtaagattctatggtggtaagactgaccctatggaaaaacgtacgcgtgtacgtgcgcgtgtgatttcacatgccctcaaagatattcttactgaaggcgataaagttatcgttatgggacataagcgaccagatttagatgctataggtgcagctatcggagtttcgcgctttgcatcaatgaataatttagaggcatttatcgttcttaatgattctgatattgatccgacattacgtcgtgttatggacgagattgataagaaaccggaactaaaagaacgctttgtaacatcggatgaggcttgggatatgatgacttctaagacgactgtcgttgttgtagatacacataaacctgaaatggtcttagatg

SEQ ID NO: 4024 - DNA, 3226 bp, Artificial Sequence
  Description of Artificial Sequence: synthetic nucleic acid sequence
ttcgttaaactcttgtttcttattcactctcggcattgtgtccgtaaagaagcacttcaatttatcgttatatgtgccacgttccttttggtaccacaatgtattgagaggaatgcctgtaatgttgtgcaaatgagataagtctgtcttagtcactgtgtggctaaatggctcatacatatacaccataattaatcctccttattacgtcgtcttacaagtgcgataccagtgactagtgctaacaatccaaagacacctacattttcaacttgtcctgttttcggaagctctttttcctgtactttttcagcttctttcgactctttttctaattcttgttcattagccacgttacccgtaactctttcaactggtttatcaatatgttttggttgttcttttgatcgtgttacaacgaaagtcgtgtcatcttgtatttcttttggtgacacttcttctttattttctacctcaacaattttacttggtttttgaggtgtaataggtgtttcttttttctctgttggtgttttaggttcttggtgtttttctttaacttctgattgttcaggagtttgtggtgtttcaggtcgtggttgttttggttcttctgacttagtaggttgttctggtttgttaggttcttcaggtgtttcaggattgttcggttgttcaggtgtgtttggttcttccggaacgtttggtgttgttggttcttccggagtttcaggttccttaggttgctctggttctgtaggttgttcaggctctacaggtggaatgttgtcaccctcaccacctccaccagcgttagatacttcagattcaacattttctaatgtttctttgtatccgtcaccagtcaattcaacactgtttgtgtattggtgatttgtacctaataaaggtgttgttgtgtattcaatttcatacgctttattaatttgttttaagaaatcgattgtaaatccattagtggttggtgttaatttataatcatagaaaggacttcctaactcttgattatctacatcgaattcagtgacagttaatgaatcttcatcgaatgttaaaccgtcacccaatgtatcttctaaacgtccattattaatagtttgttcatcctggtttattcttacatcccaacgtactttgttgtcatcatctacatatccccatttttgtaacggacttttgttaatttcattttgtgcaacgtctactgtgtatcccttgtcaccaagtttgatgtcgtaactctcgccggctttgactttatctctgttgaacatagtctcaaaatacatccaacctttagtattttcatgtgtcgctaagtaatctgtcggatcagttaagcttacattcactaatccatctcttgtcgcattaactctgccaatattgacattatcaggtgtgtttaagtcaaagttttgttcattagcaagtcttaactgttcaggaagattaaagttaatttcatcaccctttttataacctgtagcgttccattcgtaattgacttgttgtttactccaaataggtgtttgtccgttttcgtctgtttgtgttttgaaatctgtgttagtgataaatcgaggttgctctgtcgcttgtgtagacacatcattttgggccgtttctttttcttggttgttttgtaccacttcttcattacttgcttgtagtgtgtctgtgtgtacttcttgtgttgtttctgcttgttctacattaggttgttctctttgaacttcgttttctgcagcgtgtgcttgtcctccaaagaaaattgctgtccctacaatgacactacctactgctgtgttaaactttctgattgaatatttattttgtacttttttcattttgttttcctccaattttttaattttcccacttttcgaatgctctgtttagataccaacgcgctttgtctaaatcttcttttccgttcttacgattagctcgactgatatatttaattgcattaccaatcgcaaatgctaactctggtttataatctttagtgacctgttctatgaattcaattacttctatttctccatatgtgtaatgtgacgggtggttaatcttgtcatataacgtctttttgttttcttcattttcatctggtaatgagtaaaaatcgtaattatcatcaatagtccaagttttcccatcaatcgcttttacatcagcaacccatttagccgcaccacgtcttgaatgaactaaacgatatacatttttaacctttgctgtaacttccacaccgttaagtccatgcattctaattgtgttacctctactcaagtccttaacgctcatgatctaaccacctttctaggaaagatgtcattctccataagatacgtgcaccatttaccacgagagtgtttttgatttactgtgaataaatgtggtttcttacgtttcaactcttgtaatctgcgttgctccattctctctttataactagcaatttcgtcctctttaggtttcaaactatcccactcactacgtcttactccaataggtgcttctattgcatcttcaaacttccaaccagaagctaatctttgtcttaagatatcgggattgatatctgcttctttcattttctctactacatctggtgtaatagagaagtatttatttttaactctcatttttgttgcttccatttaattcaactcccatccagtttcatctatatctactcccacaacttctgcttctgacaaaaacttgtctttatcatcgtggtataacttgttatagaattcttcctcttcatacatatcgcttactctgttgacttcaacaggaacttttactttcatatcaactttcgctttgatttctattgtccctttgtacattcactccacttcctctacattcatgattatttttggttcttctgcatattgcttaaaactttcaatgtgtgcaatttggttatcatctttccataagtgatcgttagcagcgtctagcactgttttgattaaattgtctatatctggtttcgtacgtttatattgacctatcgatattaacttttgattcttagtccaacttttaggtggtgcgaagtaaaaatatattgatactttcaatctactgttcaacatctttttaggtaattgactctgtatatatgctttatgctttgtataagacgttggcatgtatgtttggataaacttacctgcat

SEQ ID NO: 4025 - DNA, 3497 bp, Artificial Sequence
  Description of Artificial Sequence: synthetic nucleic acid sequence
gtttactttaacttcaaaacctattgatactgcataatcaatttgttctaagattgtagacgctttaatatttctattgttaatttcttgaaaaacgttatcctcaatcgcatctaaacttacattaatacgtcgtaaaccagcttgatataaattttttccatgtttttttaataacaagccattagtagtcaatccaatatcctctataccatctatgagatttaattgctctacaagtttataaagattgcgtcgtaagagaggctctcctcctgtaattcttatctttttaactcctaattgagcataaatctttgaaattcgtgttaattcttcaaaagtaagcaattcattcttaggtaagaaagtgtaatcatctccaaagatttcctttggcatacaataatcacatctgaaattacatcgatcagtgaccgatattcttaaatcccgtattggacggcctaatttatcttgtattacctctttcattgttggacctccttattcatttatctgcatttttaaagagtccaaatcatgctgaaaattaatattcttataccaataataaggcgagtcaatttcagtaacatctaaccaatctgtcgataattgtttaaagacatgcttcagacttaaatgatttgaatttaaagctttttcaataaaaggaaacgtcgaaagtgtataaaaaccaatcgtcggtatacatatttctccttctttaaatgcgacaatatctaaacgtgattcaattaagtttgataccatgaaatgatataacccattcactgctttacttgtaatcattggtgtatcaacagatacaatgaaaaacaattcttcatccatgtattgtttcatcactgagtaaattcctgttagcggccctttattttgatgatgttcgtcatcaataatcacatattcatattcaaactgagaagctaattgggaattagtgctaatgataatgcgattaaacatatttgtagattttaacgtttctataattttttgataaaaatattgattatcaattttagcaaaagctttagctttaccaaatcggctagattctccacctgctaaaataattgctttcatcttgatcaacccccactgaccggtggaatgagcgcaattgtatctcctggttgaactatatcatcctgtctgacgaattcttcattaacagctatttgaaattttttagatttaagttcactatggtgttttaataaatatgactcgaattcttgaacagttaatgtcgtatctaaatgtattgtttcagtagatcgattgagcaactcttttaactctgcaaaatataaaattttcatcttgctttccccttttttgcttcattatatgttcccttttgatgaccttgccattcagcaccatcttcccaaatttcctttttccaaattggaacaatttcctttatgcgctcgatggcgtattcattcgctgcatatgctgcttttctatgcggtgaagatactgcaattaaaactgcaatatctgatatttgtaatggaccaattcgatgtacaattgttgttattgttccaggccacttttcttcaatttctttaccaatttgagctaattttttctcagccattggtatataagcttcatactctaaatgttgtgtacgaatacctttagtccactctcttacgtgaccagtaaatacgactacggcaccttgacgttcgttaatcgtaaaatccctatattgttctgtttcaataggttgagtcacgatttcaaattgcttcatttaattcattcccttatccttaattaatttattgagtaagtgctcaagttgattacttgcacgtggatgattggtttctattttccctatgacgtgagaaagtccttgtagacttcttaattcatcattatttttataaacgataattttatcataatttgcttctttaaagccctcaactaaaatgatactacaatcaattgtaacagaattttctattatttctctaagcgattgtttctttttacgtgtcactgtttgctgtaaatgatgcccctgaacaatactttggtctgcgcccgcagcgaaatgtttcatgtggtcaacatcagatgactgtaattcaatttcttcaccaatatgcccgtgatgtttaattgttactactgaatagcctcgttcttttaaaaatgatatagcatggttcatcaatgtggttttccctgaatttttcatacctacaatttgtaaaatcatagtatcaattcctcttcaaaactattagattcggtcaaaatcacatcaacaatgttgcccgctttaaatccacgtgtgccaccaggaagcataatcatagcattagcgtgcgcaatggctacaactgcacctgatttattaaatccagatggtattactgtcattccagcttttgttaatgttgccttagcacgaatcaatcgtgtaaatgggttagctttattaaaatcttccataagtgtagctttgattatttgcggataacaagctttagctcccatgagcttatttacagcaggtttgacatataattcaaatcctgtatagcaggctgaagggtttccagataagccaaataaatatttaccatctgcaaatgcaaccgtagtaacactacctggtctttgagccactttgttaaatagtatctgtgcttggatggacttgtatatttctggtaagtaatcaaaatctcctaccgacacacctccggtagtaattactaaatcatgctctgataaagctttttttacaacctcaatactcttttcgagattatcatgctgaactttatacattccaacttgtattccaaattgtttagctaatgctttaatcattggtccgtttgaatttcgtatctttcctggttcaagctcatcttctacttcaagcaattcactacctgtagcaattactgcaacagttggttttcgagccactcgcactttagtataaccgtatgtagctaagactgctatcacacctgagttaatacgcatacctttatgtagtacaatatcaccagcttttatttcttcaccttgtagcgaaatattttctaaatgtttaaaggattttctaattgtaaaagttgtttcagattcaatagtttgttcaaacattactacggcatcagctccagaaggaatttgagcaccagtcattattcgaattgcttggtttttatcaattgttttttctgaaactgaacctgcaccgatatgatctattacttcaaattcaatacggttttcgccacttgcaccttgtgaatcttcacttctaattgcaaacccatcgtagggtgatttattaaatcttggtatatcataggtcgcaacaatatcttcagcaagaatatgtcctaaactttcatctaaattaatattgatattcttcacttcaacatgttgtttcataatacgtttaattgctt

SEQ ID NO: 4026 - DNA, 3456 bp, Artificial Sequence
  Description of Artificial Sequence: synthetic nucleic acid sequence
tcatcatatcattgaattcaattctaactctatttataaatactatttgtcaggttcattttcaacttagacactgacaattaaattattaaaaacatactaagattagctatgaagaaatctatgacgatagattttttcatagctattttttatagttatagagagaagtagactgtccagactcttggattttaaatccgtataaaaaacaagtcagctttactctcgccttttgaaattcgtttgtagtatgttgggttcttgaaaccgtgtataggaaaatgaaatgagaaaggttaagtaaagtttttagcttctcaattattcaaaggaggtttttttatcgattacttaggtgttgatattagtaaaagaagtagtgtagttgcacattataaaaatggaaaattccaaaaagagtttttcatccagaataataaaaatggttacaattatttactcaagtatttgaatgacttagaccacccacaactcatttttgaatctacaggtatctattcaagaggtatggaacgattttgttgtgtaaatcaaattaactatattcaaatgaatccgttagaagccaaatttaaaacgagcgctctaagatcatggaaaactgatcaggcagatgctcataagcttgcttgtttaggaccgacgcttaaacaaacagacagcttacctatacatgagttaatattctttgaattaagagaacgcgtccgttttcatctagaaatcgagaatgaacaaaatcgacttaaatttcagatccttgaattactccatcaaacattccctggtttagaaagattgtttagtagtcgatattcaatcattgcactcaacatcgcagaaatctttactcatccagacatggttcttgatatcgacaaggaggtactgattacacatatattcaattctacagataagggaatgtcaatggataaagctacaaaatatgcacttcaattaagggtgattgctcaagaaagctatcctagtgtcgatagacattcctttctagtcgaaaaattacgcttacttattcaacaattaaaacaatctattcatcatctcaaacaattagatgatgccatgattcaattagcacaacaactcgattattttgaaaatattcattcgatacctggtattggtaagctaagcacagctatgattattggggagattggtgatattaagcgatttaaatcaaataaacaactcaatgcttttgttggcattgatatcaaacgatatcaatcaggtcatacacactgtagagataccatcaacaagcgtggtaataaaaaagcgagaaaacttttattttgggtgattatgaatataataagagggcagcatcattatgacaatcatgtcgtcgattattactacaaactaagaaagcagcctaatgagaaacctcataagactgccatcattgcttgtataaatcgattattaaaaacaattcattatcttgtaatgaatcataaattgtacgattatcaaatgtcaccacattagccaaacgtacaatcaaatatagtttaacaccttattcaaaaaaattaaaatgaacggtttagttaagtaatgcttattttaattataagtacttgactaatcgtaggaaaaaggctgggacaaaaagttccaagataagtaaataaagacaatttctattgaaataatataggaattgtcttttttataattttttgatgattttcaactcgttgagctgttacttttcttatattaagccacgatgatgtctgaattcatcgaattcagtatcgggaattgtttctgcaatatcatttacatgtcgtgaaatatcatttgtggggataagaactgaagtttccattagtagagtatgttgagtcatgttatagtctttatacataagacacctcgttaattttgtttattggtatttattaaattatacgaaaggtccttactttttaagtatttcaaaataaaattacatataaacacaaagtattttggcgagactcttgagggaacaggacaagctgaagactacaggctgaagctgtcccctaagaaagcgagccaacaaaacgaagtattgtaaataaagatgccagtaaatgaatttatgaaaactcatttactggctattatgctagggaattatgtcccagcctcttttcagtttagttatgacgctgttcctcaatttcatctatcacattttgcatttgatcaatcatcaattcaaatccatgtgctgttgaatcatgatattcttttttcttttgcttatattctaatgttgttaaacgtctttccttttcaacaaaagagcgatagtaaaagaacatttgagttccgccattctctctttcaaagaactctacttcaatgacatcctcttcctcacttagtcctggcattccaatcgtcatcttgatatattcatctaaaactaactcttcatatgtaccttcaatgatgttttgtttaccgtttctactatcaatgatgcgatactttcctccctcttgaatatctgcatcaaatgatttattcgtgcgttgagtggtcataaaccatttttttaagatatctgtttttgtccatgcctcataaacgacctctggtgtatatttgagtaatctctcaatgtcgatttctacatattcattttccacattatattttgccatttcatttcacctactttcactcttaatactattttaacgtatttgagctaggtcacaaactttgagctctataaaattaaattatattaaataaaacttataattttagtgatttttaactttttaaattcaagattgagtgtatagtcttgtctttatcaatattttactgttattctaaattgtttgatactcaacttaaaaataaaatacagatggtgtgtatcaaagagtcattataaaactgtcaacaatcataagattgttgacagtcaatatatactatggggcatattttatttctttgacgattgatttaaacgaggtactcttaaaataattgctactaatccacaaacacctaataatattggataaatactatattgtaacattaggaatggggaaattccggctacacctgctgctgaaatcacttgtggactgtatggtaataatccttgaaaacacccaccaaagatatctaatatacttgctgatttccttggatcgacatcatattcatcagcaatatttttagctaatggtccagccataataatagaaattgtattatttgctgttgaaatgtcagctgcactcactaaactcgctatacctagttctgcaccacgctttgattttacttttgaccttacaaaattaagcaaccaatcaataccaccattatgttggataattcctactagaccacctataagcaatgcaatcatag

SEQ ID NO: 4027 - DNA, 3159 bp, Artificial Sequence
  Description of Artificial Sequence: synthetic nucleic acid sequence
gtacgtatcattgaatggtatgtatcaattacttgattctgacgcacaaacgtaataccaatttgaatgatttcatcataatccagttgatttccagttgtttctaaatcaacaactgcaaatgttgctattcccataatgtccgctcctcatttttgtgtttataaatctatatctgcactcataagtcgatgtaattgacctttttcatctttaacaataaggaatccatctgaatcaatatctatggcttcccccaaaaattgatgattattttcagtgaatttaagttgacgatgccatatatttgtagcgtgaatatattcttctcgaattgactcaaaagtttgatgtaaaaattgatcaaagcgatgtataatttgagttaataatgcagttaaaaaagtatatctattaattatactatcggaatgcatgcgtatacttgttgctttatctttaatatcctcgtcaaaatcactttcaacatgattcatatttatacctataccacaaattattgcttctatttcatcataatttgcaaccatttcagttaaaaatccgcaaatttttttattaccaatatatatatcatttggccatttaattgttacacgttcgttcgaaaattgttgaatagcatctctaatacctaaagcaataaataaattaaatttaggtatcatagaaaaaggtacgtcaggtcttagcactagtgacatccataagccttttcctttagatgattcccaattacgattgaatctacctctaccttcggtttgttcatcgctcaaaattaaaaaagtatctttatttccaacgagtgctctctttgcttttaattgtgttgaatctacagtgtgataaacttctagatgattaaaaaggccaagttcatcgagaataggttttacaataccgctataccactgatcaggtaatgaattcagttgatggcctttgtggtttattgacttgatatcacaaccatcttcttttaataggtcaataacttttttgacacctgctctagaaatattgagttgatcggcaatatattgccctgatatgtaatttgattgatgttcatacaacattctaatgacgtcttgactatattttgacatgtgcatccacccattctaatatttcttctttagtgttgactatttgatttgatatgactgcgatttctatttctctaagtgtatcttttagccatggtcctgaatttttattcgtatgattgagtatatctttaccatttattgccaattcttttctgcaatggataggtaatttttcatttgcttcgcgaatacttatttcattaatgattaaatgattggctgttgtaagcccattttgtttaagcaaatgatgtaatgataataggatttcaatatcatttaaattgtaatcatatactaatgttattaaagattgctttgactgtatcttaggcaatgtttggatgagtgtaacccattttttgatagttgctttttcttgattgctgattttcaaggtgcttaattgtatatcttttggttgttggacgattaagattgcaatccaaagttcaaatgtgatgggctcatctatatgaagatgagacatctcaaatgatttgaaaaaaggtatataattaaatgctttcatgttttgcatgacttcaaaactttgtttaacattgtttcccatgataagttttttaagctctactactacacgttcaacggataaatattgtatatctgaaatctgagaagacattgcatgtaatgtgtctgaatcaatttgaaaattaagttgtgattgaaaacgtaatcctctaatgatacgaagcgcgtcttctgaaaacctttcacttggtacaccaacagtacgaattactcgattgtttatatcttgttgaccattaaaataatcatacaaccggtaatttaaatccattgctatagcattcattgtaaaatctctacgttgaacatcttgatataagtctcttacaaaatacacttcacttggcctacgatgatcgatgtattcatcttcagatctgaatgtagtaatttcataattgtcattttgaaagaccacgttgatcgtaccgtgttctttccccactggtatggttttatcgaatatagattctatttcgtcaggcgttgcactggtggtaatatcaacatcatgtataggtcgttgcatgatgtaatcacgtactgatccgccaacgaaataagccttaaaacctttattttgaatcttttttaaaataggttttgcttgttcaaatatctcatgactcattgttgttctcaccttgttctagcatctttcgataatagttttcatattggtcagtaattaaatctgaactaaatcttgcttcaatatctttcagcatttgtgattgcattttttgatataactctggatttgataaaagtttaatagcatattttgcagcttgtgtactatcccctatatctactataaatccagtttcttcatgtctgatgacctctttaataccacctgcatgactccctataggtaagacgcctgttttcattgcttctaagagagttaatccaaaactttctttctcacttaagagtagtactaaatcagatagttggtagaatgcgcttacgtcattttgtttgcctaaaaagagtacgtgtgtttcaacatcaagttctcgtgctttatgtcgcatatcgattaattctggaccatctcctaaaagtatcaacttggatggtatactctcatgaacttttgcaaatgtctcaatcactgtatcaatacgttttacttttctgaaattagaaacatgtatcaataccttttcttcaggtgaaataccataacaatcttttaattcttcattatgccgagttgggaattcattttcccttataaaattatatatagggatgatttcctttttagtattgataatttcataagtttgctgtgctagagaatggctaacacttgttacaatatcactttgttctatgccaaattttatcgcgttttgtaaagtatggtcataacctaacacagttatatcagtgccatgtagtgttgtcataattttgacgtttttacctgacatttgtttcgctaatataccac

SEQ ID NO: 4028 - DNA, 2982 bp, Artificial Sequence
  Description of Artificial Sequence: synthetic nucleic acid sequence
tgatggttttatgcaagattatatagtaatgaaacctgatagagtagtcactttaccacaagaaattgatttgagtgtagcgtcgtatactgaattagttacagttagtgttcatgcaatagatcgttttcaatcaaaagcaataccacaatttgaatcattggggatatggggagacggtaatttagggtatatcactgcagttttactaaaaaaactatatcctactacaaaaataatagtttttggaaaaacattatataaattaagccgtttttcatttgtagatgaaattattcaaattgacaatattcctcaacatatcaaaattgatcatgcatttgaatgcgtgggtggtaaaggaagtcagcaggctattgaacaaattattaatattattaatcctgaagggagtatcgctttattaggagtgagcgaactgcctatacaagtgaatacaagaatggttttagaaaaaggtttaactataattggtagtagcagaagtggtttaaaggattttgaaaaaactattgaattgtatcgtaaatatcctgaagttcttaatcaattagcattacttaaaggtaaagaatttgaaataaataccatagaagatctcattacagcgttcgaatatgatatttctaacgcatggggaaaaacagttttaaaatggaatatttaaagaaaaggaaacaactatgacaaagcaaaatatatttatagatgacatttattgggaacgtgtccaactcttcgtcaaaggacattttgaaggagtaaaacctacaagaaatttccttcttagaaatctaacagaaacaaaactattaaatgccaatcatgttaatattcaagggtcaacttttgaggcaagatttaatattgctattttagaaaaaggtaattttttaggtacaggcaattatatattaatcaaccgacaagaagatgaatatgtctgccaaattaaccccaaatttttgaatgataaaaaaaatcagatgactttagaggagttaagagattacaactcacttgagacccaatcgttacaaaaaagttatttattaaaaaagtatggtaaaagtttccaaagatataataacaaagagattaaatcttacgtcattgttccggcaatatcccaagaaattaatgagtttatttttaaagttcaatataaatctgaaataaagaaaataagtaaacttaagcaattatcatacatattacataaagctttgaggaaaattagcttcaatgtgagagataaaatatatttgtcggtatttaacatttccaaaacagtatataagaataataaaaatcatgttttgtttacatcagattctagagcaaatatgtcaggaaattttaaatttatatacgaagaaatgcttaaacaacaattggacaaaaaacttgtcattcattctatttttaaacctaatatagcaaataggagatcgtttattgataaattaaaatttccatattttttaggaaaatctaaatatatcttggttgatgattatcatccgatgatatataaacttcaatttagagaaaaccaagaaatagttcaagtatggcatgctgtgggtgcttttaagactgtaggatttagtagaactgggaaaaaaggaggacctttcatagactctattggacataggaattatagtaaagcttatgtttcgtcaaataatgatattctttactatgctgaagcttttggaattgaagaacatagggttattccaacaggtgttccacgtacggatgttttgttcgatgaatcttataaaacacgcattaaacaaagtttagaaacaaaattaccaattataaaaaataaaaaagtcattctttttgcacctacatttagaggaaatggacatcgcacagcacactatcctttctttaaaattaattttgcaagattagctagttattgtgaagaacatcaagctactgttctgtttaaaatgcatccttttgttagaaataaattaaatatcccagcaatttatagtaaatattttttagatatttcaaattaccgcgaagtaaatgatgtattgttcattacggatattttaatctctgattattcttctttaatctatgaattttccagtttttaaaaaaccaatgcttttttatgcttttgatttggaagattatatttacacgagagatttttatgaaccttatgaaacctttgttcctggtaaaatagtgaaaacttttgatgagcttattttagctttagaaaataatgattttgaattagaaaaggtgaagccgtttttaaataaaaattttaaatataaagatggtaaatcaagtgaacgattagttaaagatttatttaacaaattttttcagtaaaagaatttaaattttctaatttatgataattgtaacaatgggtaaataataagttaaaaaatttatatcatagtgaagcaactcttaaactagtcatgtattgtaaattttcaaagtatagttaagtcatttcatttttagtaagttctagattagtgatgtacaatacgtattatgaatagagtcttttaaagaatatattaattaataaaagcacctaaagaaaaatagcgtttttaattttgaatccaattttagttttaatacttaaacaaaattcaatttcctataattgttatgcaaactataatacaatagtttatataactataattaatataaaaatcattttcaggagagaattaaaagtggaatggatattatttgataaagatggtacattgattgagtttgacagtagttgggaaaaaattggcgtacgtctcgttgatcaacttttagaaacctttccagtacatgacaaggaagcggcacatcgccaattaggtattatcgataaaaaaattaaaccagattctgttatgggatcaggttcattaggtgaaattatagagtctttta

SEQ ID NO: 4029 - DNA, 3760 bp, Artificial Sequence
  Description of Artificial Sequence: synthetic nucleic acid sequence
ttgtgacgtatccctcttgacttaatatattttcaatattcctaacttcgattcttaaatcttttaaatattgacttccttttgtgtcaatttcgttgtcatattcttcataaagattttgaattgtatttttagccgcgttaagagattcctcgacgtcttttaaacttttactacgctgttgattaagtttgtccaatcctttttttgtttcaatctgaatctttgtaattccttcatcacttgcatctttcactttaacaacgtaatcttctaaattatctaattgttcttgtatttcagtggctcgtgcattaatttgtctttttaattcatcaaacatacggatatatttaattttagttgcaccattaattttatttattattgcgtcacccacttcgaattcaaattcagttaaaactgcagttgatgatttatcgctatctacctgatttcgatggttaatcgaaatatatatttgacctataacagttgtattcgttgaagcttgtaagaattcaataggtatagttacttcaataacaccatttaaagggtcaataaaacgtacattttctactacttgattagaaccgttagaggactcaagatatatatacgtttcagtgttttcttcactaattaataaaggctttttgtttttagtcacataaaaccttaaaactgcagttttatcatctaagttataaaaaccgataccttcatcagatatcggttttaagtaaggttcatttttaacttcaattttaccaatcttttttaattccattatttttcctccccatttataacatttcttaaatcatcatcatatatagtattagggtaaatttgtgtgaacgtatcttctttaagattaccgtattctccagattttaatatctgaatggaattagcagaatgcgtaggagtgaacttcgcaaataatttaatttgtttgattgttacaataccagcaccttttttcttaacatctagtaccggcattactgtatcagtacgttttgtacctggttcagtaatcgtcgacatttgaactccagcagcagcgtaaatagggaaagttgtatttcctttgttgagtctatgttcaattgaaaataaattacgttttctacttttattaaatccaaagaatggatgataattctgaacaatattaggattaatccccactgtgacatctctatcaacgtttatagtcacatatccatagagctctacaaatccatttgctaaaactttgaaacgctgctgactcatcattatacgttgccattcattcctttctgcacgtagggtaatgacttcagatgttttattgttaaatctatcatcatataccatcactttaatgaaaggatctaatgatgtttgaccattttgataagattcaaattgtgccattctaaaaattacattacctacccagcgtactgaacgtctcatttcttcgggacttttcttttcaccgacacgtttttcatttatttctgaaagatatgacgttgttttatttcggattcctacccaattactaaaagatgataatgtactggaaccccaaacaacgaggtctccgttactttttaaattgttaataagatgagtcatattattatttttttgattggcccaacgcggataaaataaacagtaatcattatttactgaaataatatcatgcaaatctaagtgagcagttaaattatctatactttgaactaagctacgcatattttgtgattctttttcagaaaaaggacttttacctttgaagttagatttatcaggatctgtccctttacctgccttccagttataatcaaaatttctgtttaaatctacattgttcacattctctctttcttgatttgcgaatccccacgggttaaccataggaacataaattaaacgtacattttttcttaagtaagttaattgaggatacttttcccattgattgaccaatagattgagtatatggcacatatcaaaaaatccagtagtttcattaccgtgtatacatgaagtaataagtaacgttttattgtaattttgtggttcaaacgtaaatttgtacacattatattttcctgatgtatcttctcctataacttcttttgtaacgtattgattatcaactaaagggtttaaaaacgcttcaatatgggcttctggttcccaattatttggtgtcccattttctcccaatctatttcctggtatatatggaggattccaaataaaatcaactgcaccattagaatgtatttctttatctaattttctgttaattcctaaaaagtcatgaagcagcctttcttgcaacaagggatgtacggtaccatctattgatactctggcttgttttgtttcagctataccgtctccatttgctcctaaaacaagcccattaatattaccgttaagataatctaaaaatgcagaaacgtttgtatttctataatcaacctgcatggcttgatgtgcatgatgcttagtttctgtgtgtgcgcgatgctgatgatctaattcattataataattaagtattgttctaaaattatttatcatcttggttctaaatgtgtgtcctatttgaataggaaagtctaaagttaataacattttatgaacctccttttattccttctctaaatgagatattctctttttaagttcttcattttctttttccaaattttctattttgtctaagtaaacacctaaaccgatgactgcctctatgtgcgtgactggaaaatattcttctccatctctatcttgtagatatcttatcgatacttctttactcatcaatcaatacacttcctactgtttcgttatattcctctaacacatttaaagaatagtcactagttttgaatccttttttcataagattattaacctttcttaacctacgattgaactgtgattgcatttttataatatctttctgtgcattactgaattccacttcaataggctgcgaaacaagggggtgatattcagtaagtttgacaacttttaaatcagtattaaatccgataggtttgtgtataaatcgaatagtattattttcatgaatactttctaatcctaaataattcgttgctacttcgattgttggtatgtcatcaagtgtttcttttaatttcttctttaactctgattgacttgtaatattatcatcatatattgtaggggcttctgatttaccatattgcttataatatggagacttatattcagcatatacatgataaatatctttacctttaagaactgcagttagatttaaaacactacttttactcgtaccaacatacatgactggattagacttcttataatcaataccaggttttttcgatttaaaaactcctctaaaagaatgtttaccttttgataatcctttagctaaaatcactttttgcgtcgaagcatgagcgctgtaacaatcaaaagtccctttcgacttatcatcaataaatacttcgataattccacctttaggtcctttttttagattccaagttaaggtttcattcccccacttacaatcaaatgtcttataaaacgaatctcctatatgttcagtagaccaagtcccttctttattaaaatttccagagtatgagaaatctttaggttttataggtttatagtttttcgtttcggatttcgactttttctttccatatccttgaatgtaggtgcgtaattcagt

SEQ ID NO: 4030 - DNA, 3442 bp, Artificial Sequence
  Description of Artificial Sequence: synthetic nucleic acid sequence
gctggtaagcaatatggtgtacacggtgaaaacttcatgattttacttgctagtcgtttagatgcagttgtttattcattaggtttagctcgtacacgtcgtcaagcacgtcaattagtaaaccacggtcacattgaagtggatggtggacgcgtagacatcccatcttactcattaaaacctggtcaagtgattacagttcgtgaaaaatcacaaaacttagatattattaaagaatctgttgaaattaacaatttcgtaccagaatatttagacttcgatgctgacaacttaaaaggtactttcgttcgattccctgaacgtagcgagttaccagctgaaatcaatgaacaattaatcgttgagtactactcaagataatcgacttctatttttacacccaattccaatcttggatttgggtgttttattttatgtaaaaatttctatctcattttggtttttaagtatttaaatgtatgatgcattttgtttaataaaaactgggatattaaataatattccagtttttattaacaataatcaatactcaacttaattgaaaatacgctcttatttattactttttgaagtaactgatgattgtacgtattgaacttcgcgttctatacctacatttcctctcattcttatagctcaaataaatcttcaggtacatcggaaataataccgtcaacaccaatatctattaatttttgtgattcttttaatttatttacagtataaggtaatacttttaactcttcctcatgagcaagttgcataaatttcttcgaaacaatttgataattaggattagcataatcagcaactttggcaatttttttgaaatttggtaacttgtgccaatattttttcttactaattaataaacctaattcataatctaaattcattgctgacaatttttttacacaatcaaaatcgaatgattgtaaaatcactttagatttagatatttgtctttccttcaatttatcaacaatcatattttcaatatttggatactgactaggcttttttatttctattaataatttttgtgaaaagttatctgctaaatctaacacttcatcaaaagtcggtatactctcccctttaaatttctctcctttatagaaaccaaaatctaacgcttttaattcttttaaagtaaaatcagaaaccttacctttaccatttgacgtacgatcgatagtatcatcatgtataacgacaagttctttatcttttgtgtaatgtacatcaatttccaacatatctatatgtaacatgagcgcatgtcgataagcgataatagtattttcaggataatcttcaggtaatcctctatgcgctacgatttggaaatgttgatttggacgtcgaaatttcatcaaagtcacctttcttttaaacttatttaatttgccctaaacttaaattaccataattaaattggaggtcaattcatatggttagacatgattttaaagttaaaactgaatggctaggtggacgcgaagaagtaggtaaacttcgaggagatattatcaatgaaaatatatccatcccctcttcactcggtggccaaggagaaggcacaaatccagatgaattactagtaagtgcagcatcatcttgttacatcatttcactcgctgcaacactagaaaagagtggttttactaatgtaaaaattaatcaacagtcaataggtacagcctcgtttgaaaataaaaaatttaaaatggaacgtattacacattatccctcaattaaagtaccctcttctcaaacagaaaagcttaaaagtattttagataaattattagtgattgcagataataattgtatgatatctaatgcaatacggaataatgtcattatttcaattgaacctaatttaatataaatcatatagctatcacaaattttaaacatgtaaacgttttaattatgtgatagctatataataagggttttaaatattcagaatttttgctaaaataaataaatcttattatgggaggaatgtacaatgcagtattaccaacctttattattaacacctggaccaactcctgtaccggaacaaatcttgagtgccgtacaattaccaatggtaggtcatcgttctactgactttgaggaaattgctagtgaagcatttaaaggtttaaagccagtatttggtagcaaaaacgaagtacttattcttacatctagtggcactagcgtattagaagcaagtatgcttaacatcgcgaatcctgacgatcatattgtgataattgtttctggtgcatttggaaatcgctttaaacaaatcgcacaaacttattataatcatgtacatgtatatgatgttaactggggtgaagctgtaatagttgatgactttatcacttatttaaagcaattaaacgttccagtcactgcagtattcactcaattttgtgaaacatctactggtgtcatacatccagttcaccaattaggtcatgcacttaaagcttttgataattccttatattttattgttgatggtgtaagctgtatcggtgcagtggatgttgatttaacaaaagataaaatcgatgtattagtttcgggaagtcaaaaagctatcatgctaccaccaggtctagcatttgttgcttatagcgatagagcaaaaaaacgatttgctgatgtaaaaacaccgagattctatttagatttaaataaatacataaaatcacaagagcaaaattcaacgcccttcacccctaatgttggtctatttagaggaataaatgcttatgtagaacttgtaaaaaaagaaggattaaatcacgttatttcacgccattttaaaatacgtaatgccttaagagcagcactaaaggcacttgaattagaattattagtaaaagatgatgctcatgcctcacctactgtgacctcatttgttccaaaaaatcaagaagaacttaatatcattaaaaatcaacttaaatctcaattcaatataactattgctgggggacaaggacacttaaaaggacaaattttgagaattggtcacatggggaaaatatctccttttgatattttagcagtcgtgtctgcattggaaattattttaacttctaatagaaatgtcaattatattggaacagggataactcaatttatggaggttattagacatgagtcataagatattagtatcagacccaatttctgaggatggtttacaaagtattttaaaacatccagaatttgacgtagatatacaaacagatttatctgaaaatgatttagtaaatatgatttcaacttatgatgctcttatcgtacgaagtcaaacccaagtaacagagcgaattattaatgctgcaacaaatttgaaggtcattgcaagagctggtgtaggtgtggataatattaatataga

SEQ ID NO: 4031 - DNA, 3220 bp, Artificial Sequence
  Description of Artificial Sequence: synthetic nucleic acid sequence
tgatttatagtttttaacatgagttaaagtattaaacaagtgcgagtcaaaatttaacaattattgtaaagtttataatcaataaagataaaaagagtggagcagaatccatctaaaatgaattccgttccacttcatagttattaaatatcataaacttatatgcgtacattttcaattgatgtcctactttctctgaaaatgctacgcatttgaaagtttatttacctaagcgttgatttttacgatttacaaaagtttctttggcatctttaatagaacgttctaattcaggattattacgacgtatttcatctaatgtatctttccaatacattacttcatctttgatgctacttatttttgaaggtttacgtgtacgatttccttctttgatgtctttgaatgattgttttaaagaatgacgtgtagatttatcagcaagagcagccgcgccaccaattacggcaccaattaaaataccaggtactaatttattttccatagttgaattacctctctttcaaatttgcatcttttacgatgtagtctattaaattatcacaagatgattgcaccatctcgaaaacaccttcaaaattatttgtgtagtatggatctggtacatcactctcttccatgttactaaattctagcaatttgaacaattgtccttgtaaatttggattgatttgtttgatattgtctacgttactttggtccatagcaataatatagtcaaaatcatcatcaggttcgaaaagttcactcaccataccatcataaggaatatggtacttctgtagaattttttgtgttccgttatgtggaggttcgcctaaattccaacgtcctgttcctctagaatgaacttttatatctgaaatacctctttcttgtagtctttgtctcatgatagcctcagccattggagaacgacatatattaccgagacatacaaatgctacatgtatcattagtatcactccaaactatgtatttatatgcccattttatatactatctaaacaataagaaagtacttaacctcaaattctatcaaagtttaacaaactatgataatttgatagaatattgaactaaagaggtgaattaaatgtcattatctaatgaagaaatgatttctaatataagacaaaaattaaatattgtaaatcaagcattacttaatccggaaaaatttaaatcaacacctcatcaagacataagcgaaatatatgaattcgtaatgtctaaagattcattctcgcctagtgaggttacggctattgctgaccatttaggacagcttagacaagatatggaggattaatatgacgaattatcataataagttaaaacaatatgcagaattattagtaagagtgggaatgaatgtacaaccacagcaacctgtttttatacgttcatctgttgaagcgttagaattaactcatttaatcgtcgaggaagcatataaagcaggggcagaagatgttcgagtgagctacacagacccgaaattaaaaagattaaaatttgaaaacgaatcagttgaacactttgaaaaacaagaactcaaacaatatgatattgaagagcgtctggattatgttaatcgtggcgcagcgaacttggcgctcattgctgaagatccagagctattaaatggaatagatgcgcaaaagttaaaagcgtatcaaactgtatactcaaaaggatttaaaccatatatggaagcaagtcaaaaaaaccaatttccatgggtagtggctgcgttccctactagggattgggcacgtcgtgtctatccagagttggatgttgaatcagcatatattaaattcattgatgaagtatttgatattgttcgtgtagatggacaaaatccaattgaaaattgggaaaaacacattaaagatttaagtgttcatgctaaacgattacaagagaaaaactatcaagctttacattacatatcagaaaattcatacatttggttttgaatattaataccttcttttttactaccgtcaagattaaatatattatccattacattacctccattacttaaactgtttctttgctctttgtatttcaaactccacatcttctatatcgcaatctctcacgtacttagtaaacagatacacattcgtatatctctgtgcgtctaactcctgacgtaacactgtattgttacctattgctatgagtagaagtatgccgagtataatggttaatgctatccacatcacttatgttcccccttactctttatacatatacatactagatacataactggaataatcactatccaccaagtcatttaaatacctctttccataattcatttaaatgaacgtgatccttctcgtcgaagtccttaggtacttccacctcatcgtttgcagttaacttgtaataaacttctctgccaatccatttacctaactcatacatagcgatagtaaaccatatctttaatatgcgtttaatcattccgttcactccttaaagtgtttatctaagtctttagtaatatgtctatttcttttatagaattcttcacgttgttctttcattctattttcaaattctttttctttctctatccattctctatttcgtatttctctgaattctttcagtcttttcttatctttagtaaataaaattatcatgcaaacatgagcaactacattaacaagtgctacaacaatcaaacacatcatggctatccaaacaaagttaattgaatctagtgtcacttccctagcacctcatatgtcttttcaaaaatttctggtttaactggataaaattctccgtttacacccttaacgatataatcgccaacatcggctatcatttccccttctaaagtatttataagtaaataacctttagtatttttgtacttaaccttagacctcgcccataacaatatttctaatacactatctttgtctgtaaattgtataaactcaatttctacaggtttctttctagcttttttaacgctcattcccactcactccttacctagtactcttttaatctctgctactatatctttattctcctgtgcttccatatgcacctctgtcgctttcattttcaaaccaatcaacctgtttgggtgtaggatatacaactggcgctacaactaattgcgctaatctttctcctttttctactgtgatatcttcat

SEQ ID NO: 4032 - DNA, 3475 bp, Artificial Sequence
  Description of Artificial Sequence: synthetic nucleic acid sequence
agttgctccatcaatagtacccaaataactttgtaaaatcaccatatcttcaatagtagcaccttcacccccatactctacaggcaaagttagtttagtatatccttcctttatcagccactcaatattttcatatggaaatctagattgaatatcattttcagctgcgcgtgctttgaattcactttcaatctttttaaatttacgaatccactttttttgaatgtcagtgtgaattaaaaaagactccatcacatttacgccccctatgactcgttttattttaaatttaattattcatagtttaacactcgactttattttttcaaaatttactaattgtacttcatacgcatttccctctgatattgaaaagttaacaattaatatatacataacttaatctatgaatgtatctagatagtcaattttatttcttttataaattttaaatataaaaagcatcgccacattcataatgtagacagatgctttttagtagaattttgattttcaaatacgtttaaactttatagagtaatgctaaaattttggacataaaactcattgaattaaaaatctgatctaaaacagttgcgactataaatttaaaaataatcacaatgtatcaattaaggttaactcaatttttaaattttaatattttcattttttatgcattatttatacagattgatttttaattcctgcaaacaacataatccatgtagcaaaaataaatggccatgttaaagttggtaaacctaatggtgcgagcaatgtgctcaaacctaaatgtatgaatgcagtgagtactattcctaaaatcattgcgagataactatggattgctgtctcaaaagtgacacctagcgcaatcgcagataaaactacattatagccaaatatgccttcatttatactactatagtctccacccagtaatataattattaggaacccaataatgtttgcaattatagaaacaattccagcttttttagaacctataaaaatccctattagaattaacaaaccacctattatgctgggcattaaaaatatttgtccaaatccatctaaaactgattgaaaaaaatgaacacgggtgtggtcattatttaaagataccttttctatatgctccggaataatatcaatctgagtatgtaacgttttaagttgattaggtattaataaagtaatccacgtcataataacatacggactagttagaaacgctattttatgtggtttcaatacttctctaaccgctgctccaatcggtagcgttaaaatagtggctacgaatgtgattaatataccgctccaattgctatccaaaaataaagtaagtgcaattgcggttaatacagggttaaatccggctaatccactttcgatttcttcttttgtgtaattcatatatggtgccaatatccaagtcattacacttgcaatcattgcactgattcctactttccaattcactgcgaacagtccaattaaaatgaataacccagtatatggattattaattaaaaccacttgagagatactacttaaaattacttttatcaatttcaattttatagcctccttttattcactacattaattatttaataaagacagttttcaaattaccattaaatattcatcatatcaattacattttactaaaataatgtttatgtacgctggatatttttcatatttattcaactttatacacttaatttaaaaaaacattgttaattagataaaattatcaaagtattatacttgtatacttcattaaatagttttaatataaaatttgcaagacaaattaatatgaaagaagggatagttttgcactttacacaacgtgaacaagacaaattgatgatagttgtagctgctgaggttgcacgtcgtagaaaagcaagaggacttaaacttaatcatcctgaagcacttgctttaatcagtgatgaattattagaaggcgcgcgtgatggtaaaacggtagctgaactcatgagctatggaaaaacaattttaaacgaggaagatgtcatggatggcgtagctaacatgattacagaacttgaaattgaagcaacttttccagatggtactaagttaataacagtccatcacccaatcgtttaaggaggctatatcaatgattcctggtgaaattattgttaaaaatactgaaatagaagtcaataaacatcatcccgaaacggtgattgaagtaaaaaatacaggcgatagacctatacaagtaggttcacatttccactttttcgaagcaaataaagcattagaatttgatcgtgagaaagcatatggtaaacatttggatattcctgcaggagctgcagtgagatttgaacctggagatgaaaaaaaagtacaacttgtcgaatattctggacgacgtaaaatttatggattccgtggtttagtcgatggcgatattgacgaagaacgcgtattccgtccaaatgattcaaatcaaaacgccgccgttaaaaacgatgcaggcgaagacaatgcgaataaaaaaggtggtaaataagcatgagttttaaaatgacacaatctcaatacacaagtctttatggaccaactgtaggagactctgtgagattaggagatacgaacttgtttgcacaagttgaaaaagactatgcaaattatggagatgaagctactttcggtggcggaaaatcaattcgtgatggtatggctcaaaatcctaatgtgacaagagatgataaaaatgtagccgatttagttttaactaacgcattaattattgattatgacaagattgttaaagcagatatcggaattaaaaatggttatatttttaagatcggtaaagctggaaacccagatataatggataacgttgacatcatcattggtgcaacaactgatattattgctgctgaaggtaaaattgttactgccggcggtatcgatacacacgtgcacttcatcaatcctgaacaagctgaagttgcacttgagagtggtattacaacgcatatcggtggaggaactggtgcttctgaaggtgctaaagcgactactgtaacaccaggaccttggcatattcatcgcatgttagaagcagcagaagagatgcctattaatgtaggatttactggtaaaggtcaagctgtcaatcatactgcacttattgaacaaattcatgcaggcgctataggtcttaaagtacatgaagattggggagctacaccttcagcattaagtcatgcattagacgttgcagatgagtttgatgttcaagtcgctttacatgcagatacattaaatgaagctggatttatggaagatacaatggctgctgtgaaagatcgtgtattgcatatgtatcatactgaaggagctggtggtggtcatgcacctgacttaatcaaatcagctgcatattcaaacatcttaccttctt

SEQ ID NO: 4033 - DNA, 3591 bp, Artificial Sequence
  Description of Artificial Sequence: synthetic nucleic acid sequence
cagtttcttggaggtcctgacttatatacccaagaacatggtcatcccatgttaaaacgaagacatatggaatttacaattagcgagtatgaacgtgatgcatggcttgagaacatgcatactgctattcaacacgccaaacttcctgcgggtgtaggcgattacttgtttgagcgattaagacttactgcaaatcacatggtaaattcctaaatttaattgtaggtgaaaatacatggctgaagaattaagaatcatggagaataagagtcgtgaagatactaatctatcacctgttagcaaaatagaaatctattctttttttgatccttttagcaaagattgttttaaattatctgcaatcttatcaaaattaagaattgaatataataaatatataaaggtaagacatattttaaacccttctttaaaggtattaactaagtgtcaagctcaaagtacttcagattttgacaatattgcacttgcctataaagccgctgaacttcaaggtcgtatcagagcagaaagatttatacatttaatgcaaaatgaaatcattccaaaacgtgatattattaccgaagatatgatttctgattgtattaataatgccggcattgactatcaagtttttaaagaagacttgcaaaaggacaagttgactgacagcttgaaagttgatcttcacattgcaagagaaatggaaatagaacaagctccctcacttgtttttttcagcgaaaatgttcatgaagaaggtttaaaagtcgaaggattatatccttatcatatttatacttacattattaatgagttaatgggacaacctatagagaaaaatcttcctccaaaattagaatactacattcaaaagaaacaactagtaacaatggaagaacttttaacgatctatgaatggcctgaaaaattgctaaataaagaattaaagaaactcacacttcaacaaaaagttgaaaagttgcaatatccagagggagaattttggaaatctaaaatgcctcagtgttaatgatagatatgatgagagctatacaaatttcattttgaaaattatatcttaattacgatagcgtggactctcgagtataaaaagaagaattcacatttatgtttaactcagttatctataatttaaaaaaatcgcctatgacgtgaatagttgtcataggcgatttttaatatttactgatttattttttattaaaaatatacacaataatgtatatatcatgtatagcaataatttttaaattcactttaaaaatttgcaaataaaaaaacgccgtgtctgattacacgacgctaaacaaaggggatgggagaaatttttcacttcaaacaaaggggtatgtttgttatgtgattaatttcatgttcataatataacacggtaaaatatccttttcaacccttgtttattcataaaattaaattgtcacaatctgttcatattgtaagcgaattcaattctactaagctttcattaacttttcaaaagcatctaatttttgttcgaatacttcacaagcttcctctattggttgaggtgttgtcatgtcaacacctgcattttttaaaatttcaatcggatagtttgagctacccttttttaagaattcattgatatatcgttcaacagcaggttgaccctcagttaaaatttgatgacttaaactttgagctgcactataaccagttgcgtattgatatacataataattcatatagaaatgaggaatacgtgaccattctttactaatatcatcgtcagtttctactgcttcaccaaaatatagtttgttcagtttagcatattcttcattcatacgatttggcgttaacggctccccagcttcttctatttgatgtattttatgttcaaattcagcaaacattgtttgacggaatagtgttgctctaaatcgttctaattcttggttaagtaacaatagacgtcgttcatcatctaaatgtttgtccatgtagtcactaagtaaagcctcattacaagttgatgctacctcagcgacaaagattgtataatcgcttaaatttgatggttgattctgtctactaaagtaactatgtgcagagtgaccaaattcatgtactaaagtatataaatcagaaacagtgtctgaccagttaagtaaaatgaaaggattagttaaatgtccaccggatgaatatccgcctgaacgtttacctttattttcatatacatcgacccaacggttatctagaccttccttaaccacgtttaagtattcttctcccattggctcaagtgcttttaacatccaggattttgcctcttcatatggcatttcaaatttgacatctttaacaagaggtgtataaagatcatacatttttaaatcgtctaaacctagtaactcttgtctaagcttcgtgtatctgtgtaataaaggtaagtatttatggaccgttttgattaagttatcgtaaacagcttctggaatatgattattacttaaagctctttcacgtgctgaacgataatgatgagttctagcattaaatacatttttcttaacctcaccagctaaagtagcacctagcgtgttattatgcgcaccgtatgctttataaacatttctaaaagcagaagctcttaactcacgatcatcagactctaaatacttgataaatgtaccttgtgttaaaggataagcttgaccatctttatctatagcatcttcaaattctaaatctgcattgctgaacattccatatacattagaaggcgttgaaagtgcgtcttgtgcttctgttaataacttttctgtattcgcatctaatatatgtggacgtttctcattaatcaatttcaaatcgaattcatatcgttttaaatcatcattagaatcgataaaagattgaatagtagcttcatctagttgtaaaatttcaggtactaaaaaactccatgcagagctatatttaataacaagttgatgtgcacgcgcttctaaaccggtatatttatcatttgcagtatcttgatcttgttttaaatgtgcgtatacatataccttttctaattttgtacctaactcgtcttcaagacttagcgcttcatataatgtttcagcactttcaccaagatgacctttaaatttttcttcttcacctattttagcttcaatacttttaaaagcttcttcaaatgcttcatcacttttaaaaatagttgttaaatcccatgtatattcaggatatttacgttcctgttcttctcttgttaattgttgactcataatgtaaacctccttaataatctgaatagcttaattttctcattttagcactacttttgcacgtttaagctttcgtgttcatataaataatcaaattcacgtaaaatagtgcttaatatttgacgtttgtcgtattgaaacgttgcaaacaccctaaacttcacttgactaagaagttgtttacataattcgttgtcatttaatgttcttcttagcaacaaatattttaattgccattctattggatgcgttattaaatatatttgatgtggtacaacatatccta

SEQ ID NO: 4034 - DNA, 3150 bp, Artificial Sequence
  Description of Artificial Sequence: synthetic nucleic acid sequence
ccatgtctggatgagtaaagatttctgcgatgttgagtgcaatgattgaatatcgactactaaacaatctttctaaaccagggaatgtttgatggagtaattcaaggatctgaaatttaagtcgattttgttcattctcgatttctagatgaaaacggacgcgttctcttaattcaaagaatattaactcatgtataggtaagttgtctgtttgtttaagcgtcggtcctaaacaagcaagcttatgagcatctgcctgatcagttttccatgatcttagagcgctcgttttaaatttggcttctaacggattcatttgaatatagttaatttgatttacacaacaaaatcgttccatacctcttgaatagatacctgtagattcaaaaatgagttgtgggtggtctaagtcattcaaatacttgagtaaataattgtaaccatttttattattttggatgaaaaactctttttagaattttccatttttataatgtgcaactacactacttcttttactaatatcaacacctaagtaatcgataaaaaaacctcctttgaataattgagaagctaaaaactttacttaacctttctcatttcattttcctatacacggtttcaagaacccaacatactacaaacgaatttcaaaaggcgagagtaaagctgacttgttttttatacggatttaaaatccaagagtctggacagtctacttctctctataactataaaaaatagctatgaaaaaatctatcgtcatagatttcttcatagctaatcttagtatgttttatttaggaataatatgatgttcatacttcaataaatataaatcatacgttattgtatccaagcatttttaacttattccaaatattttggaaattggaccccaaggtaaaataacaccaatagccattgttattatgattaaaataatagtaatccaaaagaatttatggctagtctgttgtttttttcttttagcaatggaaatttccataaaagcgataacagctaaaccacataacatttttaaagtaagtagcatatgatttccaccttcaccattagaggcagccataaactcttcgattaattcccaaaaaccagaaattaatgttaatagcatgaataatcttaatgccatatgcaaaggtttataataaggtgatgcaccttgcgtttttgaataatttaaataagttgcgataaataaaataattgctaatacccaacttaaaatatggacatgtaacatgtttgtccccccatctttttatttctaaatcatcataacatatttctaaatatttgatgatgccattacttcaatttttatcaataattaaaataataaatattttgataagtattcaaaaaagtctagaatacaaataatatcccagacttttttaacgaatagtcattcgatgactgaattaaaaatgtattaatatcaagtttttgaacagaaattttaaaataagcaaattaaattccaacgctcaacacatagaattacactaaaaattctacagacaaagcaagttagggcttagggagtaacatatttactacactcccccctttaactttttaaaaaattgtataactcttaatttttagatatatatgttgttaaagtgccaatattatctatagttactttgacttcatcacctggttgtaaaaattgtggtggttgtaaaccagcacccacaccagcgggtgtaccagttgcaatgatatcgcctggatgtaaagccacatattttgaaatcttttcgatgagttcatctatttttaaaatcatctcaccagtgttgccatcttgtcgaatttcgttattcacttttgttacgatatttacattctctggcgcaggtaattcgtctttggttactatataagggcccattggacatgccccagttaaactttttgataagaatgcttgatcatgtgaactttgcgcagtacgatctgtaatatcattgataattgtgtatccataaatataatctaaagctaatcctctaggaatcttttcgcctgattttccaattacaattccaagttcgccttcatagtccaattgttctgtaatatctttatgattaggaattgttgcttcatcaccagttaaagatgaagccgctttagtaaatacgtataaactatcaacttcatgatttaattcactagcatgatcttcataatttctaccaaatgcaatcacattatttggaggtgtcactggtggtagaaaatcaatatcagtgaataaaagtttaaattcctcatctcttccactttcttctgctgcgacaactgcttttcgaacttgctcttgaaagtctaaagtttgattttgctgtaaacctgcaattaaagttttaggattaaagtctttgtccccaaactcagcaaaaaccattggtaaatcccaaacagcatcttcacgttttactttaacaccatatgaagttctgtcattatgtttgaatgatagaaatttcattcataatcaactcctcatctatatcttattacatattataactatatctaagttcaaataacaaatatataagtaagaaaattaagaaagtttatttgtaagcttaataacagacatatatacagtgaagccgtgttttcttggttaggatgaaaacacggcttattgtttctcactttatcaaagtaactttgaattttaatcatctatttctaatgtaccaaatttgaaaaaatataagtaaccctttacgggtcgtttaagtatggtttctaaagtatttcgataatacgtcatttgtatctgatatttttctttgagctgattccctatttcttcatcactcataccttttcttctattaaaagcatctgttttgtaatcaacaaagtaaaattgtccgtcactttcatatattaaatcaatcataccttgaataatggatacatcttcatcttcacttgtaagtccatcaactttaatttgatttaccacaaaaggtaattcagtataaacattgtcagcttgagctatttccatatagagagggccatcaatgaaatgcataatctcatctattctaatatcctcttttgcatcttcatcaataagttgtttgt

SEQ ID NO: 4035 - DNA, 3633 bp, Artificial Sequence
  Description of Artificial Sequence: synthetic nucleic acid sequence
ttaaaaaatcttcactttccatacccacatcttgaacttcattataatttttcaatctaaaacatcttctacagatgacatcttctcgaaacatattatgttctggaacatagccgggtgcgtctttattttctgactgtaggggtgcaccacatccaatacattttagtatttcattcaatcaattttcctcccatttaatataacctttttttctaaaatgatttaataatcgtctttcaattaatcgattaaactttgtaattaatccatcagtccgtttaacaggtactaccataattgtatataaaccattacaattgccaccaaacacatcagtaagcatttgatctcctacaacaacggtttctctcggttgaattttcatttttttaatagccatcttaaaggctttccccatcggtttacgtgctttgaatatataatctacacctaaattacttgagaaacttgatactcgacttttattattatttgacacaattgtgacagttattcctaaatctttagccttagcaaaccatgatttaacacccttagtaggttctttaacatcccaaccaacaagtgtattatctaaatcagttatgatacctttaacaccactatcggcaagtttttctatatcaatttcaaatattgatttcacatatgcatttggcataaataatttttttatgattcccactatcttttcacctttacctttataatgattctactaataatgaaactgtctcactagatgataaagctgctttatctaaaaattcttcaaaagaaatatcggctttaccgtttgctaaatcagaaacagctctagttacgataaatggtactttaaattgataacatgtttatgtgaaaacgttagattcacaatcatactatgatacattatggacgaaaaaagactatgatttgattttctatagaacgtattcagatgcattaatgccttacaactttatgagttcagtgtttaaaaataatgatggtcaaccaggggtgttagctgatgatgaaacattaacgaaacagctagacgatttcccatcaaccgtatcaaaagaagaccaacagtgttcatttgatgacatatttaaacactttaatcaacaatactatggtgtgccaattgcttatccaaatgagacgtttgtagtgagtgataaagtaaaacaattcaaattctctggacttacggatgcaccaattgattataaagcgttgaaagttaatgaatagcaatgctcaaacgtacaattaaattcatactttatttaatcgtaagttcgtttattatcttcattttagttgagaagacatctggtaatccagcgattctgtatctacaacgtcatggttatacgtcgattacgcaagacaatattgaagcggcacaacatcaacttggcttaggacaacatgtgttactaagatatatcgattgggttggacatgcactcacgggcaacttaggatacggctttagtacgaacgaagcagttaccgctatgataatggaagccatcgtgccgacgcttgtgctaatcattgtctctagttgtatcatgttgccatttggctatattgttggttacttcgttgggacgcgtccgcatacacgttacgctaatggaattcgtggattcgcccaagtgatgacctcaatgccagaatactggttagctattttattcatttattatttaggcgtacgttggcaattgttaccatttgtaggtagtgattcatggcaacactttgtgctgccaatcttcacaattgttgttatagaagggtgtcatatcttattgatgacagcacatctgattacacaaacgttagatcaagatgcgtatcaactggcgcagttaagacatttttcgttaaaagcgcgtatcatcgtacaaattaaagagatatttgcaccactaatgacgatttcaattaacagtatcattcatttaattggaaaagccgtaatactagaagtcatcttcagcatgtctggtataggtaaattgttgattaatgctattaaccaacgagattatccactgattcagggcattgtcatctttatcattgtctttattatgctaatgaattatttaggcgatgtgattattttgaagaatgaacctagacttcgacgacgtcatacccagcagtcaggcaatgagaaaagaggtacgatgtgatgaaaaaatatcaaacgtacatcgcaataggttcactattgagtttgatggttgtattaattacgtatggtttaatgcaagacacgcaacatttgaacccacttgagtcacctaatggacaacattggttgggtaccgatcaattaggcagagacttcttagtaagactgattgtcggtagtcttgtcacattgagtttaacaggcatagtgattctattaagcgtttgtatgggacttatctttggcttaattgcaggcatagaaagacgatggttagatcaaatcatcatgtttgttgccgatatgttgctggctattccgtcatttattatcgcattagtcatcttaagtttagtaagtaactccatgataggtttgatacttgctttaacgattggatggataggacgttatttacgttacttcagaaatttaacgcgagatattcaaaaacgtccatttgttcaatatgcacgattgagtgggaactcaacattcaaaacgacagtaacacatgtgattccacatttattaagtagtatattcgctttggtaacggctgactttggcaaaatgatgctcagcatatctggacttgcttttctaggactaggtattaaaccgccgacgcctgagttaggaacaattctttttgatgggaaaagttatttcaacggcgcaccgtggctcttcttcttccctggtgtattgttaggaggtttcgccttattatgtcaaattatcaacaaaaaaataacgcagtaaatacggtagtcaacgtcaatcaattatcgattttagatcaagagaaagtattgttaaaggatgttgatttgacagtaactaaaggtgcatttcattgcattataggtgaaagtggcagtgggaaatcactgttaacaagaacaatacttggaatgaaacaatcacaattatgttatcaaggagatattgacatcgatttaactcaaacagatgcagtgtttcaagatgttcaaagtaatatgtttcaaaatataacattagctaagcatttccaatacatttatgaagccaatcgcacacatctcactaaacagcgtattaaggaagatgtcttacagatgatgcaattacttggtttaagacaaggggaacaattgcttgagcgttatcccttcgaacttagtggaggtatggcacaacgtgtcgcctttataatgtcattaattagacgtccgaactacttatttttagatgaaccaacgagtgcacttgatcaagaaaatattaaaaagtttatgcattaccttcttagggcacaggagcgctaccaaatgaccattgtttttatcacacatgatattaacttagtgaaagattgtgccacacatattagtattatgcagcaaggtaaattgata

SEQ ID NO: 4036 - DNA, 4136 bp, Artificial Sequence
  Description of Artificial Sequence: synthetic nucleic acid sequence
tgttgatgattgttgcctttggttttatcgcttcattcgtcgattctgtagttggtgggggtggactaatttcaacccccgcattacttgcagttggtttgccaccatctgttgctttaggtacaaggagtttagaatcactaaaagtttgatataagtatttttgagttagttatctctttataaaaaaatatgaaagcctaggcacagctgttgtcctaggctttcataatgtgtatatggtcaattactgaattgaaaatgtactgatatgagggttatttcataatgaattaaaagtcacatcagagagaatttcactcagttcattttacgaattatgtaggtaaagaatctttacccgagtggaacgacgaattcatgttaaattctgtctaagctacttcgacttattatgttcatcataaataactcactgttatgaaaagtgttagatttaaaatctagtgaatcaaaattagatagtgtccaagacttttataatatttgatttaaaagtacaagttcttatcagtaatacaattacgtttaataactgtctttgtgtgcttctaataaaatcaatacaatgataaataaatttttaaagccaattgtttttacgatatttccttttcacactgaacccaacaccaaatgttgcaatgagaagtataaatgttaaaatcatcattggaacattagtagcacctaatgcgaaactaaataaagttaaaaaaatgacagccaatattgagaagatccagaaaatacctttagattttttttgttgcatcccataccccaccttttacttatcttttcaataatatatgatataataaaacagttgcaattaaaagtgggagtatacacaagaaaggaatttataaaatgactaatttaagagaagatgttcgtaatatagcgattattgcgcatgtcgaccatggtaaaacaacattagtagaccagttgcttaaacaatcaggtatatttcgtgaaaacgaacatgtcgacgagcgtgcaatggactctaatgatttagaaagagaacgtggtattacgattcttgctaagaatacagcgatagattataaaggaacgcgtatcaatatattagacacacctggccacgccgattttggtggtgaagttgaacgtatcatgaaaatggttgacggtgtcgtactagtggttgacgcatatgaaggtacaatgcctcaaactcgttttgttcttaaaaaagctttagaacaaaacttaaaaccggttgtagttgtgaataaaattgataaaccagctgctagacctgagggagttgtagatgaagtattagacttattcattgaattggaagcgaatgatgagcaattagacttcccagttgtttatgcttcagctgtgaatggaacagcaagtttagactctgaaaagcaagacgaaaatatgcaatccctatacgagacgattattgactatgtaccggcaccagtagataattcagatgaaccattacaattccaaattgctttactagattataatgattatgtaggtcgtataggcgttggacgtgtgttcagaggtaaaatgcgtgtaggtgataatgtatcactaattaaattagatggtacagttaagaactttcgtgtgacgaaaatatttggttactttggtcttaaacgtgaagaaattgaagaagcacaagcaggagacttaatagctgtttcaggtatggaagatattaacgttggtgaaacagttacaccacatgatcatcgtgacccattaccggtgttacgtattgatgaaccaaccctagaaatgacttttaaagtaaataactctccgtttgctggacgtgaaggtgattatgtaacagctcgacaaattcaagaaagattagatcaacaacttgaaacagatgtttctttaaaagttacacctactgatcaaccagattcatgggttgttgctggtcgtggtgaactacacttgtctattcttattgaaaacatgagacgtgaaggctttgaattacaggtttctaaacctcaagttattttaagagaaatcgatggtgtgttaagtgaaccatttgagcgtgtacaatgtgaagtgccttctgaaaatgccggggcagtgattgagtcattaggtgcacgaaaaggtgaaatgttagatatgatgacgaccgacaatggtttgacgcgtttaatctttatggtacctgcacgcggtatgattggttatactactgaatttatgtctatgacacgaggttatggaattattaaccatacatttgaagaatttagacctcgcgttaaagctcaaatcggtggtagacgtaacggtgcattgatttctatggaccaaggtcaagcaacatcttatgcgattattaacttagaagatcgtggtgttaactttatggaaccaggtactgaagtatatgaaggtatgattgttggtgaacataaccgtgagaacgatttaacagtaaatattactaaagcaaagcatcaaacaaacgtacgttcagctactaaagatcaaacacaaacgatgaatcgtcctagaattttaacattagaagaagcgttacaatttatcaatgatgatgaattggtggaagtaactcctgaaagtattcgcttaagaaagaaaatacttaataaatctgcccgtgaaaaagaagcaaaaagagttaaacaattaatgcaagacgaacaataatttaaatatattacaaacatactaagattagctatgaagaaatctatgacgatagattttttcatagctattttttatagttatagagagaagtagactgtccagactcttggattttaaatccgtataaaaaacaagtcagctttactctcgccttttgaaattcgtttgtagtatgttgggttcttgaaaccgtgtataggaaaatgaaatgagaaaggttaagtaaagtttttagcttctcaattattcaaaggaggtttttttatcgattacttaggtgttgatattagtaaaagaagtagtgtagttgcacattataaaaatggaaaattccaaaaagagtttttcatccagaataataaaaatggttacaattatttactcaagtatttgaatgacttagaccacccacaactcatttttgaatctacaggtatctattcaagaggtatggaacgattttgttgtgtaaatcaaattaactatattcaaatgaatccgttagaagccaaatttaaaacgagcgctctaagatcatggaaaactgatcaggcagatgctcataagcttgcttgtttaggaccgacgcttaaacaaacagacagcttacctatacatgagttaatattctttgaattaagagaacgcgtccgttttcatctagaaatcgagaatgaacaaaatcgacttaaatttcagatccttgaattactccatcaaacattccctggtttagaaagattgtttagtagtcgatattcaatcattgcactcaacatcgcagaaatctttactcattcagacatggttcttgatatcgacaaggaggtactgattacacatatattcaattctacagataagggaatgtcaatggataaagctacaaaatatgcacttcaattaagggtgattgctcaagaaagctatcctaatgtcgatagacattcctttctagtcgaaaaattacgcttacttattcaacaattaaaacaatctattcatcatctcaaacaattagatgatgccatgattcaattagcacaacaactcgattattttgaaaatattcattcgatacctggtattggtaagctaagcacagctatgattattggggagattggtgatattaagcgatttaaatcaaataaacaactcaatgcttttgttggcattgatatcaaacgatatcaatcaggtcatacacactgtagagataccatcaacaagcgtggtaataaaaaagcgagaaaacttttattttgggtgattatgaatataataagagggcagcatcattatgacaatcatgtcgtcgattattactacaaactaagaaagcagcctaatgagaaacctcataagactgccatcattgcttgtataaa

SEQ ID NO: 4037 - DNA, 3019 bp, Artificial Sequence
  Description of Artificial Sequence: synthetic nucleic acid sequence
atgaaagataaattaaaaactcgctctattaaaatgaatggtattgaaaagttgaaagtgagagaaattaaagggctgattactactaaaattattcaagctcaagaaaaacgtattccaattagtattgaggttcctgatgaaattgatcgtatctctatgaatactgttgagcttagtcgtattatcggtattatagttgataatgctattgaagcttcagaaaatcttgaggaaccactcatcaatatcgcattcatcgataatgaggaatctgtcacttttatcgttatgaataaatgtagtgatgatatccctaaaattcatgagttgtttgaacaaggtttttctactaaaggtgataatcgcggtttaggtttatcaactttaaaagaactgacagactcaaacgagaatgttttattagatactgtcatcgaaaatggttactttgtacaaaaagtagaaataaataataaggaatcataaggatgtgtagaattaaatgaaaatttttgtttgtgaagatgaccaaagacaaagagaacatatggtatcaatcattaaaaactacataatgattgaagaaaagccaatggagttagctttagcaacaaatgatccttatgaggtcttagagcaatcaaaagaacttaatgacattggttgttacttccttgatattcaattagaagctgatatgaacggtattaaattagccagtgaaattcgtaaacatgatcctgttggtaatattatatttgtaaccagtcacagtgagctgacttatttgacgtttgtttataaagtggctgctatggattttatttttaaagatgatccatctgaattaaaaatgagaatcatagattgtctcgaaacagcacatacacgactcaaattattatcaaaagaaagtaatgtagatacgattgagttaaagcggggaagtaattcagtatacgttcaatatgatgatattatgttttttgaatcatctacgaaatctcataggctcattgcacatcttgataatcgacaaattgaattttatggaaatttaaaggaattagcacagcttgatgaacgtttctttagatgtcataacagttttgtgataaacaggcataatattgaatctattgactcaaaagaacgtattgtttactttaagaatggcgaaaattgtttcgcttcagtacgtaatgttaaaaaaatataatgaaacacccatctttacgatatgaaattgtaaagatgggtgtttgacttatttcttatattttaaatcaattatagtcttttatatcttcttttgttggcaaactttcaatagcaccatgtttcgttgttgtaagtgctgcgacacgattactaaacgctagtatatccttgcccttttccttaaataaatctttacattcagaatgccgagactcgagtatgcaataaataatagcacctataaatgcgtcaccagcaccagttgtatcaattgcttgtacttgatacccctcatgatgaatacgataatcatctttggtataaatagttgcaccttgcgctccttgtgtataaatcactacattaacttgacctctaaataaagattgaatcgcttcatcttcattcctcttaccagtaataaataataattcttcatcagatattttaacaatatgtgctttaggtatgaacgcatttattgtacgttgacattcgagtttatcttcccataaaggtaagcgtacattagggtcaaaaacaatagtaccatctactgactcgaatttttcaatcattttctcatgggcatatttcatgtcactctctattaaatctacagaacaaaaatgtaaaatatcgtcttggaatacttgaatatcatcaatattttcaggttgatataacatatctgcagaaggtttacgataaaatgagaaatctctttgaccatcatcttgaaggctgacaaatgccaatgcagtatttgctttattagttcgcttaatatattgcgtacctacgccaagttgttcaattgtttctacaatgatatcaccaaacgcgtcatttcctagttgtgttatcatttctgattttccacctaatttacttactgtagccgctacgttacacggtgcgccaccaacttgtcgactaaattgttcaacatcttttaattttgaatgcgttacatttggtatgaaatcaattaatgcctctccaatagcaaatagacgtctcattataaatcacccttttaattcatatttagtgaattttaaatatacttgaccagattcagtcgaagcttttatacctgtagcatcctcatttgggaaaatacgtgaggttaaaacacgctcaccatcattacagaatatttcgatactagatgtatccacaaaaatttgtaactgttttaatggtgaatctaaaatggtagaacgcgttgttccatcgacatttgatggtagtgtcccactatcggtacgttctaaagtgagtttattttcgtgtttattataagtaatcagtgtagattcagatcgagagctacgcaattcaaaatatatttctgaagcatcattttctaatatatctataatcatctcatactgcttaccttcatatggatgtaatttacgtttaaatttattagcatatcccaaagctgtttctttattagttcttaaatcttctaactgcttaaaaggtcgctgcttaagttttccattttcaatggtaagtactcgaggaatagtaaggcaatgtgcccacccctctttatctgtaggatactctgtatctggtagtcccatccatccaattaaaatgcgttgcccgtctgcatcaacaaacgtttgtggcgcgtagaaatcaaaaccattatccaattcttgaaaactttcatggtcgaaaaatagattattaaagtttaaatctcctatcatataccctgattgatagatatttctatatttatctccttcagcttcaacgccttgtggacaca

SEQ ID NO: 4038 - DNA, 3095 bp, Artificial Sequence
  Description of Artificial Sequence: synthetic nucleic acid sequence
acatctgatgtcgtatctaagtcaatttcttcgtagttaaataaaggtgtgttattttgggcttctttattgtcaatgttgctgctatttgattgtttctctagactattagatgacgaatcttgattactttcattttctaaatccaatgaactttcgcctgtgtaatgttgggcttgcttagcatacatttcatcaatagctttttgaattgaatcctcttctgactgttgattttgttgacgtttttgttgtaaggctttcttaaaacgtcgtttctgtagaactttacgttctctttctcttctgatttcttctacaatttgtgaagcatagatattttcaatattaatcgtattatctactttagagtaatttggtgttttacgcttagtagtttgataatttgacttttcaacattatgcatattttctgatgatgactcagtttgagcagttgtttgttgttttttctgttgatttttttcaatattgttatcgttactattagaaacattttttgatgcatctattgatttcgttgaatgcgagacttcatcctgttgaacaatctctttatcatttaattccttatgttctggcggtatgacaccattctcaatcggtcttcgtttttttgtaccaaaaatcgctgagggtacctcgcttgatttaaaactatgatttaaatatgtaaattcaggagatgtcgacgtattcttagtgtttgctttgtttttgatattttcagattgtattgatttacgttgttgtgaagatttcttattgtcgttttgattaaaaacactgttattatttgtataattgttatctgcaaattgcttttgttgtgtaatcttagattgatcgtgttttgaatacgcttggcgtcggcgtcgatgtcttttaccagaagaatcaaattcaggattatcatgctggttatatgatctcattatatcgtttgtttcttcttggttatgttcattataattttcatttttttgcgtatattcattttcagaaacttgtattggaaatctaaatttacctcttggtcgactataaatatcattattttgaggcagtaatgagtcttgattattttgttttgattgctgagactgacgtctatttttatttttgcgtaacaaatcgtcattcgaaccgttgtcatcgccaaataatttatcaaaccagctcataattacactacctttcttaattattcaaaaaatgcctgaccaatatcatagtcatcgttaagtaccataattcctttttctttaggagcattaggcaaatttaattctttcattgagcaaatcataccactagaatctaccccacgtaattgggcatctttaattaccattccgcttggcataacggccccaacttttgcaacaacgaccttctgaccagattctacatttggagctccacaaacaatttgaagtttttcagtacctacatttacattcaacacacttagtttgtctgcattagggtgtttttctttagtttctacgtaaccaactacaaatttaggcgatacatcagtatcaagttgataatcaaaacctgcttcagtaatcagttgttgtaaatctttgattaattcagtagttagtttaatatgtccattatcatttattgtcacattattagacacattaaatatattataacctactacctcattttcttttttgatttctaccacaccatgtttttgttcatattcaaaaggaccaactgaaggttcaatttgaataaatgcaacatctccaacacctttaggattgtaaaataagttcatttataaaactccatttctatcattaatcttttttgaatttttttctgttcgcttctaaacgttgaataacgttaggatctcttttttgtttattatttttccccaaaataaatattggctctagatgtccgttatcataaccaaatgataaagaagtaatcggaacaagtcctttagtaaagaattccatagtcaaatgagccataacatcataacctgttttatttctaatatctgcaagaattaatacatcttgatgtggcacaccaacaagcatttcaccttcacattggtgttgaatatgatttaaaaaagaagtatttaaaatacgacttgcatcatatccatcatttgtgttgatgaagtaaaaaatattacctttaacttcatccgtactatagcgacactctaacttacgaacattaaatagtgacatttctttcacttgttgagcagttaaatttaacgtttgtaacatattttcatctattagccgataagatttccctagatcaagagcgtaatatatattagtttcagcagtatgttctgttaacacaaatgcatgaccttccttagtttctttgtcgaaacttgtagctcttataaccggcataatttgtatgtcctcaacattattaatcacttcatcacccatctgagcgattgcttcctcgacataataacaaatttcatctataattttttctttttgttcttcatattttgcgacgatagcgttaagtttaatcgttacacctttgtgattgtcaattcttacaatacgtaacgtttcttcttctctatcaaacttgaattctacgtctaaatgttttaaacgcgctttcaatttatctctcatttggaagacattcattattaacactccctattttcgcacctttttacagtttacaataaataatgttgagttaacagaaaaaactcagataatcacattaatttgttattataaattaatgtagatttgctgagtcattttctgactaattattaaatgtgttgagataaaaattgatcaatttgatcaattgattttctctctttacctatatagcttcctaaaagttgaccttctttaaagataagaaaactaggaatgcctaaaatatcattttgaacacaaatatctataaattgatctctatctacagacacaaattgtaattgactgtattttttctctaatttaggtaaatccggttcaattactttacaatctggacaccatccagcagtgaattcaaatact

SEQ ID NO: 4039 - DNA, 2999 bp, Artificial Sequence
  Description of Artificial Sequence: synthetic nucleic acid sequence
gtttgtttttctgtattgtcagcctctttaatagctgcttttatttcagattttgcacgttcaaccacttcattttctttgtcttcattccaaagacctttagcttctaaatattttctgaaacgtactaatgggtcttttttctcccattcagcatcttcatctgaagttctataacgagtaggatcatcaccagccatagtatgtggtccataacgataagttaaagtttcgataacagtaggaccttctcctgctactgcacgttcacgtgcttctaatgttgcttgataaacagctaaagcatccataccatcaacttgaattccagggataccaactgaaatagccttttgtgctaatgtttctgcagctgtttgtttactacgtggtgtagagatggcatagttattgttttgaattacaaaaattgcaggtgctttgtatgcagatgcaaagttaattccttcatagaagtcaccttgtgatgaaccaccatcacctgtataagtaattgcgactgcatttttgccacgttttttaagtccaaacgctacaccggcagtttgaatatattgtgcaccgataataatttgagggctaagtgcattaactccctcagggaattggttacctttgaagtgtcctcttgagaataagaatgcgtctgtaagaggtaagccatgccaaataatctgaggcacatcacgataaccaggtaaaatgaagtcttcactttctaaagcatactgagatgctaattgtgaagcttcttgtcctgctgttggtgcatagaaacctaaacgtccttgtctatttaacgaaatagaacgttgatcaagaattctagtccataccattctttccattaattccactaattgttcgtctgttaaatcaggtactaagtcttcattaacgacatttccgtcttcatccaaaatttgaaccatttcaaatttcgattgagtctcatttaaaactttaactgcatcgaattgggcttgtaacttaggagccattcaattcaccatacctttcccatgtaaatagaaattcattttatcctccttaattgtatcacaaataaaaatctctgttaaacgatttcataaagttctgttccacataaaaataatacagttacatgacctgttgtattaaaaatcacgtaactgtattaacccattatttattttaattggtctacatcttgtttttctctttttactttctcaatggcttttgagtaagcattaaatttattattcatttctttatatgctttagaaagatctttcgattttccgtctacttccgattgtgttgcattatcttcattcaaataagaaaacagttctttttccttattaagtgcttttttgtaagcctttgcataagcatcatgtgatttatatttttctttaatagcactatcaagttgttcaacttcttttttctttgctttgttttctacatgttcaagatattgcttggcttgtttaaatgctttttcagaattatctagagccttctcttctttttcaaattctttttgtctttgttttacattttcaactatatcttcagctgcttttttacgtgtgctttgatctttatcatttacctttttaaataatttttgctttttctcttctaattcgtttatttttttacttacttgattaacggttttctcttggtccatagctttttgtacttgatcatcatattttttaatttcttttttatctatagtacatccagctaataacactgctgacgttaggacaattgctacagtctttttaaaattcatgaactgttacctcctcaaagttgttcgcttgtaatattaaataataaattataataaatcaatataaagctatcattctatattctagtgcaaacatttaaagcaataaaatctttgagtatctattaatgtacttgtgtctatcttatctgatatattatttaataaggaaggtgtatgacatgataacaatgaaagatattataagagatggtcatccaacacttcgtgaaaaagcgaaagaattaagcttcccactttctaacaatgataaagaaacattgcgcgcaatgcgtgaatttctaatcaatagtcaggatgaagaaaccgcaaaacgttatggtttacgttctggcgtaggtttagctgctccacaaattaatgaaccaaaacgtatgattgctgtctacttacctgatgatggaaacggtaaatcgtatgattatatgctcgtaaatcctaaaataatgagttacagtgtacaagaagcttatttaccaactggcgaaggttgtctaagtgttgatgaaaacatcccaggtttagtgcatcgtcatcatttcttaatatcactttcggttttaaaaccacaaaatttaactatcatagagattcttctttaactttaaactaggcaaaaactgacttaagtcatttgttttcattaatgcctcccctacaagtaaaccgtcaatacttgaatctactattttctcaacatcttcttttgtatgaatgccactctctgaaatgtagcagcaattagactttttaaacttaagtaatttatttgtatgtagaacatcggtttcaaatcgttttaaatcacgattattaacaccaataattttagggttaatttggtgtgcacgttcaagttctctaattgtatgaacttctactagagcttctaaattatggtttgttgcatatgaatacaattcttttaattggtcatcacttaaaatatttactattaataaaataatagatgcaccagctcgttttgcaacatctatttgaattttatcaataataaaatctttacataaaactggtaacgatgttatctttgataactgatttaatcgttcaaaactaccgccaaagtatttttcatcagttaatattgaaatagcattagcaccatatttttgataatctttaacttgttgaacaa

SEQ ID NO: 4040 - DNA, 3003 bp, Artificial Sequence
  Description of Artificial Sequence: synthetic nucleic acid sequence
gcgacgactagacccacagttttttgatttgtcatgcgtcatcctcctctctatgtccttgttttttaccttcatattgttcattattttcatctttacttgaagtttgttgttcgacattttgttgtgatacatcacgagaagtttcttgttctttttgttcttgctcagcttctttataacgatgatattgtctataagaataagtaatacgacgtattttctcttcattttcaacagttgatcccatagctccagctaaaagtcctaatgatgatacaaaccaaatcaatctcatataatttgagaacgtaaattgtgattgggcactcgtccaactattaaataattccacagggacaaagagtgtaatactgatgattaacaataaatataaaatgacataatttatgagtgtaatcaaacttagtgtaacaagtgtggttgaattataaatatatcgatatacacgctgagatttagcagttttcttttcaatcaattgatgcgcatagaatagccatccagccatcccaagtatagcaatcaccatcaatatgataagtcgaagcggtgaataaatcacgcttaattcccatggcattgaaaatattgagacataagttcctgttgcaaaggcaactgaaatgattttcttaaaattaaagatgtttttccaaggctgatttgctcgtgtcagtccaccaattaactgaatccaacttatgataaataaaatattaatatatcgttgttttgatgtggcgtcttcgtcaggttctacagccttcacgcgtacaaaaggatgtggcgcatttttgtctttcggttgattataatataattgttcaatcaatgaagtcatcgttttaactagcttgcgcttcaaatcaataaaacctagtgacggtaatgatagcattgcaacatgtttgtcactattaaagtcgctgacaaccactttattatctgaaatactaggcaaatctgtcagacaaacaacgtaatcccactgatgttcctctttaatttgtgctgctttttcaacactttcatgtacatcctctgcagatcctatcatgagatcgactttgatgtcgaaattccattgactatgtttagtacgctttgacaataactgtttaacatttggaattattttttttgcatgttgatgtgctatacctggcgaaggtataattccgactgtttgcatcgtcgttgtccctcctttctaatttttaaatcaactttattcatagttaaagtgcacgtgatcacgctgataaacgtccttaacgtacacttttattttcttactcattaagttttaattgtaacatttattttgccaacacgagtggtgagaagataatataacttactactactaaagcaagaacaataatacctgcaacgtaacgatatttccatggcgtcatatctactttcggttggtgcgtgcttaaatcaaactcactagatagtttaactttgttaaaaatcaaaataataattaaatctacaaagaataatacactaaatgtgtatagataattaatttctgtaaatacaaagctgattatagcgtataaaattatatgtgtgaagagtgtcactttagcgcccaatttagatgtgcgtttagaaaagaaagcgattaaaattaaagctagcactggcatactatacacaccattaaactgttgaactactgcataaagaccactagggaataatgagatgactggtgcaagtgctacaacaataactccaatgactacagtagcaatatggcctactcgagcaatatgtttatctgatttattttttccaaaaataggtttatagaaatcgagtgttaacatttacataatagagccatgattcaatatggaacatatgcacgtctgcacattttctcaagaagccagcaagggacattaatgtgttaccaaataccacttgtctaggaggaataaagatgtttaaagtagttatttgtgatgatgaaaggattataagagaaggcttaaagcaaatggttccatgggaggactatcatttcaccactgtttatactgccaaagacggcgtggaagcattgtctttaattcgccaacatcaacctgaactcgtcattactgatatacgaatgcctcgaaaaaatggtgttgacctactagatgacatcaaagaccttgattgccagattatcattttatcgagttatgacgacttcgaatatatgaaagccggtatacaacatcatgttcttgattatttactaaagccagtagaccacactcagttagagcatattctagacatattagttcaaaggttattagaacgcccacattctaccaatgatgacgcggcatatcatactgcctttcaaccattattaaaaattgattacgatgactattatgtcaatcaaattttgtctcaaatcaagcaacattatcacaagaaagtgactgttcttgacttaattaatcctattgatgtaagtgagtcatacgccatgaggacgtttaaagaacatgtaggcattacgatagttgattatctaaatcgttatcgtattttaaaatcattacatcttttagaccagcactacaagcattatgaaattgctgaaaaagtaggtttttctgagtataaaatgttttgctatcattttaaaaaatatttacatatgtcaccaagtgattataataagcaatcaaaatagtgcaaatcaatcacgaaaaagctccctaccataatgataaaatttatagtagggagtatatatttaaattcacttaatcttaaatttttaattttctaattttcttttcttcgtaataagcaacaatggctaataatatcattcctaagaataaagctacatagaatacaataaagacatctgtccaaccactcaacgtatacccaaaaatatttaaaccattacgtgttggatcagcgattgcagccagacccactttagcc

SEQ ID NO: 4041 - DNA, 4235 bp, Artificial Sequence
  Description of Artificial Sequence: synthetic nucleic acid sequence
gcactggtaaaaggttagaagatttcacctgtgttaaagccgtgaaaattgactgttggtaaacttcttcataaaataacccatagtatgcatcatcgacaacagttactactttagtacctttattagctagttcttcaattgcatttacaatagtattaacttcttttttatttggtgtgtaaccagttgggttattaggataatttaaaataataatcactttgtcttttttatattcttttaatgtttttacaagttcagatgtagtgaagtgacctgagtcatcaaaaatagaatacgtattgatatgagcaccgtgacgtgtgctaaatacaagtttataattaccccagttgtgtgtcggtaataagacggtatcatctgtatctacaaataaatcagctactagagaaagaccgtgcgtgagagcatttgtaacgatgggacgagagatagatttagactttaagtcgggattttctttaagcatttttttctgccataaatcacgtaattcctctacaccttgaggaggtgcatatgggaaaatttcatccggtgtaaggtcattaaacatttggttaagtgaatttgcgtacattttaccttcttttttggttgccataccaatagtagcattatatgttgtgcgttttgcttcggcagattgcgataaaattccttttggataaaacatatctttacctaattgtgacatcatatctaatacttctggacttgattgctttatttcatcattcaatttttgggctaatggattcatcattgtcttaacctcttttcaataatgtgtttatatatatattatcttgtattgctttaaagataaagggttgtactaaagatataaattaaaaattatctatcaaaaacagaacatacgttctgtttttatgttaaactattgataggtcatcatattatatgacactcatctttttgggaggtgtagtataatgacgtggtggcaagatggaatcattacattaattaccggtggcatactcattgtctttcgtatttggttggaaataaaatggaaaggcaaatagatgaccaaaaaaccccaagtctgctggtaccagacttggggttgtgtagtataatacgtggatacaattaaattgtaacattgtactaaatagaccgcaaacaatattatataaagtgatgctattgagtgtggttcatagttttgttttaatttgatatacttttatattactgaggtgaaataaatgaaacacttgactaaaatatttgttggattagctattgtactatttatagtagggtattatttacaagcgacagatcacgattcacaaggtataaaattattgttagcagcaattatgtttatgatttgtgcttttattaatagacataatgagcgtaaaaaaaaatagatacattcatatgataaaacttcaaacattattttaagttttaagtatattaaatcaaacagatgaagtttgttttgctattttaacagtaattttaaaagaattttagtaattgctttacgaaatttggtgaaatatttaattttagggtgaaatgtagaattcaaatgaattcagtttcatcctttttgtatatagatgatatatacagtatattcctgatgaaatagagatttctactaatttttcgaaatcactttacaaaagtgtgtatattgtatatattatgtatatacagaagaaaagggggacatcaatgaaaataattttgaagaacaatagtgaaagtcctatatatgaacagattaagcaacaaattaaagaaaatgttttgaaaggtcatgtttcccctggtgaacatcttccatcaatgcgtgagttagctaaagatttaaaagtgagtttaataacgacaaaacgagcatatgaagatttggaaaaagatggatttgtaacaactattagaggtaaaggaacctttgtaaaggaacaagataattctattctaaaggaaaagcaattttttgttattgaaaatttagctcactctatgtcaaaagaagccaaaacaattggaatgcctttagaggaattaatagaaatattgactatgataattgaaaaatcttcaataaaacgtaaatcacgatttgttaaaatcccaatcaacttgcgatcctcttgattatcgacaatgggtacaccagagatacggtatttacccattaatgcttcagcctcatacacactttcttccggtgttaagaagaacgggttagaaataacaccattttctgaacgtttaaccttttgtacctcatcagcttgctcttcgacgcccatattcttatgaataacacctaaaccgccttgtcgagccatagcaattgccatttttgattcagttactgtatccatacctgctgagataacaggaatgtttaacttgatcttatctgataatttgacacttaagtcaacatcgcttggtaaaacatctgatgcagctggaatgagtaacacgtcgtcgaatgttaaagattctttagcaaatttattttcccacattaaaaacagcctccaattttatttatacttagttacattatttcacattttcttcagtttgtttatactttataccattaaaaaagaaatttaagatgattgcagaaattgcgccaagcactataccattttgagttaaccaagcaaattgttctcctaatcctttaaatgcttgaggtactgcactaataccagcacctaaccctactgaaattgcaataattaataaattattttgattttggaaattaatgttacccaaaatactaacgccgtatgccataaccattccaaacattgctatcattgctccacctaaaaccggcaatggaataatattagctaaagcacctaatttaggtatacaaccgcaaattagtaaaagaataaccattccatatatcacattgttctttttagctcctgataaagaaacaagacctacattttgggaatatgcagtgtaagggaacgcattaaatattgaacctaaaatgattgctagaccttccgcagtgtacccttttcgaaaatcttttctttctagttttctaccagtaatttcactcagtgcatgatagacaccagtagattcaattaaacttacaactgcaacaatgaaaaatacaagtattgagctgacatcaaatccgaagccagaaaatctgaatggcacagggaaaccaaaccaatgtgcatcacccacttgtttgatatcaaccattccaaatataccagctaaagcagtacctattgctaatcctataagtatcgcaattgatttcaagaagccctttgtaaatctttgcaaaataagaataatgagtagtgtaacaccacctaatattaaattcttagtatcgccatagtttttcgctccttcaccacctgccaagtaattcattgcaactggcattaaattgattccaataattgtcacaacacttcctgttacaacaggtggaaagaatttaactaaataagagaaaaaaggtgcaattaaaacaactaagataccggatattaaaagcgaaccatataaaacatcaagtcctttcgtttgaccgatgagtatcataggtgcaacggcagtaaacgtacatcctagtacaatcggtaatccagtccctgtgactttatttgcttgaagaaatgtcgctaccccgcacataaatatatcaacagtaactagataagcaatttcttcagctgaaaattttaagcttgtccccacaataataggaacaagaatagcccctgcatacatcgctaacaaatgttgcacacttaatatgaaatttttcattacgcttcacctaaaagagttaccttattgccttttaatgaagctaccttacaaagtgaagatacatataagcctgcatcttctaaacgttggcgaccattttggaaacttttttcaaccacaatacccacgccaactgtcgtcgcatttgcttgttttacaatgtcattaagacctagcgaagcatcaccattagctaaaaagtcatcaatgataagtactttatcgtctgcacctaaaaattcttcagatacaatgactgtactcgttttattttttgtaaatgaatgaatatccgtgctataaaagccatctttcaaagtactaggtttagcttttttagcaaatagacaaggaacatcaaaatg

SEQ ID NO: 4042 - DNA, 3267 bp, Artificial Sequence
  Description of Artificial Sequence: synthetic nucleic acid sequence
tgagaacggttcaattttgattgaagacaaagaaatttcagaatataaaactgacgatttagctaaaaaattaagtattttaaaacaatctaatcacactgatatgaacataactatcgagcaactagttaaatttggtcgttttccatattcaaaaggtcgaatgaagcaagaagactatgacaaagtggaatatgctcttgacttattacagcttaatgaaattaaacatcgtaatattaaaacactatctggaggtcagcgacaacgtgcatatattgctatgactatagcacaagatactgattatatattattagacgagcctttaaataatttagatatgaaacattcagtacagattatgcaaacgttacgagatttatgtcgtcagttaaataaaacaatcattatcgtattacatgatatcaactttgcttcttgttattcagacgacatcattgcgcttaaacaaggtgagctagttaaagctgatgataaagataatgttattcagtctgacattttaaaaagtttatatgaaatggaagtacgtatagaggagataaggggacaacgtatttgtctatattatgatgaaactacttttgactcagtttaatgattaaaattgagacgcatagtaaaagaggttatccatacgaaaagaaattataaatttgattagggagttgcacatatgaaaaaaacagtcttatttttattattgtctctagttttagttttaacggcttgtagtaatagttcgaataataattcaacttcgaaaaagaaaaatagtgattctaaagaaactgtaaccatcaaaaatagttttgaagcaagtggtaaagaaaataatggcagtgataagaaaaaaatctctaatactgtcgaagtaccaaagaatcctaaaaatgccgttgtattagattatggagcgcttgatgtgttgaaagaattaggtgtggctgataaagtaaaaggtttacctaaaggtgaaaataaccaatctttacctaaatttttagatgaatttaaagatgataagtatattaatactggaaatttaaaagaagtgaactttgataaagttgcatcagctaaaccagatgtgatttttatttcaggaagaacagctaatcagaaaaatttagatgaatttaaaaaagctgcaccaaaagctaaagttgtatatgtaggtacaagtgatgacaacttaattaaagatatgaaaaaaaatacagaaaatttagggaaaatctacgataaagaagataaagctaaaaaaattaataaagatttagatagaaaaatatctgatatgaaagataaaactaaagactttaataagaaagtaatgtatttattggttaacgaaggtgaactatcaacgtttggaccaggaggaagatttggtggtttagtgtttgatacattaggatttaaacctgcagacaaaaaggttagcaaaagcccgcatggtcaaaatataaataatgaatatattaacaagcagaatccagatgttattttagctatggatcgtggttcagttgtaggtggtaaagcaacaacaaatcaagttttaaaaaacaaagttataaaaaatgtaaaagcagtaaaaagtaatcatatttacgaattagatccaaaactatggtatttctcttcaggatcttcaacgacaactatcaaacaaattgatgaattaaatgaagtagtagagaaagttgaaaaataatcttataataagagaaaatcaaccgaggtataagaagaaaactttaaatgcatgaatagaatgttgatataagaagagctcctaaagcgaatttttaaataaaattcactttaggagctcaaatatttcaaaaactttgtaacaagttatttatacttcaaaatataaatgataatgaaatttacaacgactgttaaaatgcgctttacaacgaggacacatttctaccatcatatagtcacgaatacgcatctcatgtttacaaacaccacacataatagctttttcatcaaactcattttcagcccatctttcaattgtatgagatacgtgttcattatgacatttataacacggataatatttgttgcaacatttaaatttaatggcaataacatctaaagatgaataataatgtgtacatcgtgtttcattatctatgagtgatccataaacctttgccaatgatgtgtcctccttgaagaattaatctgtgggatgatcacctataatacgtacctcagtattcaattcaacatcgaatttttctttaactattttttgtacgtgatgtataagtgcttcataatcagttgctgtaccgttgtctacattaaccatgaatcccgcatgcttagttgaaacttcaacgccaccgattcgatagccctgtaaattagaatcttgaatgagtttacctgcaaaatgacccggtggtctttggaaaacacttccgcaagaagggaattcaagcggttgtttagattcacgtctttcagtaagatcatccattttggcctgaatttcatctaatttacctggttctaaggtgaaagcagcctctaatacaactaaatgtttttgttgtaccacactatttctatagtctaattccagttcagctgtagtgagctttaataaatcacctttttcattgacacataatgcatagtcaatacagtctttaacttctccgccataagcaccagcattcatgaatacggcgccaccaattgacccagggataccgcatgcaaattctaaaccggttaatacatggtcacgtgcaacatttgaaacgtcaataattgctgcaccactacctgctataattgcatcatcagaggtttcaatatgattgagagataataagctgaggacgattcctcgaattccaccttctcgaatgataatgttagacccatttcctaaataagttaccggtatactgttctcatgggcaaactttacgatggcttggacttcttcatttttggtaggggataaataaaaatctgcctctcctcctgtttctgtatatgtataacgcttgagaggttcatccactttaataatatctttaggaagaattgactctaatccgcgtaagatgtcatttttattcaatgttttgaacatcctttctcatcttcttaatatcaacattattatatcaattataaaagttatttgcgaaatttggatatatgaattgattataaatataaaatggttatgtcgta

SEQ ID NO: 4043 - DNA, 3076 bp, Artificial Sequence
  Description of Artificial Sequence: synthetic nucleic acid sequence
actaaggatatatgggagcaattattagaatacgatgttacaccatgcggtttaggtgctcgtgatacgctaagacttgaagcaggattacctttacatggtcaagatttatctgaatcaattactccttatgaaggagggatagccttcgctgctaaaccgttaattgaaaatcattttattggcaaatccgtactcaaagctcaaaaagaaaatggttccgagcgtagaacagtaggtcttgaactattaggtaaaggcattgctagaacaggttatgacgtactagatgaaaatagtaatgaaattggtttcgttacatcaggaacacaatccccatcttctggtaaatctatagcacttgcaataatagatagagatgcatttgaaatgggcaaaaaagtaattgtgcaaatacgtaagcgtcaagttgaggcaaaaatagttaaaaaaaatcaaattgagaaataaatataaaggggtgtaaatattgagtcatcgttatataccattaacagaacaagataaaaatgaaatgctaaatagtattggggcaaaatctatttccgaattatttgatgatatacctacagatattttattaaaaagaaatttaaatattgccgaaagcgaagcggagacgatattacttagaaggttaaatcgtctcgcagctaaaaatacaactaaagaaacacatgcaacatttctaggtgcgggcgtttatgatcattatactccagctgttgtcgatgcaatgatttcaagatctgaattctacaccgcatatacaccttatcaacctgaaatttctcaaggtgagttacaagcaatttttgaatttcaaacactcatttgtgaattaacagatatggatgtagcaaattcttctatgtatgatggtatgactagttttgctgaagcatgtatattggcactaagtcatacgaaaaaaaataaaattgtagtttcaagtggactacattatcaagctttacaaattctacacacatacgccaaaactcgtgatgaatttgaaataattgaagttgatcttaaaggtactattactgatttagagaaattagaacaacttatcgatgacaacacagcagctgtcgctgtccaatatcccaatttttatggttctattgaagatttagaacaaattaataactatataaaggataaaaaagctttatttatcgtatatgccaatccactttctttaggattactaacacccccaggtacattcggggcagacatagtagtgggagatacacagccttttggtattcctacacaatttgggggtccgcattgtggatactttgctacaacaaagaaattaatgagaaaagtacctggtcgattagttgggcaaactcaagatgacgaaggtaatcgtggatttgttctcacgttacaagctagagaacaacatatccgccgtgataaagcaacttctaatatttgttcaaatcaagctttaaatgcacttgcatcttcaatagcaatgtcagctttaggtaaacaaggtatttatgaaattgcagttcaaaatcttaaaaatgccaattatgccaaaaataagtttgaagaacatggttttgaggtactaaaagcacaatcttttaatgaatttgtagtcaaatttaatcaaccaataaaaaatattaatcttaaattagcagaatatggatatattggtggttttgacttaggtgaagtatctgatgattttaaaaaccatatgttagtagcagttacagagttaagatctaaagatgaaatcgatgatttcgttacgaaagcaggtgagttaaatgattagtaaatcaagtcctttaatatttgaaagatccaaaaaagatagatatgcgtattcattaccacaaaatgacattgagaatatcagtattgcttcactcttagatgataagtatattcgtaaacataaggctgaatttcccgaggtttcagaattagatttagttagacattataccgaactatcaaataaaaatttcggggtagatactggattttacccattaggttcttgtacgatgaaatataatcctaaaatcaatgaaaaggtagcgcgtatttctggttttagtgaatctcatcctttacaagaagaagaacacgttcaaggttctcttgaaattatatatagtttacaagaagaattgaaggaaattactggtatggatgaagttaccctacaacctgctgcaggtgcacatggtgagtggactgctttaatgattttcaaagcttatcatgaaaaaaatggacaaagccatcgtgatgaagtaatagtgcctgattcagcacatggtactaatcctgcttctgcctcatttgctggatttaaatcagtaactgtaaaatctaatcaacgtggggaagttgacatagaagatttaaaaagagtagtaaacgataatacagctgcaatcatgttaactaatccaaatacattaggtatatttgaacaggatattattgaaatagggaaaatcgttcatgaagcaggaggtttattatattacgatggagcaaatttaaatgctattttagataaagtacgtcctggtgatatgggctttgatgcggtacatcttaatttgcacaaaacattcactggtcctcatggcggtggtggaccaggatcaggaccagttggagtagtagagaaattagccagttatctacctaagcctatggttataaaagataacgataggtataaatatgataatgatattccaaattcaattggacgagtaaaaccgttttatggaaatttcggcatttatttaagagcatatacttatatcagatcaatgggagccaatggtttaaaagaagtatctgaagctgccgttcttaatgcgaattatataaaatctcgccttaaaaatcactttgaaattccgttcaatcaatattgtaaacatgaatttgtattaagtggaactttacaaaaacaatatggtgtcagaacattagatatggctaagcgactgttagattttggtgtgcatccacctacaatatattt

SEQ ID NO: 4044 - DNA, 2278 bp, Artificial Sequence
  Description of Artificial Sequence: synthetic nucleic acid sequence
taccaaaactgccattaactaataagttaatggcagaaagtttttatatgaaattatttttcattaccttttttacgacgaccaaatatgaacaatgatccgacaattgctaatagagatccgactaaagttccctcattagcttgacgattttcacctgtatcaggtaattgatttttattatctgttgaatgcattgatctatttggttgttctggtgcacctgattgtgctggcgtacctggttccactggtttacctggttctgctggcgtacctggttccgctggtttacctggttccgctggtttacctggttccgctggtttacctggttccgctggtttacctggttctgctggtttacctggttccgctggtttacctggttctgctggcgtacctggttccgctggtttacctggttccgctggtttacctggttctgctggtttacctggttctgctggcgtacctggttccgctggtttacctggttctgctggcgtacctggttccgctggtttacctggttccgctggtttacctggttccgctggtttacctggttctgcttttgttggaccatactcaacaatttcgtcaacaggttgtttagtgactttttctgttgatttaccttcgccaactttttctcctgtaataggattaactaatattggtgttgtaattgtttttgttcctggttcacctttttgtttaacgcgctcttcacctggttttaaatcaggattaaatacacgtttcttatcaaatggaatctcttccgttgatgtgattggattaccaactttcggaccatattttgtcacatcatccactggtggggtaacaacttcacctgtatcaggatttttaactcctggtttacctggaacttcagttttactatctacaggtgcatttggatcaaattcatctttatgaccttgtggtatttgttcaccaccataatgaacaatctcatccactggttgttttgttattttttctgttggttcaccttcgccaactttttctcctgttaatgggttcttagttgttggcgttgtaattgtttttgttcctggttcacctttttgaacgactttctctgtacctggcgctaagtttggatcaaattcgcgttttttatcaaacggaatttcttccgttgacgtaatcgaatctccatcaactggaccatattttgtcacatcatccactggtggtgtgactacttcgcctgtatcaggatttttaactcctggtttacctggaacgtcctcttggctacctttcggtgcgtttggatcaaattcatccttatggcctggcttgatttcttcgccaccataatgaacgatctcatccactggttgttttgttattttttctgttggttcaccttcaccaactttttcccctgttaatgggttcttagttgttggtgttgtaattgtttttgttcctggttcacctttttgaacgactttctctgtacctggcgctaagtttggattaaattcgcgttttttatcaaacggaatttcttccgttgacgtaatcggatctccatcaactggaccatattttgtcacatcatccactggtggtgtgactacttcgcctgtatcaggatttttaactcctggcttacctggaacgtcctcttggctacctttcggtgcatttggatcaaattcatctttatggcctggcttgatttcttcgccaccatattctgtgatttcatctactggttgttttgttattttttctgttggttcaccttcgccaactttttcccctgttaatgggttcttagttgttggtgttgtaattgtttttgttcctggttcacctttctgtttaacacgctcttcacctggttttaaatcaggattgaattcacgtttcttgtcgaatggaatttcttccgttgacgtaatcgaatctccatcaactggaccatattttgtcacatcatccactggtggtgtgactacttcgcctgtatcaggatttttaactcctggtttacctggaacgtcctcttggctacctttcggtgcgtttggatcaaattcatccttatggcctggcttgatttcttcgccaccataatgaacgatctcatccactggttgttttgttattttttctgttggttcaccttcaccaactttttcccctgttaatgggttcttagttgttggcgttgtaattgtttttgttcctggttcacctttttgaacgactttctctgtacctggcg

SEQ ID NO: 4045 - DNA, 3745 bp, Artificial Sequence
  Description of Artificial Sequence: synthetic nucleic acid sequence
tatataaatgcattcacttcgaaattcagttcaaagcttctaaagtccatgtttgcactaccaattgaagaaatttcatcatcaatcattaatattttagaatgaataaatccattttgataagtgtaaatattaactccgctatccaataaatcagctgcatttgaaaatgtagcccaataaacgaatggatgatcaggtttacacggtatcataaggtttacttcaacgccgctattagcagccatttttaatgcattaatgtatgattggtctggaataaagtaagggctttgtagatagatagactttttagcgctcattatcatttttgtataaccatattctatttgatgtaaatcaaatgcaggtccactagaagcgatttgaatagccgcgtttcctttgtccccattttttttagggaaatatttttgatcaaatttaaattgtggacgatgcgactgtgaattccagtctaaaataaatcttaattgtagtgcatcgatgcattcaccttgaacacgtgtatgtgtatctctccagtaacctaacttacctaatcctaaataatcatcgccgacattaaaaccgccaacgtaaccaatttgtccatctataatgataatctttctatgatttcgattattcattctgaaattgattaaaggtactttcgaagggaaaaatgcttcaacttctccacctaatgctctgaaatgtttaaattttgataatctaacctttttagaaccaacatcgtcatacaaaagtttaacttctaaaccttctttaagtttagtttcaagtgcatctaagattcttttacctaatccatcaagttcaaaggtatagtactctagatgtatatagtcttgagcattgtaaatatcctcaagtactttttcataaagcttatgaccatctgtaaataaatcgattttattattttctgttaaaaaggcatcttgtttcattaacaacatacgtattaaatcacggtgtttaatgacttgatcattgatataaccataattatgtttatcaaaactgtcgatttggtcttgaactaaatcttcaaatgcatgtaattcatcaccgttatttttttccatctttttcttggaaaccgttcgtcctaaaaatagatacaaaataaatccaatgacaggaagaacgaataatacgaataaccacgcccaagttgaactggcagtacgtcgatcacgttcaaggaaaatgatgacaaatgccaatactacgttagttataaacccaactactaacaatatagttaaaatagtacccaaaaatccaaaattcattactaaatactcctattcagtctttcaccaagaaaatttagccgccgatttactgaactatgcttccgttaccaatgttaaaatagcattaaagtcctcgtcattatgcggaaatgcacgttcttcgatttgtttaatagtaatgtttaataatttgtaaccattaccctcttgagactttaaaaacgaattaacacttttctctaagctctccagtgtttcctcagttaaagttttaaattttatttgttgcataaatcccatacccctttcattatattgattaaatcatagaacttttcatacaaaatttcaattaatttagagaaattatcttttataaatcaaacgttcattatcttgaacagaatatattttaatttaaatggtattgatgtataataaattacattcgattgaatattcagaaattttattagtctagattcacatcaatgtctttattgctcctcttttaattgattgaaatcttttctaattgagagcaaatcaacacttttcatcgaataaattaataaatatcgatttaacattggagggaacgcttgtgatttcatttgaaaatgattatttagaaggtgcacatgaaaaagttttaaatcgattagtagagacaaatcgaatacaagctgctggatatggcttcgatgacttttcggcacaagctgcagataaaattagacaacgtattgactgtccagatgctaccattcgttttttagtaggtggtacgcaaaccaatcaagtagttattaactcaatgcttgatagttatgaaggtgttatatccgctgatacaggacatgtggcagtccatgaaggtggtgcgatagaattcagtggacataaagttctaaccataccctcccaagaaggtaagattactgctcaagacgttgagaattatatagaaacttttgaaagtgattttaaaaaagaacacatggtgtatccagggatggtttatatttcacatccaaccgaatatggaactttatacacgaaagaagaattacaatctttatctagagtttgccgtagacatcagattccactatttatggatggtgcacgtttaggctatggccttatgagcaatcaaactaatgtaactatcgaagatgttgcaaaatactgtgatgtgttttacataggaggtactaagattggagcactttgtggtgaagcaattgtcttcactaaacaaaatgaacctaaaaacttcactacaattataaaacatcatggtgctttattagcaaaaggccgtctaactggtgttcaatttttagaattattcactgatgatttatattttgatataagtcgacatgctattaaaatggctgaaaaggtaaaaaaaggatttatagataaaggatatcaagtctattttgattcaccaaccaatcaacaattttttattttaagcaacgataaaattgaagaactaaaacaaaaggtaaaattcgcagtttgggagaaatacgataatcaacatcgtgtagttcgcttcgcaacaagttgggccacaactgaagaaaatgttaatcaactacttgaactaatataaaatacaaaatgaagttataaaaactgtatcactacaggcagctaagaatgtagtcaggaggactatgctatgcaacaagaacgacaatcgtggtaccaaaaatcttggtttattattctcacattgctatttatttttccattaggtctctttctaatgtggaggtatgcgcattggaagaattggttaaaattgactgtttcatcagtctatattattagtttagttttaacacttttatttcaagttagtctattaaatgagaataaaacaaatcaaatagaacatgcatcaactatgaaagaaaagtctaatataaataatgtaaaaacaactaaaaataaaaatatggaaaaatcaacgcagacagacaaacaaaactctgtgaacttaaagcaaaacacaaaagatcaaaataataacgcaaatgatgaagcagcttctccaactagcgaacaaaatgcagctatagcacaagcaaagtcatatgcaaatacattacctatctctaagaaaagtttatacaaacaattaacttcggaatacggagagaaatatccggcagacatagcacagtatgctgttgaccatatcagtgtagattataaaatgaatgcactgagattagcaaaaagttacgtaaaaaatataaacatttctaatcaagcgttatatgatcaactcgtttcagaaaatggagaaggatttactcctgaagaagcacaatatgcaatgaatcatttagataggtaatcattaagaaagagttttaacattaaaggtttgttttcttagttgaaagcaaacctttaatatattcgtataa

SEQ ID NO: 4046 - DNA, 3668 bp, Artificial Sequence
  Description of Artificial Sequence: synthetic nucleic acid sequence
tgagttaatattctttgaattaagagaacgcgtccgttttcatctagaaatcgagaatgaacaaaatcgacttaaatttcagatccttgaattactccatcaaacattccctggtttagaaagattgtttagtagtcgatattcaatcattgcactcaacatcgcagaaatctttactcatccagacatggttcttgatatcgacaaggaggtactgattacacatatattcaattctacagataagggaatgtcaatggataaagctacaaaatatgcacttcaattaagggtgattgctcaagaaagctatcctagtgtcgatagacattcctttctagtcgaaaaattacgcttacttattcaacaattaaaacaatctattcatcatctcaaacaattagatgatgccatgattcaattagcacaacaactcgattattttgaaaatattcattcgatacctggtattggtaagctaagcacagctatgattattggggagattggtgatattaagcgatttaaatcaaataaacaactcaatgcttttgttggcattgatatcaaacgatatcaatcaggtcatacacactgtagagataccatcaacaagcgtggtaataaaaaagcgagaaaacttttattttgggtgattatgaatataataagagggcagcatcattatgacaatcatgtcgtcgattattactacaaactaagaaagcagcctaatgagaaacctcataagactgccatcattgcttgtataaatcgattattaaaaacaattcattatcttgtaatgaatcataaattgtacgattatcaaatgtcaccacattagccaaacgtacaatcaaatatagtttaacaccttattcaaaaaaattaaaatgaacggtttagttaagtaatgcttattttaattataagtacttgactaatcgtaggaaaagagtccgggtcataaaactatgtcccgggctcttttataatataaaggcagttgatgattgaattaaaaatacgttaatatcaatcttttcaacacatgttataggaggacaagcattcatgccctcctacactattatttaaagaattaagattcgtattgatttgaacctttagacggcttaagaattggatctaaaatagctacaacaatagtgaagatgacagcaataataattggattaattacatttagttctggtccactatttaagctattcaatacgaaattaaccatttgaagtaacaatactgcccaaatgaatgtcatgaggtatctcatattatataacctccacttgtttattcgttaactctattttaagtgataatatcttatttgtatagtataaatctaagacgttggttatctcatacttttaattaaaagtaaaataagaaattagagtatgttgcaattataaagatgtatttagtgaagtttgttaaaatacataatggaaatgttttgtattgattgggaggctctctgcttgagtttaaaaacatgaatatgttaaattaatacctggtattaaaaattttttaagaaggtgtacaaccatgaatgtgggtattaaaggttttggtgcatatgcacctaaaaatattatagacaatgcctattttgagcagtttttagaaacttcagatgaatggatttctaaaatgactggtattaaagaaagacattgggcagacgaagatcaagacacatctgatttagcatacaatgcaagtattaaagcgatagaggatgccggcattcagccagtagatatagacatgattatcgttgctacagctactggggatatgcctttcccaagcgtggctaacatcttacaagaaagactaggaacaggtaaggttgctactatggatcaacttgctgcatgttctggctttatgtattcaatgattactgctaaacaatatatacaatctggtgattacaaacatattttagttgtgggtgctgataaattatctaagattaccgatatgactgaccgttctactgctgtattatttggagacggtgctggagctgttgtcatgggagaagttgctgaaggtcgtggtatcattagctatgaaatgggttcagacggtagtggtggtaaatacttgtacttagatagagaaactggcaaactcaaaatgaatggtagagaagtatttaaatttgctgtgagaattatgggtgatgcatctacgcgtgtagttgagaaagctggtttatcgtctgaagacatagacttatttgttccacatcaggctaatattagaattatggaatctgcgagagagagattaggaatagaaagagaaaaaatgagtgtctcagtaaataaatatggtaatacttcggctgcctcaataccattaagtattaatcaagaattgcaaaatggaaaaatcaaagatgacgatactttagtcttagttggcttcggtggaggtctaacttggggcgcaatcgttattaaatggggaaaataggaggataacgtatgaataaaaataatagagttgttataacgggtatcggagccttatctccaattggtaacgatgctaaaacaacatgggacaatgcactaaaaggtgttaacggtatagataaaatcacaagaatagatactgatgattataatgtacatcttgctggtgaattgaaagattttaatatagaagaccacattgatagaaaagaagctcgccgtatggatcggtttacacaatacgcggtggttgctgcaagagaagcggttaaagatgcacaattaaatattaatgaaaaaaatgccgaccgtattggtgtatggattggttctggtatcggtggtatggaaactttcgaagttgcacatacaacacttgtagaaagaggaccacgtcgagtaagtccatttttcgttccaatgttaattcctgatatggctactggtcaagtttctattgatttaggtgccaaagggcccaatggttctacagtaacagcttgtgctacggggactaactcaataggtgaggcatttaaaattattcaacgtggtgatgcagatgcaatggtgactggtggaacagaggcacctattacacatatggcaatcgcagggtttagtgcaagtcgtgcattatctacaaacaatgaccctgaaacagcttgtcgaccattccaagaaggccgtgatggctttgttatgggtgaaggggcaggtattgttgtacttgaatcattagattcagctaaagagagaggcgctgaaatttacgctgaagttgtaggttatggttcctctggcgatgcacatcatattacagcacctgcgcctgaaggtgaaggtggctcacgagctatgcaagctgctttagatgatgctggaatcaaagctcaagatgtacagtatttaaatgcacatggcacaagtacacctgttggagatttatatgaggttcaagcgattaaaaatacattcggtgatgctgcgaagtcattaaaagtaagttcaactaaatcaatgactggacatttattaggtgctacaggtggaattgaagctattttttctgcgctatcaattcgtgattcaaaggtagcccctacaatacatgcaatcacaccagacgaagaatgtgatttg

SEQ ID NO: 4047 - DNA, 3182 bp, Artificial Sequence
  Description of Artificial Sequence: synthetic nucleic acid sequence
taaaaaccagcataatttaggcgcttttcatctagtgaagtaatatcgtgcaagttatttacaccaacaagtatatctaaaatgggctcagtttgataattaaaatgacaggtaccaccgatatgctgagtgtatttaataggagaatctaaaatagtaaacaatacgtctttcactttgttatattcatatgtaaattgtttcacagattcatttttaataaaaggttggacattagcgtacatgaaatactcctcatttataaaaataatatatacaataaagtctgacatactataacacaattcattttcataataaatacgtttatgtataatgtttagtgataaggagtgcaaatatgaaaaaactactatttatcataacagttatcattttaaccatagttgtatccgcttgtggaaatgaatcaaaaagagatattaaacaatttgaacgtcaatataaagaaattcatcaaaaacaacacagtgtagaaaaagttatggataaaataccattaaaagagttagataatttaagtaaaactgataccactgataaaaataaaaaagaatttcgtgcacttcagcaggatattaataactatttgatacctgagtttaaaaaatataaaaattccactcaacatttaacagcagatactaatgaggttaagcacttgaaagaggattatctaaaaactgttgaaaataaagagaaatctatatatgatttaaaagaatttgtagatttatgtaatcgctcaattaaagataatgaagatattttggattatactaaattattcgagaaaaatagaactgaagtggagtctgacattaataaagcacaaaataaagaagatgcaagtcaacttaaatcaaaattagaagaaaataatcaacaattaaaagatactgctaaaaaatatttaaattcttcaaataatgattctgattcagcgaaagaagcaatcaaaaatcatatttcaccacttattgacaaacaaattacggatattaataaaacaaatatttctgataatcatgttgataatgctagaaaaaatgcaattgagatgtattatagtttgcaaaattattatgatacgagagtagatacgattaaaactagcgaaaaattagctcaaattgatgttgaacgattgccaaaagagggaaaagatatatcagaaatggataaatcgttcaaaagagaatttaaaaaaataaaagaaagtgtaaattaaatactatctgaatttaaaaaaatgaaaatttatggttaacattacatagcagagtgtgtataattgtacccattgataagattttagggataaaaatttcacgcatatgcttagtatgaagtgataaatatttttagaggtgaatagaatggctattaagctgagttcaattgaccagtttgaacaagtattagaagaaaataaatatgtttttgtattaaaacacagtgaaacttgtccaatttctgcaaatgcgtatgatcaatttaataagtttttatatgaaagagacatagatggttattatctaatcgttcaacaagagcgtaaactatctgattatatcgcagagaaaacaaacgtaaaacacgaatcaccacaagctttttattttgtagatggtgaaatgaagtggaatgcagaccacgatgatattaacgtttctcaacttgctcaagctgaggaataattagaaaagaatgaaatgatgaagcagcttgcctcaaatgtcaatgttagacagatacaggcaagctattcttatgttatgaaaattttaaaatagttatgtataatgtgataataagtataattaagggacataatgaagaacacgcagaagatatgttatttctttagtgtcaaatcattgttacttagatttatagattattctcatacatcctttagtatgtttaaaataatttttggaaaagagaaaaataaggtggttaagacaatgaaagttttagtagccatggatgaatttaatggaattatttctagttaccaagctaatagatatgttgaagaagcggtagcaagtcaaattgaagatgcagatatcgttcaagttccactatttaacggtcgtcacgaattattagattcagtctttctttggcaatcaggaaataaatatcgtgtgagtgcgcatgatgctgacatgaaagaaaccgaagcaatatatggacaaacggatagtggtatgactattatcgaaggtcacttatttttaaatggcaaaaaacctattcaacatcgatcaagttacggtttgggagaggttataaaagcagcattggacaatcatacagaacatcttgttatttctttaggtggaataggaagttttgatggcggtgcaggcatgttgcaagcattgggtgcaacattttatgatgatgaagcacaaattgtcgatatgaggaaaggtgcatatttaataaaatatattagacgtattgatttatcaggtgttcatccacaattaacaaaggtaaacattcaattaatgtcagatttctcaagtcgattgtatgggaaaaaaagtgaaatcatgcaaacatacgaatcattagatttgtctcaaaatgaagcagccgagatagataatttaatttggtattttagtgaattatttaagaatgaattgaaaatagcaatgggaccaatcgagcgcggtggtgctggaggtggtatagcagctgtattaaatagtctctatcaagctgagattttaacaagccatgaattagtgaatcaaatcacacatttagaaaacttaattcaacaggcagatcttattattttcggagaaggtttgaaagaagaagatcaaattctagagactacaacaatacgtatagcagaacttacccaacaatacagcaagccagctattgcaatttgtgctacaaatgataaatttgatttgtttgaatcattgaatgttacagcaatgtttaatacatttattgatatgcctgattcatatacagattttaagatgggtattcaaatcagacattacacagtacaagcactaaaattattgaaaacgcaaataaacttaccgctttcatcctaatattagaaaaagtttttatacacatttaatttaaaagccattgacagtaagagtagcttt

SEQ ID NO: 4048 - DNA, 3160 bp, Artificial Sequence
  Description of Artificial Sequence: synthetic nucleic acid sequence
ataatcaatgtatgttatctaaaaatattttaaacattaaaaaattcatacctatctatattaatgaggaaaccatattatttccagttacgcaaaaacgtgcaccgattaaatattttatcaatgcacgaaatattataggaattcattcttcaattcataccacaatgattgtttttgaagatggtacgactatcgaactgaacatcccctatacacttgtaacaaaaaaatggcaagaaagtcttaccgtaggtcatatcatagagaaaactaccttttattaaatttatattctaaaagcttcttagtaaacaatgcagtcgtatgtttaatagcatataaactagcaatcattataattatcgcgacaatcaaaacagttaacataacaaaaactgataaatcaatatttgggttgatataggcatgcacgatagctaagctggccactaaccctaaaataaagagtccgagcaaaaatgcataagctaaaaccatacaaattaaaagtacgaacacatgagaagtcgattttttcttatgattaaatataaatttctttaaatattcatttgaaaatcttattggcttattggtatcaatacttttattctgatcaactgagtcaatatatttgttaagcgcattcttctctttagcatctaaaaaccataattgcttatttactcttttgatgaattcatttttactcatttgataggtacctcttttcagaattagtcatatttatcaatagtaaatgaatcaaactattctttcaaatcttcttatataactaaaataaaacagcaatctagtgaaataaatccacttaattgctgtttttttacatttataaaattgacaaaccggaactttgaatgtctttggcaaaacctttgactgtatctactgaaagttctcctatatcacggcctaaattgttattaaccttttttacaacatcagctgggcaagtaataatatcagctccaatttcatcagcttgaattacattatatacttcacgacaacttgcccataataattgaacaccttctttactatgagtgaccttaactgattctttcatcaaaggaagtggatcaatcccagtatctgcaatgcgtcctgcaaatactgacacatatgttggcacaccttcagtcacagcgtcagtaattgcttttacttgctctatagtatagacagctgtgacattcaaccttacctgtttcgatgataaacgtttaattaatggtagtgtagactcaccagttgttgtaacaataggaatttttacaaatacattatcaccatattgttttaaaatctcagcttctttttccatagtaggtaaatcgtcagcaaacacctcaaaagaaattgaagcgtctggtatttcactaaccacttcctctgcaaaagctttataatcagttacacccgctttagccatcaagcttggattcgttgtaaaaccatcaacgagttgattcttatatgctgatttcatttcttcaatatctgcaccatccgcaaacactttaacatttaattttgtcatgtcatttctcctcctgaacgtgaaaggtcaatactatcaattatatgtatagaattgattatttgtatgtatatcagactaaaactagggatagcgatttattatcacgttttaaatttaaaaattttataacttatttataacatgaccttgaaatgtaagcgaattatttgctttaattttaaatatactgtttaaaatggaatgaaaattactatgtttaagtttaataaatatgatagtatattgtaataatgtttatctaggaggcagtttatggctcggtcaaaaaagtacttttatcttagtctattaatgataattttaagttttttctttaataccaataattcattattgagtaatatatttcaatcgtttatgaaaattgttgtagttacaagtatcgttaatattataatacttattttatcgattgtttttgccgataaatctataaagtatgctaaggaaagttcagattggattagatttgcaagcaaaatattaccattgattattttaatcactattattatccatatactttcatctttacatacttttggttacatttttaaataataataatcaacttttatattttgaggtgaaatatagatgcaatatctatatatttttgtaggtggtgctttaggtgcattgataagattctgtttatcaatgcttaatgaaggttcaaccattccgttggggacatttgttgcaaatttattaggtgcttttttaatgggtagtatcggcgcattaagcctttcactttttaaaactcatcctaacataaaaaaagggcttaccactggtttacttggtgcgttaactaccttttcaacatttcaatttgaacttgtaacactatttaatcagcatcattttatactatttactatatatggtgtgacgagttatattctaggaatactaagttgttacctcggtgtcaaaataggaggtagattttcttgattactattttgctcgttatgttaggtggaggaataggtgctgtacttagagcccttatcacaaatatatgccaacgcttattcaatagtaaaattcctattgcaacatctatagtaaatattacaggtagcttaattatcgggtttatgatgggacacgcactcgatagccatcatatgtttcctttctttgttacaggtgttctcggaggtttaactactttttcaacattatcatctgaacttgttaatatgttaagccctcaatttaaaccaatacgttttgtagtttattccctattacaatttattttaggtttcattgcttgcttttatggatatcgcatctaatattaaaataacttttactaacggttatattaatttatttcatagattatgatttctatttgtatcttgaattttcttattaatttagaagctcaacgaaactaaatccttattaaggtcctcaagctatcatgacaactagaatcattgtagttaaaataataaacatattctcaactcaacgatgttgtaccaatatataataaacatattctcaactcaacgatgttgtaccaatatataataaacataa

SEQ ID NO: 4049 - DNA, 3295 bp, Artificial Sequence
  Description of Artificial Sequence: synthetic nucleic acid sequence
taccatgatgtcgtttcttgttgcataaaacgtcctcctgtgtatctatttgatgaaaagtagcaggtttaatttttaatatattgaaaaaagcaaatttgtatatttaaggttatagaatcacattgttagaaataaatgtgtagtaggtaagttaaagtaattactcaagtcttgaagtgttttgcaatcgtgagcgttgattgctttttcaatttgatttaaagagattagtgcgttagttaaattacttttcacatagtacatagtaagtgttgatgtcttctctcacataagaacttgatgataatttactgttaacatataattcactacctaaaatgactcattctaatttatttggcatttcaatatatttaatatctatatcatcaatcaactccttatattgatgcataattctcactccttatttagttttagaaattgcatattgattatatttataaaatcaactcctttatgaaggtttaaattatgcgtaattttatatataaaaaagagacgtaatcatactaaagtgtaaattagtaatataagcgtctctctttatttatcgctatttttcttttgtttttattaatccataaaagctataatttctctcatttcatcttcagtaacatcaggtgtaatataagtgataatttgattgtttttcattacgaagttttattctgttaatttagtaacattaaacattatcagttacagtttaaattctctttattcctattggaatgttagaatgagtgagttttgtagcttcatctatttcccttcaatctatagtttattattcggtgaaatatctcggaaaaagtatttaacaatttcggtactcatataaaaccccatagtgttatataaagtaatttaaaaatataacaaactaaacggtgttacaatattatataaataaaatatattaaataatgaattcatgaggtgattctttttgaaaagagaacgattcttataaaaatgtatatatagttaataatagaatgattgatgaaaataaatagagcacattattaattgaaatgtgataatgaaagttgcgtaggttactaacttaaaagcatgattacattaaagacttatagttgacgcatgtagtccacattttcaataggggattgacttttggacgtattactttaagttgaaaataacatattaagctcaactactgatatttaataagcaagtaggtataattatacgtgtatataatttggaggaatgcattgtgaatttttggttacaggaacaagctcaatcaaatggaaatcgattagcgattgttacaaatcagttatctttaacgtacgaagaattatatcatcgtgcaaaaacaatcgcggaatatttaacttctttaaatcagaaaaggattggtttatatataagcaatgatattgattcagttgttttgattcatgcttgttggttagctcatattgaaatagctatgataaatacacgtttaacgcgacatgagatgataaatcaaatgaattcagtcgacatagcaacgattgtacacacgttgcctttagaattagaagggtttaatttatatcattttaatgatttaacacaattagataaacatgatgtttcaggttacaaatttaatttagaatcgattgcatcaattatgtttacgtctggaacgacgggacctcaaaaagctgtgcctcaaacgtttaataatcatttagccagtgctaaaggctgtaaacaaagtttaggattcgaacaaaatactgtgtggctttcggtcttacctatatatcatatttctgggctcagtgttattttgcgcgcagtgatagaaggattcactgtcagacttgttaaaaagtttcaaactgatgatatgttaacacaaataaagacttatccaatcacccatatgtcccttgttccacaaacgttaaagtggttaatggatgcaggattgactcaaccattttctttagaaaaaattctgctaggtggtgctaaattatcaccacaattaattgagcaagcattgacttatcgtttacctgtatataattcttttggtatgacagaaacttgctctcagtttctaacagcctcacctcaaatgctcaaagaacgtttcgatactgttggaaaaccaagtgaaaatgtcgaagtgaaaataaaaaatcccaacgcatatggacatggagagttattaattaaaggtgaaaatgtgatgaatggttatttatatcccaaatatttaaaagacacatttgataatgatgggtattttcaaactggagatatagctgaaatagatgatgaaggttacgtcataatatatgatcggcgcaaagatttgattataagtggtggagagaatatttatccttaccaaattgaaacaatcgcaaaagactttgaaggcattgaagatgccgtatgtgtaggaatatcagatgatacttggggtcaagtaccaatattatattatgtgacaaatcaagatattaatcaaactgaattaatagaacattttgagaatcatttagctagatataaaattcctaaaaaatattatcaggtcaaatctttaccttatacatcgacaggtaaattacaacgtaaaaaggtcaaaagtgaagacttgaatgagggaaagaataatgaaagttaaggcaatcaatctatatacttataaggaaccttttaaatcaccaatttcaacaccgaaagtgaagttaacgcatcgagaaagtttgtttacggaaatagtaacttatagtggagaaacttattatggagaatgtaatgcatttttaactaattggtatgataaagaaacaatactcacagtcgtaaacagattaagacagtggataccgcaagtacttcataaagatatgacatcttttgattcatggttaccttacctaaatcaaatgaatgatgcgccagctgctagatcaatggttgtcatggctgtttatcaaatgtataacgacttgcatgattttgaagtacaatacggtgctacagttagtggcttaactaatagtcaaattgaaacattattagaaacaagaccgaaacgtataaaacttaaatggtcaacatcactcatcaaagatcttgaaactatacgtttattaaattttgattgtgatattgctatagatgcaaatgaatcattaacaaagccatcatttttacaattagccaacgtaaatacatcagatattatatatattgaagaaccttttaaaattct

SEQ ID NO: 4050 - DNA, 3046 bp, Artificial Sequence
  Description of Artificial Sequence: synthetic nucleic acid sequence
ctctttctgtgatgactaccaactgcatataaggtaattcaaagccttcagaaagactaccttccgtcactacaacttgaccaccatcaatatcttcgtgaatatttgatactgttggaatatgcatttcattaagcattgattgaatacgttcaacttttgtttcagtttcaacaagaactacgacagtgtaatcttgatgcacgtatctttgaaattccgagcgcataatgtcatattgaccataaaattgttgaactggtttacaagagaacttaataatatgttgtaatggtacttgcatcgaagatgtaaataatgtgaaatatgcaacggcatgttgctctaataatgcgtcaaaactttcatacttcataaatccttgtccgataaatccatttccactctcaattaagttactcataaaatcttcaacttctgttgtaagtgtttcttctgtttccttaatacgattaaactcatcaactacaataatcgcgtttttttgaaaatagtcaataagggttgatggtttttcatacataaatgaaacaagacgtcgtaacaattgatgatcgaaaaaggtagattcaaacaacttaaaactttcatatgtctcttttaaatcattacgtacggacttttcaattttagggcgtgtatattcatatgcttttttaagttcattttgtaagtgttgtatcacttcatcagtaataatgtagtcactagctgttgtgatttcaacttgatttatattatcgttagaacgttgtgtttctacatcaaagtctctgatggaatcaacttcagtatcaaatagctctattctcacaggtgttcctatcaacggatatatatctatgattccaccacgcaatgaaaactcaccaatatgtgacactacactttctcggcgataacccatattaactaatttatttaagaatgcatcaacatcaatatcctgacctactttaagcgtcatttgatgatctttccataaatcaaccggtgttagccattttttaaagccgtttaaaggcacaataaataaccctttttcgccttgggctaacgcagtcaacgttctaacacgctcactcatcaattgtggactttgagtagaaaactcttcagtcattatatcttgaacaggatatttataaacttctgagtcatctacatattgtaaaatgtcagtttcgattttatctgcttggtataaattattagttacgagtagcatttgtttatgatcttttaaatatttttcagcaataattgttgccttcgctgacggggataatcccgtaactaaaatattctcttggccgaagacttcatctaattcttgaaaacgattatcttcgctaatgtaatttgcaatcattgatttcacttgacttcaccattaaattcattcataacatgatcaaaacgagaactttcaataaaagattctacagctcttgcagaatgttcaattaccttttccataatgatcatttcttcttttgaaaatttttgtaaaacatagtccggaacagacatcccatttgttggacggccaacaccaattcgaatacgtttaaattgatctgtaccaagcattttaattatcgatttcataccattatgaccgcctgcactccccttttggcgcagacgcacttgtccttgttctaaatctaaatcgtcatataaaacgatcaaatcttcaacatcgacattataataatccattaaaggggctacagcttgaccagataagttcatcatggtcattggctcaataaataatactttttcgccgtttaaacgttcaatagtatatgcacctttaaatttttgtttgtctaaagtaaattggtggcgttctagaatatcatcgacaacttcgaaaccaatattatgtcttgttaattcaaaacgtttaccaatgttgccaagaccgacaatgcatttcattattgttacctccactattaatattatgtatcttcacatattttcaaatgctattgctgtgtttattttaaaataaaggacgtaaaaatgattgaccactgatatatatcaatatgagcttggtctccagtaacataataatcacctgttgaagctgcttttgtgcgtgcttcatctttaaagtaacctttaaataaagccggtaagtctaaaggcacggcgatattacctttaacatttggaccaacctctttaccatcatcgtcaatgacagtaacaaaactaccaggtatacctttgcccatagaacccatacgtggttcagtatcttttagaaatccgatcaacaatgtactttcggtttgtccatatccatctcgaacagtaatattaaaatgacgtttaaattgttcaacaacttctcgatttaaaggttcacccgcagacaccgcactgtgtaaatactctaaattgtactgttctaaatgactaagtttagccatcatacgatattctgttggtgtacaacatagaacattaatttgataattttgaagtaactcgagatatgtttcagggtggaaacgaccgttatagacaaatgctgttgctcccatccctaatacagataaaaatggactccacacccacttttgccaccctggtgctgcagttgcccatacaagatcattctcttgtatacataaccaatgttttggtgccatttgtaaatgggcatacccccatccatgtgaatgcgttactgcttttggattgcctgttgtacctgatgtataagaaagaatcgccaaatcatctcgtgttgtatctgcgcctttaaggtcatcacttactttttctttttcatcttctattgaaacccaatcttctttgtgaccagctactataaatttttttaattggtcatattctttaacgttttcaaattctttagttagagaatcaaatgaaataactgcatcaatctcaccgtgagtaattcgatattgtaaatcttttgttcgtaacatttccgaacttggaacaatcgctatccctagtttcaatgctgcaa

SEQ ID NO: 4051 - DNA, 3217 bp, Artificial Sequence
  Description of Artificial Sequence: synthetic nucleic acid sequence
tataatcatgaggggaactagtatgcactaataaattcctcctcatctaaatcttcaaattcatctatatacatatcatacttatgatcatataatctcactttttttgcatcttctgtgatatcttcaattgtaagatttttatatccacgttcattagcacttaaaccttcacgactatttatccacgaaatttcttcatgtgatttatctctaagggcccacgttgcatattttccatattgataaattgcattttcaattatgaattcttctgtatcattaactttatttctaaaagttttatcttctacaaaataatcaaataaacctctcaaggaaggcaaaactgggccatgtacccaaccttcaaattgttcatcaatgatagtacctccagttaatgcaatagatgttttctgaatgaagtacattaatttatgaactttcatttcatcacctactaaactgtttccggtaatctcttggtattttgaaatcaagttttgaactataacaaaagtgtcattaggttgctgctccatttcaatcccacctttcatttcttaaataatataccctttttttagttaaaagtaaactataaaaacaaccaatgagaagtgtggcgggttagatatgtctatagtacttaattagtttattataacataaaaaaatagggtagccatagcgactacccttgtataatgacgtggtaattcaattatatcatttccagtgtattttaccccagtatttttcatttttgattttttgttgtttgtctgtgattttacaaacggcacaatagaaatgtttattacttgagcctggctgaacatatttaaatctaatccaccagtacccatcttttttgattacttggtcaaaaggaacataattccccttgtataaccacgaaccactttcaactacagtacctttaagtccaggtgacttacgtactttaatagtactgttagcagtgaatttacctccccagttccacgttgttttaattttagacggcttactcttaggcgcattgatttgtctaccgttgatagcctctgcaagtcgtttagtaaaactgttgatgttcttagtgatatagtccatgtcttttttactagtgataaagcctaactcaatcaatctgtaatttaaattgagttggcctgtaacgttagcatttaataaatcgtttctaggtgttacacctctaattttaccaaccgtcttacctagcgcactggataatgccttgtctatatcgtcggcagggtatctatcgcttacaataacgtgccctccacttgcttgatgacttgcagcgtctaaatggaattctacaatgacatcaggcttaacattctttttaacccaatataaaccataatctgaatagttacctacacgttgtccatataacgtatcttgatacaagtcttgattcattgatttgccaccgtataaaataactttattacctacactctcaagatatttctttattctaggtatgatttcttttctattgaagtcacgttcattatatccgtttgctacggcaccaggatcatttgaataagcacctttaccgtgacctgcaacaagcaagattttcttacctttcttagcttttgctttcttaactggcttagctttgcttttaactttatttttagtcgtttctttagcgtagaacggtctaataaaccacatagggaaatcgtagccatgtgtacgtcttgtagtaacttcaggaggtgtccaatacgcaccgccaacccaattttgttcaagtatcgttatatagttagaagtagcagaaatgacgataccaacatgaccataacccccgccataatttctgttgaatatcacaacatctccgggcttagctaagaatgataatgtattttcataaacagtagcttctcctgtaaaattgttccatgtcggaatgtctgcagcacccacaccttttaaagtatgaccgaataaataaagccaatattggttagctacgtcgaaacattggaaaccataagcaccgtcagggtttaacgctttgccctctaaactttttaaatatgcaattgattgtttatatgttctaacagatgtcattagaaatcatctccgttcatttgaggtgctccgcctgttgagtctgttccagctttaacttcatgcaatttttgttgtcctttttgtgccgcgtgagagaaattattatttttccaccatgtccacagggaaactgcgccagtaataatagaactaatagtcacttcatctactggaataggcgaaatgtttttagtagctaaaaattggttaacccaagctaaaataaatacgattgttcttacaattgaacctacatctgttttcatactcatatctccttttttaaataaaataaaaagacctaatcactatcgattagatctgaaatcaaaattcactaattatttatctatatttatctcgaatgtagtacataccttttaatcctactttaattaatcatattttttaaaaagtcgaacaatggatggataagccaagccacaccacctcctccaacaaatatacctgtagcttttaaaataaactctttattttctttacctttctcttttgcttcttgttcttcttgacttaaatgttccctaaacattcgagcatctttttcgacgagagacaatcgttgaccttgttctatgatttgtcggtttgtctttttctgttcagcactcatctctttagttgcatctaccatttgattaagtgtaggtttaaattctgctaatagcacacttaaattgttataattattcgtatgtttttcatcgacttctcttattcttttatgaatctcatccttatcgtcatagtaactttgaggtaactcattgtttggcataatgcaacactccaaagtaagcataaccaccacacgttaaagtagttaaaaagtaaataagaggtgacatccaatttaaagaatcactaataccagctaacgtaatgacaaagaaaaacacagaacaaataatccctcctaaaataagagtgatactataaactttgttaatattcctataaggtaaagccatagctgcaattgctaaacataaacctcctataaagaatggaataccccaaatacttaagggtattatttcattaatactgctataca

SEQ ID NO: 4052 - DNA, 3551 bp, Artificial Sequence
  Description of Artificial Sequence: synthetic nucleic acid sequence
taacaacgtgtacacctttagttaatcttaattgcttattgttacgtgcataatcgccacttctcacttcatcaacccaaggaccagaagcattaataacttttttagctttaatcgcatacgtttcgccatcaatcatatccaatacttcaataccatttactttcttattggaatcataagtgaagtgttctgattttgtataattaatgatttctgctccattttcagcagcttttttcataacttcaatagttaaacgcgcatcatcagtgcggtattccacatagtagccaccgccttttaatccatcacgtttaactaaaggttctttatttaacgtttcttgcttagataacatttttttacgttcggattttttgacaccagctagacgatcgtacatagctagtccaatagaagttgagaatttaccaaatgtaccacctttatgcataggtaaaagcatccattctggtgttgtcacatgtggaccattttcataaacaatagcacgttctttacctgtttctgcaactacccctacttgcagttgttttaaatatcttaaaccaccgtgtacaagtttagttgagcgtgaacttgtaccttgtgcaaagtcttgcatctctactaaagctaccttcatcccacgattacttgcatctaaagcaatacctgcacctgtaataccgccacctacgataacaacatcgtattcagtgtctcttaaattctttttaatatgatcccttttcaatgtagataatgacattatctaaacgcctcctagttataaataaaaaacgagaaatttatccccacaataacattaaattgttttgtacgaacaaatctctcgtttctcgattttcttattaacttatctagattataacacagttaagaaaatcaagtccatttaaagatttaaaaagtctaatacatagcttaatcttctaatttaaatacttgagtcgccttaacagcttttttccaaccactataaagtttatgacgttgatctgcatccatttctggtttgaactcagtttgaagtttccaacgttcacggatatcctctttatcatcccagaatccaacagctaatccagctaaatatgcagcaccaagtgctgttgtttcttggatttcaggtctttcaacagatgaatttacgatatctgcttggaactgcataatgaagttattttttacagcaccaccatcaacgcgtaaattttgaacttcaatacctgagtccttagacatagcttccataacatctcttgtttgatagcacaaagattctaatgtagcacgaatgaaatgttctttttccgtaccacgagataatccgaaaatagcacctcttgcttctgaatcccaataaggtgtacctaaaccaacaaatgctggaaccatataaacaccctcagttgactctactcttgaagcatagttttcggtttgtggcgcagaattaatcattctcaaaccatctcgtagccattggatagcagaaccagatacgaaaattgaaccttcaagtgcataattaacttttccatctaaaccgtatgcaatggttgttaacaagccactttctgacttaactgcttcttcaccagtattcattagcataaatccacctgtgccgtatgtattttttacatcaccacggtcaaaacatgcttgaccaaataatgctgcttgttggtcaccggcaataccagcaataggtacttcttgaccaaagaagtgatagtcgatagttttcccgtaaatttcacttgattctttaacttcaggtaacatttgtttaggaatatttaaaagttctaacaactcatcatcccattttaggtcataaatattaaacattaatgtacgacttgcattagtgtaatctgtaatatgagcagtacgtcctgacaatttccatactaaccatgaatcgattgttccgaagagtaaatcaccattttcagctttttctctagcaccttcaacatgatcaagaatccattttactttagttcccgcaaagtacgggtctaaaagtaaacctgttttttctctaaatgtttcttcataaccctgttcctttaaatttgtacaaatatcttgtgtctgacgtgattgccaaacgatagcgtgatagattggacgacctgtatttttatcccatacaactgtcgtttcacgttggtttgtaataccaataccttcaatttgatttgcattaatattgttttcattaagtaactcagccataactgatagaacagatgtccatatttcattagcatcatgttctacccagcctggatgtggaaagtgttgtttaaattctctttgagaaacacctttaatttctccttctttattaaaaagtatcgcacgtgaactcgtagttccttgatcaattgataaaatatatttttccataggtatatgactccttcaaaagtgaataatgaattcattatctaaacaattatacattctaaaatgataattaaatagacttttaaatgtgattgttcaacactcatgaacatatcacgttaatcatacggttatatatacgaatgccatatgttaataaattgattcaatatcgttgtttttattttgagatatcttatttagtatcacgccaagtataagtgtgaatataagtacaattaaaccaatgaaacaactaaaattgaatgtttgtttataaaacacttcgtaaacaatcgcacctaacataccacctgccatgggtcccagaacgggtacaattgcgtaagaccagttagatttacctttaccatgaattggcaaaatagcatgtgcaatacgtggtgctaggtcacgggctggattaatagcgtaaccagtagtacctcctaagcttaaaccaattgctatgataagactaccaacaataattggatttaaaccatcagcaattttattaaccccgataaataaaattcctaatgttaaagccatagtcccgataatctcacttaaaaagttagcaaaataatttttaatggctggtgctgttgaaaatacacctaatttgactgctggatcttctgtaactttccagtgtggtaaatacattaaccatacaaaaactccaccaacaataccgccaagcatttgacaaacaatatagcccggtacttgcgcccagctaaatccaccatccatggctaaagcaactgttacagctggatttaaatgtgcaccagaaaacgttccaacagcataaacgcccattgttactgccaaaccccaaccaaatgcaataacaatccaatctgcaccgttaccagcacttctctttaagttaacgtttgcacaaacgccaccaccaaaaagaataaggattgcagtacctaaaaattctgctaaataagcattcatatacattcctcccaaaaaacagggagacccctacgtcaaatatattacttgtagaaatctcctcgtctctcttctaatattaactttttaacttgttataagtttactattacgttgtaagc

SEQ ID NO: 4053 - DNA, 3264 bp, Artificial Sequence
  Description of Artificial Sequence: synthetic nucleic acid sequence
aaacattgagtatggcattcgcactaaaaaacatcaatgttaaaatatataatcttaaaaatggccaagacatggcacctttcatattgtcactccttagattgatagttgtttatcaatcagttctcttgtataaccattttgttgcctatgcaattcacttatagatgtcctagcttcgatacagccatttttaaaaataagcaagtcatcacatatatacgtggcagcttgtatatcatgagtaataaaaatataactcagctgatgtgagtgacgtaaccttttcaataaatctaatatttgtgtttgcatagacatatctaatgaactaatcgcctcatcaaataatatataatctggttgcatacatatcgcacgtgcaatagctacacgctgtgcttctccacctgaaagcatatgtggataacaatacaaacaatcagattttaaccctacttcacgtagtaacgctgttacatactcttccatattctcctttgatgtacatcgacactgattcattacttcaaacaaaatatctttgacagtatgaaaaggatgcaaagaagaagtatagtcttgaaaaaccgcagcaattcgatgacgtctcactttttttaaatgaacaggctgaccgtccaacgtcacttgtccttgatctggtttttctagtcctaaaatcatacgactcaacgtagactttccacttccactttctccaataattgctattgatgcaccagtggggcaatcaaatgacacgcctttaactacaggaatacgtttatcacgaaatattgatttttttccataaaatttaataacattttgaaccttaagcattgaaatcacccctcagcactaactgaaaataatcatgaattgtctttttagtagataataaataagctgtatagtgatgacgaggttgttgtaataccatatttgttcgaccttcttctatcacgcgaccttctttcataactacaacacgatctgcaattttattaatcactgtgaggtcatgagatataaaaatcatggcgcaatcaaaatgttgttttatatctttaaaagcattgatgacttatttttaaatccatggattcttcatcgactgtcaacaaacagatatggtaaaatgaaagaatataaggtaaagttatttctcatcattcatactgtaaaattttagtttatatactttatgcatcacattaatgtataaacaatcttgtacattttttcaattaactttgcagatattctaaggagaatcaaacttatggttaaatttatacactgtgctgatttgcatttggacagtcctttcaaatctaaaagttatcttagtccaaatatttttgaagatgtccaaaagagtgcatatgaaagttttaaaaacatagtcgacttagctttaaaacaggaagtcgattttattattatagcaggtgatttatttgatagtgagaatcgtacattgcgtgctgaagtctttttaaatgaacaatttgaaagattaagaaaagaacaaatatttgtttatatttgccatggcaaccacgatcctcttacttctaaaataacaagtcagtggcctaataacgtatccgtattttcaaatcaagtagagacatatcaagctatcactaaatcaggagaaacaatttatattcatggattcagctatcaaaatgatgcgagttatgaaaataaaatagacgcatacccatcaagtcaaggtcagaagggcatacatattggtgtattacatggaacttatagtaaatcttcggtgaaagaccgttatactgaatttaggttagaagacttaaatcaacgtttataccactactgggcattaggacatatacaccaacgtgaacagttaagtgacatgccagtcattaactatccaggtaatatccaaggaagacatttcaatgaattaggagaaaaaggttgtctattggtcgaaggtgatcatcttaaactcactacacaattttatcctactcaatttattaaatttgaagaagctacaattgaaactgatcatacatctaaacaaggactttatgatgttattcaatcttttaaagataaagtaagaactgaagggaaatcattttatagattgaacgtacgcattaatagtgaagacattattgcaccacaagatttaattcaattaaaagaaatgattactgagttcgaagaaaacgaaaatcaatttgtttttattgaagatttaaatcttcaatatgttcaaaatgacgaaatgccaatagttaaagagttttcaccagaattacttgatgatgcgtcactttttgattcggcaatgactgatttatatcttaatccaagggcttctaagtttttagatgactataatgaatttgataaagttgagttagtcaatcatgcagaaagacttttaaaggatgaaatgagaggtgaacaaaatgataattaaatcattagaaatatacggatatggccaatttgttcaacgtaaaattgaatttaatcgtcaatttactgagatatttggtgagaatgaagctggtaaatctactattcaagcatttattcactctattttgttcggatttcctactaaaaagtccaaagaaccacgtttagaaccaagattaggtaatcaatatggtgggaaattatcactcattttcgacgatggcattgaagcagaggttgagagaatcaagggaagtgctcatggagatgtcaaaatttatcttaaagatggtactattcgagatgaagtttggctaaataaaaaacttaattacatttcaaagaaaacatatcaaggtatattctcttttgatgttttaggtcttcaagatattcataaaaatctagatgaagagcaactacaagattatttattagaagcaggtgcacttggatcaactgaatttacaagtatgagagatagaattggacaaaagaaagaagaattatataaaaaatctggaaaaaatccaattattaatcaacaaattgagcaacttaaacaattagaaaatcaaattcgaaatgaagaaagtaaacttgatacatatcatcgacttgtagacgataaagataaatcatcaagaagactagaaaatttgaagcaaaatttaaatcaattatcaaaaatgcatgagcaaaaacaaaaagaggttgctctacacgatcaaacacaagaatggaaaaggttagaacagtcgcttaatatagagccta

SEQ ID NO: 4054 - DNA, 3158 bp, Artificial Sequence
  Description of Artificial Sequence: synthetic nucleic acid sequence
tggattccagttacctccaggttcagcaccagtgacggcagtgttaatcatattatctattggtatagcaggtggtacgttacaagccactggtggtattgactatttagtatacattgcatcacgtgtgattgaacgctttccaaaatcaattatatttatagcgccaatgattgtctttgtctttgtttttggaattggtactgcaaatatagctctttcacttgaacctatcatagcgaaaactgcacaaaaagcacgaattcagcctaaacgcgcattaactgcttcggtacttacagccaatttagccttactttgtagcccggcagcttctgctacagcttatattatttctgtattagcagggtatgaaatatcgatgggcaagtatttaagtattgttttacctacagctttaattagtatgttaatgcttagtacattttgtacatttgtaggacgaaaagaacacgtgcgtgatgagtcagaacgtttagttcagatgccagaagtcgaaatcaaaaatgacttttcattaaaagtaaaaataggtgttatctcattcctattatgtgtcatgggtattttaacgtttggcatatttcctaatctcatgccgcaattcaatgtgaatggagatgtagttaaagttgagatgactgaaattgttcagttctttatgtatctcagcgctacaatcaatttattattaataaaaatcaatacttctgatattctgtcatcgaatattacacaatctgcaatgggagcactttttgcagttcttggcccaggttggttaggtgcaacaatatttaatgctccacataacttaaaaatattgaaaaatgatattgggtcaattattagtgaagtaccttggcttgttatcatacttgtttctgtagttgcaatgattgtcatttctcaaacagctacagcatcaattatggtgccgatagttatgagtttaggtatacctcccatctattttgttgcgatggtacaaacattaaatgtgaatttcgttattccagctcaaccgacactattatttgctgtagaactagatgaaacaggtagaacaagacctacgagctttatgataccaggattttttgttataacagtatccgtcattacaggatttgttattaaaaccattttaggatattaatcaatttttataagttggaatttaatcgccatatatatagtgttttaaatacttcatctcatcgagtaaggtatttgaatgactaaatattggcgattttttatttatagattaagagtgagtatcagtggagaaaaaaataaaataaatatatatacgttaaaagtgtataaaaatacgatatgaaatattgtaaagttcgttcattttgttaaattttaacttaacactgttgtcatagcaatttaagatgaatatttgagaggcttaaattatataattattcaaattagattttgatgatacatgtatgtaatttgcattattattaaaagttcgttattgtcttttttgtgaatcactatccattgaacgtaatttaaagtaaagattcataaattaatattagggggatcacatttgaaaaaggaaaaagttatggactggacgaccttcataggcgtagtcattgtgttactttttgctgttatacctatgatggtttttccgaaagcaagtgaaataatcattaccgatatcaatagtgccatttctaattcaattggatcggtatatctctttatgggactggctatattttgttttgttttatacatagcatttggtaagtatgggaatgtcacgttaggaaaagcgactgacaaacctgaatttaataatttcacatgggcagccatgttattctgtgccggtattggttcagatattttatattggggtgttattgagtgggcattttattatcaagtacctcctaacggtgcaaaatcaatgtccgatcaagcacttcaatatgcaactcaatatggtatgtttcactggggacctatagcctgggcaatatatgtgctaccagctttgccaatcggttatttagttttcgttaagaagaaacccgtctataaaattagtcaagcttgtcgaccaattttaaaaggacatacggataaattattaggaaaaatcgtagatattttatttattttcggtttgctcggtggtgctgcaacatcactcgctctaggcgtgccgatgatctcagctggtattgaacgattgactggtttagatggatctaatatgattttacgttcaatcatcttactaactattacagttattttcgcaatcagttcttacacaggtttgaaaaaaggtattcaaaaattaagtgatgttaacgtttggttatcatttttattattagcatttgtattcatcgtaggtccaactgtgtttattatggaaactacagttacagggttcggtaatatgataaaagatttcttccatatggcgacatggatggaaccatttggtggcataaaaggtcgtaaagaaacgaatttccctcaagattggacaatattctactggtcatggtggctcgtttatgcaccgtttattggattgtttatcgcgcgtatctcaaaaggacgtacacttaaagaagttgtattaggaacaatatgctatggaacattaggttgtgtgttatttttcggtatttttggtaactatgctgtatatctacaaattactgagcaatttaatgtaataagctatttaaacaattatggtacagaggcaacaatcatagaaataatgcatcaactaccattctcgacaattactattatcttattcttaatatcagctttcttattcttagcaacaacattcgattctggttcatatattttagcagcagcgtcacagaaaaaagtgataggagaaccgttacgtgctaatcgtttgttctgggcgtttgcgttatgtttactaccgttctctttaatgctagttggaggagaacgtgcattagaagtattgaaaacagcatcattacttgctagtgtacctttaattgttatatttacgctaatgatgatttcgttcttaattatactcggacgagatcgtatcaagttagaaagacgtgcagataagcataaag

SEQ ID NO: 4055 - DNA, 3376 bp, Artificial Sequence
  Description of Artificial Sequence: synthetic nucleic acid sequence
caaacatcgcgtttgcgaatcgcaaaacttctatattttgcaccatatctttgccaagatagtgatctatccgataaatttcttcttctttaaacgaacgtcttatttgattatttaatgattcagcagatttaagatcactgccaaatggtttctctataactaagcgtttaaatcctgtagtttgagtaagaccagaagatttaaggtaatctgagatcactccaaaaaattgtggtgccatcgctaagtaaaacagacgattcccacctaaagcaaattctgaatctagtcgctcactaaattgaagtaatgactgataactttctttatcactcacgtcagttttatgataaaaaacatgcgtcataaactcatcaattctatctgtatctttaacataagtttgaattgacgctttaacttggtcgcgaaattgttcgttattataatcgcgacgtcctataccaataatagcaatatgttcatctaaattgtcttgttgatataaatggaatatagaaggaaatagctttctatgactcaaatctcctgtggcaccgaatattgtaatcaaacagggaatgtgtttttgtttagtactcaagattaaaacctcaattcttaaataaatataataaaagatgatattctttatgattaaacataattttagttacgatacttttattgcgtagtattaaaagtaactcaatcgcatagtcaaatatgtttatggatttcatttgatatgaatacaattttaattcatatcaaagcatactagattaatttattatatgataatcacaacctaaggtcattatatttgcttaaagttaagtaaaataaattgaaaaatacattatgacttaaaaatcaactttaacaaatatgagacacaagtttgcgcttaataaaataatatcaaaaatgattattcgataatagtttataattatattttatttcttgatatagaaattattcttacgtatgataaaatgagttaagaagaggaggatgaagcatggaagttacatttttcggtacaagtgctgggttaccgacgaaagagagaaacacacaatccattgctttaaatctagaaccatattcaaattcgatatggttatttgatgtgggcgagggaacacaacatcaaattttaagacactctattaagttagggaagatagatcatatttttataacacacatgcatggtgatcatatttttggtctccctggacttttaacaagtcgttcgtttcaaggtggagaaaataaaccccttactattatagggcctaaaggtattcaaaattacatagaaacatctttacaactttctgaatcgcatttgaattatccgattacctatatcgaaatcaatcaacaattagcgtatcaccacaatggttttactgtacaagctgaaatgcttaaccatggcataccttcattcggatatcgtattgaagccccaatcacgcctggtacaatcaatgtagaggccttgagaggtattggactagagcctggtccaaaatatcaggaagtcaaattacaagaaacgttcgaatataaaggattaatttacaattcggatgattttaaaggtaaagctaaacctggtccaattatcagtatatttggtgatacaaaaccgtgtgaaaatgaatatgaattagcaaagaactcagatttaatgattcatgaagcaacttacattgaaggagataagaaacttgctaataattaccatcatagtcatatagacgatgtatttaatctaattaagcaagctaatgtaaataaaagtcttatcactcatatcagtaacagatataacattgatgaagttacatcaatatacaatgagttatcccttgatcaaacttctccacatttttatttcgttaaagattttgatactttcaaaatataataaaacgcttttctctcagaatactatcttaggagaaaagcgtttttatttattcatcttctttatgtgataattccatacttctattcacagctgcacctaaacaatcttcaaacatcgatacaatatcatattgagatagtgcatcaagtccagcttgtgtagtaccacctttagatgtaatatttttccttaattgagacatacttaagtctgaacgctcaatcattttacttgttccaataattaaattgcgtatagattcttcgacttgatttcgttctaaacctaattctgtacctgcttttacatattgttcaaatacatgatataaaaatgcaggcccacttcctgtaattgcagtaacttgatgtagatgttcttcggagacttctataactgatccaaatgcattgattaattcatccacttcatttttagatttaggatcaaaattatttgaaaaacttattccagtaaccgaatgtccaacttgagcatttgtatttggcataatacgagctaatggattattggtattaagctgctgacgaatataatcaatagataaacctgccattatagaaataaacctattatcattagtaatgtgttctctaatacgattagctaaattttcaaaatcatggggctttgtacctaaaaatacataatcggcatctttgagtaatgcttcatcatcataactataattaacccctaatttttctgcaaagctttttaatgcttgttcattggatttattagttaaataaatatcatttgcatttaaattgttggaattaataattccagtaaaaattgcctgcgccatattaccagcaccataaaatacaagtttcatattcaactcaactccttcaattttgaattctattcattgacttaaagttatgcatatatagtatcatatatcatagataagtaatattacacataaataaaattgaatgctatcacacttattaagcttgttattaaaatatacataaaggaggagcgacgtgataggcaaacactttattataactggagcaacgagtgggttaggttttgcaataaccaatgaattacttcaaagaggggcccatgttactatacttgcaagaaatatagataagttcaatcgaatcaaagaaaactattttaaacctgaacatatcaatgtgattaaatgtgatttaatgcaacgaaaagatattgaatcattacaaaaatttttaaatacacctataaatggtttcatctacagttcaggtgttggatattttaagtctataagtgagcattcaactcgtgaagtagtagaaacttacgaggttaatcttacaaattttaatttgttatacaaagtgattcaaccacaattagtaaaagcagcatatatcgttggtatatctagtc

SEQ ID NO: 4056 - DNA, 3152 bp, Artificial Sequence
  Description of Artificial Sequence: synthetic nucleic acid sequence
ctgatattaatccaccgacaagtgcactaataaataagctaatgaccacatttaatcgacataaacatagtatgatcattaatatgactgcgattacaacagcatttatcattctgcctcaccctttatcactctatcgaactaaagtatttataaaatacatactagcaagacatatatttaatgtcaatgttaaaaaagactcaacgattatatacatttagttatatttagttgcttattttcaataactgaaatataacacttaaaaatgtaataagttgagtctgtataactttatttatatttttgttgtaaccactctacaactgtaggtatcatgtaacctgtcggaccctttggccctttatatgtagcacttttagttgttgcagggcccgcgatatcaaagtgaatgtgtgggatgtcaccactaaaatgcgaaataaatgctgctgcaaacaatgcttttccttgaccgttcgtatgattgactaaatctgctacatctgattgtttaattaaatgtctttcagtctctgtaataggtaattcgaatactttttcgtctacatgacgtgcaactgttaataagtttttaagttcattttcagcatgagattggaaagcagccgccttgtcatcacctaaagctacaatcgctgcacctgttaatgtagcaaaatcaagaattagttgtggtttaaattgtgttgcatagaatactgcgtcacctaaaaccattctaccttcagcatcactattcaacatttctactgtttccccattaagcgcagtaaatacatcatctggtttcatggaagattcaccaatcatattttcagctgaagcgattattcctacaatatttacaggtaggttttgcttagagatcacatcaatcataccaataacattggccgcaccgcacatatcatatttcatagtttgcatacctatcttagacttaatactatatccaccggaatcatatgtaatacccttacccactaatgaaataggtggttcatcagcttctgcaccatagtatgataccgtaattaatctcggaccatgattagaacctttacctactgcatgtattaatccaaatccttcatctataatttgtcggtgatctttgatatctacactaacggaactcccttcgaaatgtttttttatttcttcggcaaaatattggggtgttaaaatattcggaggcatttgacttagttcacgagcataatttatagattcacccaattgttggccttcgttaatcttcgtttctatattatgctctgtcgtttgtatatagactctaccttgatatggaggctttttatccgatttataatggtcaaattcaaagatagattgtgcactttgtaaacctaaagtttgacaaatttcaacaatgttaccatgtttagatttgaaagtatctaacaataattcacaatccgtgacatgaacgtcttttaaatattgaaacaactgaccccaaacttttaataaacgttgatatgataagatttttaagtttcctagtcctacagttaataatcttttaggcttttcatcaatgtagataagcgttgatgatattttgccgattgagctattgatgacatgatattgttttaatgtttctaatcgttctttaattaacgtcttatgatattttatctcacctaattggttgaggtgatctggcacacccaccacaatcgtttcaattgatgttggcgtatcttgattaataaaaaattgcatatagatcctccgttcctcattctgtataacaataattataagttatgaacaccccaatattaaacaaaaccactttttactctaactctaaataaaaaccacttttgtttaattaagtgtgaaattcttcttcatcatatttttctgataaaaaataacctgggacaatcattttgtcccaggtattattaaaatataaacaatcgatgacaaaattaatttgagttgtttacatattttaactctagtcatctttgctaagggagacaacaaattatgtctcgtacctttttattgtttttttatatctattacttgattaaaattttccttttttaaaggctaatcctatgccaccaagtttgtaaatcgcacgagtatcaataactttcttcaagaatgctgcttttttaccagcgatatctctaccatatacaattccaacaccatcattagcacctaatgaacatacagttccacggttaacatattggaaatcttgtgttgattcaccatttaataaacgtttaatgttgctagcagtatgctcaccttgttgcatagcaatttgagctgttgttggtaatggacgctcttcaccagctggaataaacgctgaacaatctcctataacaaagatgtcattatgaccttcaattgttaaatcttgtttattgataatacgtccacgtttaacaccttcaaatgattcttccattaaatgacttccacgcactccagcagtccatacagaagttccggcttctaattgttgtttttctccattgacttcaacaacgaaacctttttcattacaagcgacaataggtgttgcaattttgaattctactccacggtcttctaaatattttactgcataactaactaagtcgtctgagaacatcggtaacattttaggtgctgcttcaacacatgttaacttcactttactttgatcaacaccatatttactgcataattcaggaattctatcagttaattcacctagaaattcaattcctgtaaatccagctcccccaactaaaatagataaatctttatcatctttttctttagaagcagcataatttgcgaacttatcttcaatgtgacgagacaacttacgagaagttaaaacgttctcaatttggaaagcatgttctttcataccatcaataccaaatgtttcgctaacaaaacctagtgcaacaactaagatatcaaagtcataaacacccttatcagtttctacacgtttagcattacgatcaatttttgttacctcagcaacaacaaaattcactttatttttgttgacagttttctcaacaggatacaataaatcttcataattaatcgtaccggcagaagct

SEQ ID NO: 4057 - DNA, 2956 bp, Artificial Sequence
  Description of Artificial Sequence: synthetic nucleic acid sequence
tcaacatatgcatgttttattatgtgttgaaaatagttattttaagaataaagctaattatataactcaagaagaatgggttaatttatggcaaaaagcattacaagtaaattatcgacccgtagcaaatattaaagcgatcaaaccaaatcaaaaaggcgataaagatattcaagcagctatcaaagaaacctctaaatattcggttaagtcatctgattttttaactgatgatgatgaaagaaatcaagaaatcgtgaatgatttagaaaaaggtttatatcgaaaacgtatgttgagttatggtggtttgcttaaacaaaaacataagattttaaatttagatgatgccgaagatggcaatttgattaatacaagtgacgaagataaaacaacagacgaagaagaaaaagcacattcaattacggcaatttggaattttgaaaaacaaaattattatttaaaagatttgaaacgttagctaaaaagctagcgtttttttatgtctttttgcccctgcgggaactatagcgttcaaccggcatggttgaccagttttcatgttaacttttaagtttgcatgtaaatgggcagtgtttatttttttctgcccagtttgctaaatttttaatttgcatataactgggcagtgtttatttttttctgcccagtttgctaaatttttaatttgcatataactgggcagtgtctaaaaaattagtcactggttttgctcaaatttttgtttgtgaaattaagatatatttatttggctcatatttgcgttttaaaagcgtatatagacttttaggtataaaactatatgatttaccccctgaatctttaaaatgcccccttaaaattcaaataaaggcatataaaaataaaaagccaacccagataaaatggattggctttttatttgcttttgcgaagtagattataaaaaactacttttaataagcaccctaaatgtgatgtctatattataacaagaacacgcatttatgccgagaaaatttattgtgcgttgagaagaacccttaactaaacttgcagacgaatgtcggcatagcgtgagctattaagccgaccattcgacaagttttgggattgttaagggttccgaggctcaacgtcaataaagcaattggaataaagcaattaatgcgatgttccgaaaatgtttaacgaaactacgccgactatgattaaaactatagatactatagttattagatttatttgttctttgaaaataattattgagactacggttgttaagactaaacctagtcccgcccaagttgcataagttatatttagtggtaggtgttgcattgttttacttaaaaaatagaaacaaattccaaatgaaattattgttcctaaggatggtataaattttgaaaagccttctgaagatttaagaaatgcacttccaataacttcagtacttatggctattattaaataaatataaggcatttttaactccttttaattttcgtattttatttaattttattctaaaggatggtataaattttgaaaagccttctgaagatttaagaaatgcacttccaataacttcagtacttatggctattattaaataaatataaggcatttttaactccttttaattttcgtattttatttaattttattctaagtattttttaattgtagtcttgtattttgagtgtcattcgcgtggtatttttgtggattgatggtttttgaaaggtttttgaaacgagttgaaaacgagtttcttcttgtcttgatactatatagaaataactcgattttaaaattatagctgtaatccttggtatgtaagggattatagctatttttcttgttgaaaggaatttttgacataaaaaaaccggttctgttgcaaagttgaatttatagtataattttaacaaaaaggagtcttctgtatgaactatttcagatataaacaatttaacaaggatgttatcactgtagccgttggctactatctaagatatgcattgagttatcgtgatatatctgaaatattaaggggacgtggtgtaaacgttcatcattcaacggtctaccgttgggttcaagaatatgccccaattttatatcaaatttggaagaaaaagcataaaaaagcttattacaaatggcgtattgatgagacgtacatcaaaataaaaggaaaatggagctatttatatcgtgccattgatgcagagggacatacattagatatttggttgcgtaagcaacgagataatcattcagcatatgcgtttattaaacgtctcattaaacaatttggtaaacctcaaaaggtaattacagatcaggcaccttcaacgaaggtagcaatggctaaagtaattaaagcttttaaacttaaacctgactgccattgtacatcgaaatatctgaataacctcattgagcaagatcaccgtcatattaaagtaagaaagacaaggtatcaaagtatcaatacagcaaagaatactttaaaaggtattgaatgtatttacgctctatataaaaagaaccgcaggtctcttcagatctacggattttcgccatgccacgaaattagcatcatgctagcaagttaagcgaacactgacatgataaattagtggttagctatattttttactttgcaacagaaccgttttttgtatatagtcttataggaattgctatattttttgtgccggtaacgattaataataactcttcaattttattagatcattttgtcacatggataagtagcgcattacctcttttaactaagatattcataatgattatcattatactaggtgctatttatccatttattaaagggacatggaatcggaataccgttgaaacaatttttagtttatttaaagttttgggagtcattataggcgttttgttaatttttaacattggg

SEQ ID NO: 4058 - DNA, 3321 bp, Artificial Sequence
  Description of Artificial Sequence: synthetic nucleic acid sequence
ctaaatgggttcacttattaaattcgcgtgagtgtcatcctcaaataatcaatggttatggaccgacagagaatacaacatttactacaacttttgcgattccacaagagatgccttcacgtatacctattggtttacctattagtggaacgacagtttatgtcatgcaaggtaatcgtatttgtggcgtaggtgttccaggtgaattgtgcattggtggtgcaggtttagcaaaaggttatttaaatcaacctaaacttactgctgaacgttttattcagtcaccttttaacaatgaaatgctttatcgaagcggtgatttagttcgtcttcaagaagatggctatattgattatattagtcgtatcgataagcaagttaaaatacgcggttttagaatagaattatcagaaattgaaaaagcattagaagctatacgtgatattaataaagctgtagtcatcgttcgagagcaagaccaagataaacaaatagtggcatattatgaagcatcgcaattaaaatcaacaggtcaattaaaagatattttaagtgaaacattacctgaatatatgatacctgtgcattttatgaaggtggatcgtatacctatcacgatgaatgggaaattagatgtgcgtgcattacctgaaattaatctaaagaataatagaaattatgtagaaccacgtaacgatattgaacgcacagtttgccgtattttcgaagagattttacatgttgatcaggtaggtgttaaagataatttctttgaactaggtggacactctcttagagcaacattagttgtaaaccgtattgaagaaaggttaaaaaaacgtcttaaagtaggtgatttaatgaaatcgcctactgtagagcaacttggacaacaaattgaagaactgcaaaatgatgtctatgaagtgattcccaaagcaaatgaatcgtatcaatatgatttaagtgcgtctcaaaaaagtatgtatcttttatggaaggtcaatcctaaagacacagtgtataacattccattcttatggagattatcttctgaacttaatgttatgcaattgcaacgtgcattatctaagttgattgaacgtcatgaaatattacgaacacaatatgtaattgatgacaatgaagttaaacaacgtattgcgacacatgtttcgcctgattttgaagaggtaaccgacatctctaacgaacgagcaagatattattcaatcatttatggaaccgtttgatttagaacaaccaagtcagatgcgagttaaatatatacatggaccacaacaagattatttatttatggatactcatcatagtattaatgatggtatgagtaacacgattttactatctgatttgaacgctttataccaagataaatcattacctgaacttaagcttcagtataaagattatagtgagtggatggtgcacagagacttatctaaacaacgtcacttttggttacagcaatttgaaaatcaggttccaatattaaatatgcctacggattatcctagaccaagtattaaaacaaccaacggtaatatgttgacgtttcattacaatcgtcaaatcaaacagcaattgaaatcttatgtagaacaacatcaagtgacagactttatgttctttgctagtgcaatcatggtattattgcacaaatatacacgtcaggacgatatcgctattggtagtgtaatcagtgcgcgtactcatcgcgatactgaaaatatgttaggtatgtttgctaatacacttgtatatcgtggtcgaccacatgatcaaaagacatgggatcaattgatggctgagatgaaagagatgtgtctaggggcatatgaacatcaagaatatccttttgaaagcttagtcatctatgaatgggcctatttctccatccataacagcgtctactttaccagtttcttcattcgtacgatgatctttaatcattgaatatggatgaaagacgtaagaacgaatctgacttccccatccaatgtctttttgttcgcctcgaatttcagccatttcttgctcttgctcttctaactttaattgataaagtttggacttcaacattttcattgcagcttctctattttttatttgagatcgttcattttggttgttgactacaatacctgtagggtgatgtgtaattctaattgcagactcagttttgttaatatgttgtccaccagcgcctgaagctctaaaagtatccactgtgatatcatctgggttaatctcgatttcaatttcatcattattaaaatcaggaataacatcacatgatgcaaaagaagtatggcgtctaccagatgaatcgaaaggtgaaattctaactaaacgatgaacacctttttctgcctttaaataaccataagcattatgtcctttaataagtaatgtgacacttttaacgcctgcttcatctcctggaagataatcaaccgtttcaactttaaagccattttgttcacagtaacgttgatacatcctaagaagcatacttacccaatcttgtgattctgtaccgccagcaccgggatgaagctctaatatagcattatttgcatcatgtggtccgtcgaggagtaattgtaactcatattgatcaatttgttcttcaaattgctgaacttcctcttctaattctatcttcatatcctcatcatattcttcttgtaataactctctcgtcgcactcatatcatcgacagcatttgtcagttgataatacccatttactatagattttagtgcattgttcttatcaatgatatcttgtgctttagtttgatcattccaaaaatcaggatcagtcatcatttcttcatactcttgtatgttcgtctctttattttctaagtcaaagagaccccctaatttgatttaagtgattttgatattcttctaaatttcttttaatctcagatagttccattcatcttctctcctatttaatcattctatgtcataatatttatatcatacagtatatgcctattttttaaaaataaacggccattccatcgctatatcatattactaagcatttaacttacaagcgatgtaaataaaggctgagtcattcataatttgatatgcctcagcctttatatttaaactattttattgattacgctttcccatgacaatttttatattttttaccactaccacatgggcatggatcatttctacctacctgatcaccttttacaatcggttggggctttgctttttctttgccatcttcagcagttacatgttttgcttcaccaaagcttttag

SEQ ID NO: 4059 - DNA, 3148 bp, Artificial Sequence
  Description of Artificial Sequence: synthetic nucleic acid sequence
gatacaaaattaatctctggatatagtgctgctaatgtagttataaattgtcccattcctgaaccaatttcaatataaatcggttgttctttttcgaaccactcagacattttacctgcgtgagcaccatccatgtctactaaatcaggatggttctttaaataatcttcggcccacggtttgtaacgaactctcatcattaattactccttatataaataagttactattcattacttcatttaaaaatttcagccatgtattcatatctctatagcgtttttgttcttcataccattgaataagacctattgcttgaataactgtgtaccatttcatacgtttattcaaattgacactttcttcaacgccataagttttaaaccactgagaccatttgttttgaggaacgtaattgtaaagcagcataccaatgtcaatcgctgggtctgcaatcattgcaccttcccaatccacaaggtaaagttcatcccgatctgataataaccagttgttatgattaacatctccatgtacaacagtaaagaaacgtgcgtctaaattcggtatatgatcttcaaggtaagttaaagctcttctcacaacatgatgtgtcaaaacttctcttgaaagtgatgcgttaattttattcaacataatgtcaggcgtaataggttccatctccatacgctttagcatagttaataaaggtcttgaaccgtgaattttatgtagtagttcagcgactcttgtttggttcatttcatcttcatttaattctctgccatttttccaatgctgagctgttactacttcacctgtttcaatacgtttcgtccaaacaagtttaggtacaattccttctgcagatagcgcagcaataaaaggatttgaatttcgttttaaaaataatttttgtccatcttgttcagccatatatgcttcaccagaagctcctcctgccgaatcaagtgtccaccctaactgataaaactgctccaacacgttcacctcactttcaactagaaaatggctcaagaaatagtttttcgtgagccatatattctaatttttacaaagcgtttgttttttacactttacatttaatttgttaacagtttatgtgagctacttaagtcaatacttagtcccatcttaatcagacttatttaatccgttcataatttatcactcataaaagattttataatttttagggttacatttcaactaaaaatcagaaacaaaaagatacattttactagtctaatgtctctttgatttctaaatcgctttattataaattataacacattataagatcagatttacggtgaaataagacaattattttaaattttcatcctcaaactataaatttaaaaattttaaatactatgcgattgaatatacttttcaaatccttgttgtaattgtcgtgttatagtaccaacttgtccgtcttgaacattttcaccatcaatttttgtaattggcataacttctgcagaagtactagaaatgataacttcatcagcacttttaagaaattctactgtaaatttttcttctttgaatggtatttgttcatcctctgctatccattttatgacacggcgagtaattccgttcaatataaaattattaactggatgcgtgtatatcactccatctttaattgcgtaaacattactagatgcaccctcagtgacaatatcacctcggtgttgtatagcctctgcagcattatatttaacagcatattctttagctaatacatttcctaataaatttaaacttttaatatcacaacgtaaccatctaatgtcttcagttgtaatggcataaactccttgttctaattcttcataaggtctatcataactttttgtaaacgccataataacaggttttacaggtggtgtaggaaatgaatgatttcgaggagcagcaccacgagtagcttgtatataaataccgccattcactacattattttcttttaataatcggcgtactaattcaattaattcctcaatagtataatttaaatctagtcctatttcttcagcacttcttaaaaatctttcaaaatgctctttaacggtaaacaatttcccatcatatgcccgtatatattcatagattccgtccccaaacacgtagcctcgatcttcgtatgaaaccttagcatcctcttcattaacaaattcaccatttataaaaacttttgtcataaattaatcctccacacataaagcgtaaatagcttctaaataaatacttgttgcattgatcaattgctttttagttatatactcatttttttgatgcattaaatcttctgaatctgcaaacatcgcaccaaatgcgacacccttatctaaatttctcgcatatgttcctccaccaatcgtatatggttcagtcatatcacctgtttgatttctatatgcgtttacaagtgtttttacaaatggatcatttttatcgacatagtgtggtttttgaactttgccaagttctaaattaaaacctagttcattaatttcacttctaaatctatcgattgcgtcttcaaatttaaatccttcgggatatcttagattaataccataacggcctgctttttctttatcataactgataaccccgatattagtagtgacatctcccataatatcagtatggaacttcatacccattttttcaccaaagtgagattcaaataagtatcgctcattgaattctacgaaatcttttgcgcttttatttagattaagacttgctaaaaatttaagtaaaaacaatcctgcattaacacctaaagatggatccatgccatgaactgctttaccctcaattgttaatattaaaataccactgtcaactgtactttcaccttgtagttgattttgttgtaaaaagttttcaaagttttgaatgacatctgtcatattttctttgacgagcacttctgccttagcataatcaggaaccatattgtatctttgaccagattcaaattttaataactcatagtcaggttcatctgtatcttctgtcacttcattttgtactaaatcaaaggttgttatacctttttcaccatgtattgctgggaattctgcatctggagcaaaaccta

SEQ ID NO: 4060 - DNA, 2927 bp, Artificial Sequence
  Description of Artificial Sequence: synthetic nucleic acid sequence
caatttgtagaagatgctggtcgaggttaccgtcgcgttgtaccatcaccacaaccaatatctattatcgaactggaaagtattaaaactctagtagaaaatgacacactcgtcatcgctgcaggtggaggtggtataccagtcattcgcgaacagcatgatagctttaaaggtatagatgccgtcatcgataaagacaaaacaagtgcattattaggtgctgatattcactgtgatcaactcattattttaacagcgattgattatgtttatatcaactatcatactgaccaacaacaagcacttaaaacaacaaatatagatacgcttaaaacatatattgaagaagaacaatttgccaaaggcagcatgctacctaaaatcgaatctgccatctcctttattgaaaataatcctaacggtagcgtgctcatcacatcattaaatcaattagatgcagcactagaaggtaaaattggcacactcattacaaagtaacgttttaacgtataagtagaaattaatttaatcatattcatacagtgcatcctgttattccactcctctccatttcatacagggtgcacttccttaatcaatcatgtaaaatactaaccaaattcaattgataggcttttattttaggttaactgtcgaaggagatgaaaccgttggaacaagcgatcaatgataataaaaagaaaaaacgttttaactttagaatgccaggtgcatttatgattctctttatcctaacagttgtcgcagttatagcaacttggataatccccgcgggtgcatactcaaaactttcatatgaaccttcatcccaagaattaaaaattgtcaatcctcatcatcaagtaaaaaaagttcctggaacacaaaaggagcttgatcgattaggagttaaaatcaaaatagaacaatttaaatctggtgcaattaataaacccgtttcaattcctaatacttacgaacgtctaaaacaacatccagctggtcttgatcaaattactagtagcatggttaaaggaaccatcgaagccgtcgatattatggtctttatacttgttctaggtggactgattggtattgttcaagcgagcgggtcctttgaatcaggattgttagcacttactcaaaaaacgaaaggccacgaatttatgttgattatgttcgtagcaattttaatgattctgggtggaacactatgtggcattgaagaggaagctgtagcgttctatcctgtactcgttccaatatttattgcgcttggatatgattctattgtctcagtcggtgcaattttcttagcaagctctgtgggtagtacattctcaacaatcaacccattctcagtcgtcattgcttctaatgcagcaggaacaacttttactgatggtctttattggagaataggcgcttgtatcatcggtgccatatttgttattagttatttattctggtattgtaaaaaaattaaaaaagatcctaaatcctcttattcttatgaagacaaagcagcatttgaaaaacagtggtctgtgctccatgatgacggttcttctgagtttacattacgtaaaaagattattcttacgcttttcgtcctaccattccctattatggtttggggcgtcatgacacaaggatggtggttcccagtcatggcatctgcattcttgatctttaccattgtcatcatgtttattgctggaacaggacaatatggtttaggcgaaaaaggcactgtagatgcattcgttaatggcgcttcaagtttagtaggtgtatctttaatcattggtttagctcgaggaatcaacttagtattgaataaaggaatgatttctgacacaatcttgcacttttcatcatctatcgtgcaacatatgagtgggcctttatttatcattgttctgctctttatctttttctgtttaggatttatcgtgccgtcctcatcaggattagcagtactatctatgcctatctttgcgccattagctgatacagtaggtataccaagatttgttattgttacaacatatcaattcggtcagtatgcaatgttgttcttagcgcctactggacttgtaatggcaacacttcaaatgttaaacatgcgctactcacactggttacgtttcgtatggcctgttgtcgcgtttgttttaatatttggtggaggcttacttattacacaagttttaatatactcataatcttttaaaagtggaaaaatatttacctattcatagttatatcttttagaaatgacgaaaaaaagaacgcctagaacattaatagtcgtcctaggcgttcttagcatatgagcagtcgatgcttaaataaaaaagttctatattcaaattttacatgcatgggacgcttcattgttgaaataatctaactcattcaatacgtacgctctcccacttctttattaatcttaacaaaagccgtatggatttaactatattctaacattcattttaaatatgtgatgatgtaaaacggtcaatgacatcttctattgctttatcccaaaatgcataatcgtgatgacctggcgcttttttaaattgatatgaaatacctttttcatctaaatagttcacaaaatcaatattaccttgatacaattcatcttcagttccacaagtaatatatagttgtggtaacgtttgtccattgtctattgcttgttcaactaaatagtatggatcaaaagatgtccccgcgacatgttgcgtattacctacaatcgcttctggagtaaaatcataccattgatattgaccaatcatagaaacatcatatggcgctgaaagcatagcggcttttgagaaacgataactttgcgttaatgcaaatttgattgcaccataacctcccatagagtgacctgctataaaattatc

SEQ ID NO: 4061 - DNA, 3057 bp, Artificial Sequence
  Description of Artificial Sequence: synthetic nucleic acid sequence
aaaagcatatcagtgaaattaacgctaagttaattacaaataaagaatcatattttaagcaatcatctgaaatagagagactaatcaagcagttaggagtgtctattaactatgcttagcgcacaacaatttttaaaagaatttaataatgttgaatctctagatgaatctttgtacgagatagtgagtcagatttgtgaagaagttaaattacagggagataaagctttaaaaaattataatttacaatttgatcaagtggaaactgagaagcttgaattagagcaaagccaactaaaaaatgcatacgacatgctagataatgaaacacgagatgcattagagcaaagctatcagagaattaaagtgtaccaagaaaatattaaggtaaaacaggaatcatctcaacaaactgaatgttatgaacgataccatcctatcgaacgtgtaggtatttatgtgccgggaggtaaggctagctatccgtctacagtattaatgactgcaacacttgctcaagtagcaggtgttaatgagattactgttgttaccccacctcaaaatagcggtatatgtcaagaggtgttagccgcttgttacattacaggcgttcatcatgtttatcaagtcggtggagcacaaagtattgcggcgctaacttatggcacggaaactataaaaaaagtcgacaaaatcgtaggtccagggaatcaatatgttgcttatgccaaaaagtttgtattcggtcaagtaggcatagaccaaatcgcagaaccgacagaaatagccttgattatagacgaaagtgctgacttagacgcaatcgcttatgacgtatttgcacaagcagaacatgatgaaatggcttgtacttatgtgattagtgaaaatgaaaaggtacttaatcaattgaacactataatacaagagaaacttcagtatgttgaacggcaagatatcatatcacaaagtattgctaaccatcattatctaatattagctcaagatactgaagaagcatgtttaattatgaacacgattgcacctgaacatgcatctattcaaactcgagcacctgaaatgtatatagataaagttaaatatgtaggcgcactttttttaggtcatttttctcctgaagttattggggactatgtggcaggtccaagtcatgtacttcctactaatcaaacagctagatttacaaatgggctttctgtgaatgactttatgacacgacattcagtcattcatttatcacaaaaaacatttaacgaagtggcagaatcagctgagcatattgcacatatagaatctttatttaatcatgaaaaatcgattcacgtacgccgataaagataggttattacgatatctgttaataaaaatgaaagcgtatgttcgttactctattgctacagaagaacaacttcttctactggaaaaatagtgaagaaatggagcgtatgttatgaactatcaaatcaaaagaaacactgaagaaactcagcttaatatttcactggctaataacggaacacaatctcatattaatactggtgtaggatttttagatcatatgttaacgctatttacttttcatagtggattaactttatctattgaggccactggagatacgtatgttgatgatcatcatataactgaagatataggtatagttattggacaattacttcttgaattaataaagactcaacaaagttttacaagatatggttgctcatatgtacccatggatgaggcgcttgctcgaacagtagtggacattagtggtcgtccatatttctcatttaatagcaagttgagcgctcaaaaggtaggaacttttgacactgaactagttgaagaattttttagagcattgataattaatgcgcgattaaccgttcacattgacttattaagaggtggaaatacacatcatgagattgaggcaatatttaaatcttttgcaagagcattaaagatttctcttgcacaaaatgaagatggacgtattccatcgtctaaaggagtaattgaatgattgcgattattgattatggattgggaaacataagtaacgtcactcgagcaattcaacatttaggatatgatgtgattttgacatgtgatgataaagacgtgcaaaaagctgaagctatcgtacttccaggtgttggacattttcaggatgcgatgcattctatagaagaaaaaagcattaaagatatgcttaaaaatatacatgataaaccgataattggaatatgtttaggtatgcaattactttttcaacatagcgcagaaggtgacgttagtggattggaacttgtcccgggaaatatagtgccaatccaatcatctcatcctattcctcatttgggttggaatgaattaaagagtacacatcccttactgcaaagtgatgtgtattttgttcattcatatcaagcagaaatgtcagaatatgtagtagcttatgctgactatggtacaaagattccgggagtcattcaataccgaaattatataggtatccagtttcatcctgaaaaaagtggaacgtatggattagagattctaaatcaagcgcttaaaggagggtttattaatgattgatttatggccagctattgatttaattaattcaacaagtgttcgattaacagaaggcaaatatgattcaaaagaaaaaatggaaaaatctgtagaagacagtatccgattttatagtcaatttaaatgtgtgaaacgtatacatattgtagatttaattggggctaaagcaaaagaggtaaaagaattcgactacatccgttccttaagaaaggtgaccactaagcctatagaagtgggtggcggcattcgttcaaaacaaacaattgaaaattatattcattcaggaatagactattgtattgtaggtacaaaaggtatccaagatatagagtggttaacacatatgacacatcaatttccaaataaactctacttatccgtagatgcttttggagagaaaataaagattaatggatggaaagaggatgctaa

SEQ ID NO: 4062 - DNA, 2982 bp, Artificial Sequence
  Description of Artificial Sequence: synthetic nucleic acid sequence
tatgagctatatcaaaaatttaaatcaaatacctgtagacgacgattcaatatttatagagtctttccatggcaagaattttagtggagatcctaaatatattgctcttgctattaagagacagtatgatcataaaaaaatatatgtgagttcaaccaattcacttgttgatatggaaatcaaacgttacggttttacacctgttcgatttggaagcgagaaatatattaaaacgtttagaaagtgtaagtatgtttttatcaatggtaactcgtgggataaagtgtacaagtcttcagatcagatatttattcaaacatggcacggttttccattaaagaaaatggttaatgatttaaatgaacaacatgaaagacaacaacaactagaggcattcataccacgcatgaaaaaatgggattacattttgacatcatcagatattaatacgacgttgttggaatctgcttttatgctaaataaaaatccaaatcttaaagttctagaatacggcgcacctaagaatgaatatttaataaataataataatttacaagagcgccagcagttacagcttaaatatatgtataagatagatgatgataaaaaatatatattatattgtcccacttggagggaaaatcaaagaaaagaagtcactcagattaatttaaaagatttacttaaatatttaccagagaattatgagattattgtgaaacttcatcctaatgaaagtcatttaagaaccagatataatcaaatagataatcgaattcactgttatttcaatgaacttgttgatattcaagaactgtatattctgagtgaatgtatgattacagattactcgtcgaccatttttgactatatacatttaaacaagccagtctttattcttcaagaagacgagcaacaatataaacaaagtgttggtttttattttgatttgtttgaagtgggtgattttcttaaagcctctttaaatgaacgcatgttagctaaacaaatttgtagcactgattatataaattattcaaaagtggttcatcgtttgatgaaacaagatagttcgaaaagcagtgaaaagttaatggccgaaattcttggggaaccagaatatccaagttcatcaaactgcaaacaacagatttcttaaagaaagttgttatttaccgggaaataatataattatgggtactttgagacaagaatcatgtgactcttgtctcagtttcatatttttgggtaaacatttaacatatagcaatgataaccaatacaaatttaataagtatacaatctaactatttttatagaacattaaaacacattctaggggggagtgcatgtctaaaattttactaactggtgcatcaggttatattggtagccatctcaagaataaattaaaaaaagatcatgaagtgatagctatatccagaaatactcataataaaacggatgaagaaaatgtcacgtggaagtcagcagacttatttgatttggacgaaattacaaaagtaatgaaagatgtagatacagcgatatatttagtacactctatgatgccatcagcaaaattaacgcaggctagctttgaagatatggatgcattgttagcagataattttgcgcgtgcggcgcaaaagcagggtgttaagcatattgtctacatgagtggtttaataccagaaaatgatgagctatctgcacatttaagaagtcgacttgaatgtgaaaaaattcttggtgattacggtataccagttagcacattacgtgcaggtttaattattggtgcaaaaggaagttcttatccaattcttaaacgactagttaagagattgccagcaatggttttgcctagttgggcttacaataaaattgcacctgttgccattgacgatgtgatagatggtttagcagcattggtgaatcgaacacccaaagataacgaagcaattgatatcacaggtcctgaagtgatgaattataaaacgctgatacagcgcacagctaacgtacttgataagcgactgcctatgcttgatttacctattatacccattatcataagtcggtattgggtacaactgatttcaaatgtaccgaaagaaatggtatatccattaatgaatagtttaactcacgatatggtaccacatcgaaaacgcgttgtgtctaacttgtccgtaggaaatatcacctttgaagatagtgtgaaaagagcactaagagaagaacaaaagacttctaagaaaaagtcggattcgaaaaattctcaatcatttgggcgtatgcatcaagaaattaaagatgtatatttaattaatgaaccatcactaaattcacgagtggtctgaacgatacctttaccaaatgttttagaaccgtaaactttagctttatgatagtctttcatagcacctgtaaacacttctgaagcactagctgatccctcattaactaagatggatactttcatatcttttgcttgttttagtgcttgattagaagtttttaattcttccttatccttacctttttctaattgaacgacagtatttcccttatcaataaagatgttagccatcttgactgcctcatctaataacccccccggattatttctcaaatctaaaatgatatgacggatgccttgcttatgcgctttgatgattgcagatttgagttcaccagaagtattgctttggaatttattgattgttagtacgcctacattgcctttcttctcatactctacactcttaacgtgaatggtatcgcgtttaatcttaatatccttttcttgcgaaccacgttttatagttaaagtaacatatgttccttttttgccgcggaccattttaacaacttgatcaagtggtttaccgactaccgaatgatgattcacttgtgtgacgatatctttaggttgaataccagctttttctgctggtgaatccttcattgggctag

SEQ ID NO: 4063 - DNA, 3100 bp, Artificial Sequence
  Description of Artificial Sequence: synthetic nucleic acid sequence
ctaagcaataaacaaccaacatgatactagcttgattatatttcatctaaacagacttcaagcggcagtgtttagcatatcctactagggttgaatcgcgttaacagcacgtaggagatgctgttaggcgatgcagtggctattacgcagctactgcgaaattattgtttgatttgtcagttatatttaaccgaaatgtgttgatgacggagccaaccctccgacacgcttaataagctcgggggacccctgtcgaatccaagaacgtcccctcaattcaaatcaatctaacaaaatatttggttaaatcatcaataaaacaatttgacactgcaatcaatcatatcaaagatggcccgattaagcaatgatattgcttaataacgggctttaactgcgcgatcaatatctcgttttaccgctttttctttaagtgcttgacgtttgtcgtatttctttttacctctagcaacgcctaataaaactttacattgaccatgttttaaatataacttcaacggaataatagaataacctatttctcgtgtacgctcacctaatttttgaatttcttttttgtgcaagagtaatttacgtgtacgtaaagggtcatgattaaaacggttcccttcttcatatggtgcaatatgcatattattcaggtacatttcgcctcgtctcacttgcgcaaagctatcttttaaattggcactaccacgacgtatagatttaatttcaggtcgttaaagaaggacgtaaaacaactgatgctttactaaataatgctgtagcaacagcagtagaaactggtagagtttcaaacggagatttaattattattactgctggtgtacctactggagaaaaaggaactacaaatatgatgaaaatccacttagtaggtgatgagattgctaaaggccaaggtgttggtagaggatctgttgtaggccatgcaattgtcgcagatagtgctagtgatttagaaggtaaagatttatctgataaagttattattacaaattctgttgatgaaacattagtaccatatgttgaaaaagctataggtctaattacagaagaaaatggtattacttcaccaagcgcaattataggtttagaaaaaggcatacctactgttgttggtgtagaacaagcaactaaagaaattaaaaatgatatgttagtgactttagatgcgtcacaaggtaaagtgtttgaaggttatgctaacgtcctttaatttaacaaatgataaattaaaaaagaggatttgataatcacaaagctttaaagctattcataagagagcctggaacattgatttatgttccaggctcttattatttagggtagttgattattgaaattaaaaatgattaaatcaaccttttataacactagttattgattttaaagtagaacaccaaatgtcatctatattgtattttttataatttacaaaaaatataaaaaataaatatagaggggatatatttctgtatttgaataataaaagtaatatacccttttgattcttaagtttattaaacatgtatttcaatggattcgtgcattgaagtacgtcattgcgaggagtactgtatatgttctgagaatacgattgtataattaaataccataactacattaaagagatttcattcaaattcaatgtgcaatgactatcagcatcaaacaatcccaaagtcagttatctttgtaatttctgtaagaaattctactctgaattattgatatagtaagcttgacataaatacatttttaatccagtcatcgactgaaagcatattaaaatgctcaagacaatattgtgcaccccaaaagctagactaaattttagcttttggggtgcgtttttataattaaacagtataaatttgattttaaaattaaagtaatttaagaataattcaaagatatacgaagtgatgatgcagtagattcataataagtaaagaataaataatcttaaacttataagtagtaaagataatttaaatacgcctcaatatgagagacgtatgatgatattatttaatattttaaatatgtggtaaaatttatagtgacatacttagttaatttaatattttagccattacatattcgttataatatttttggtttataaaaagcttatctttaagttcaccttcgatttgaaagcccatgcctttaaacaattctattgcgttaatgttttcagtaacaaccgtagcttcaatacgtcgaatatgatgatttaaagcccatgcttcaattctattgataagtgcttgtccaataccttgatgttggtaatattctctaacaccaaggtacaccacagcttcgtgctgtgtacgttcataagtttcagtattaacaaatacgtatccaacaagttgctcatcactttcagcgacatatattgctttggtaggtgaggtgatgtatttttctaagtgttgacttgcggaagatatcgttggtgaatattcacctggattgtagaatgtaaattctgattcatcatatatttggcttaataggctgataaagttttcaacgtctttaatactaatttcacgaatgagatgtgtcatatcaacactcctgttttgttaaatcaattgtcttccttattatagtacactttacataattacgcttgatatgaaattatctaaaagaaagtttaggagttgatatttatgaagcctaaagtattgttagcaggtggcaccggctatattggtagatatttaagtcgagtcattgaacatgatgctcaattatttgctttatctaaatatcccaaacctgacaaaggatctacgaacaaaatcacatggttaaaacgcgatatatataatcataaagatgtagttgaagctatgaaaggtatagacattgcggtatattatttagatccaactaaacattctgctaaattaacacatgcaacagcacgagatttaaactttatagcggcagataactttggtagagctgcatcaataaataagctgaaaaagattgtgtatattccggggagccgtcatgataatgaagctattgaacgtttaggcgctta

SEQ ID NO: 4064 - DNA, 1401 bp, Artificial Sequence
  Description of Artificial Sequence: synthetic nucleic acid sequence
gccacacaattaattggtatattatgacaagtgacattaatcataaagatacaatagagtattttaaacaacataaatattttaactatgatgccaatcatattcatttctttaagcaagataacattgttgctttaagtgaagaaggaaagcttgttttaaatagagatggacatataatggaaacacctaatggtaatgggggtgtattcaagtctcttaagaaagcaggataccttgataagatgcaacaagatcacgtcaaatatatcttcttaaataacattgataatgtcttagttaaagttttagacccgttatttgccggttttacagtgacacaaagtaaagacatcacatcaaaaacaattcaacctaaagatagtgaaagtgtaggtcggcttgtaaatgttgattgtaaagacactgtgttagagtattctgaattagatacagacatagcaaatcaatttaacaatgctaatataggtatccatgcttttaaactaggtttcattaccagtgctgttgatagagaattaccgtatcatttggcaatcaagcaattaaagcaattagatgaaaattttggtgtggttgaacgtcctacattaaagtttgaattattttattttgatatatttaggtacggtacaagctttgtaacattacaagttccaagagaagaagaattttcacctttaaaaaataaagaaggtaaggatagtgtacatacagctacagaagatttaaaacgaatggatttgatttaactaaaggtggtggaatagatgtctcaatcatctaagcgaaaaaacgattctgtggtagaaacttttaaggacatcattcctttaacatttggagaagagattggtaatgcagcatcacatggtgctgctgcattacttacattatttattcttccatatgcagcagtgcatagttttaacaatggtggcacattagagtcaattagtgtgtcagtttatgtgattagtatttttatgatgttcatatcatcaaccatttatcattcaatgcaaaataatacgtctcataaatatatattaaggattattgaccatagtatgatttatgtggctatttcaggaacatacacacctgttttgttaagtgttgtcggcggttggttaggttggctcgtgacaatattattatggggaacgacattatgggggattttgtataaatcaatagcaactaaagtcaatcatagattaagtctcattgtttatttggtgatgggatgggtaggtatcatatttttacctattattattatgcgaacatcatggtggtttattttctttatatttcttggtgggttatcttatactatcggagcatggttttatgcccaaaaaaataaaccttatt

SEQ ID NO: 4065 - DNA, 3596 bp, Artificial Sequence
  Description of Artificial Sequence: synthetic nucleic acid sequence
tattataattttcgaattaacggttatctaattcttgttttaataggctattaactttttgtgggttagcttgacctttagaagctttcataatttggcccactaagaatcccatagctttacctttaccatttttataatcttctattgattgtggattattatctaatgcatctgttacaaatttaagtagtgttgcttcatcagaaatttgtactaaacctttatcttccataatttgtttagcatctccaccattttctgctagttctggaaaaacttttttagcgattttactactcattgttccgtcttctattaatttaatcataccagctaaattttcaggtgttagttgcgtatcttttaattcaacttgatttttattaagatactcgttaacacctcccattaaccagttggaagtaagtttaacatctgcaccatggtcaattgcgccttcaaagaaatcagacatttctttagttaatgttaatacatgcgcatcatattctggtagtccaagatcatttacgtatttagctttacgttcatctggcaattctggaattgtttctcttacacgtgctttccaatcttcatctacatataatggtacaatatctggttcagggaaatatctataatcatctgaaccttctttcacacgcattaaaattgttttaccagtagattcatcaaatcgacgtgtttcttgaccaatctctccaccatttaataattcttcttcttgacgtttctcttcatattctaaaccttttttaacgtagttaaatgagttaaggtttttcaattcagtttttgtaccaaattccttttgaccatatggacgaagtgaaatattagcatcacaacgtagggatccctcttccattttacaatcagatacacctgtatattgaatgattgaacgtagtttttctagataagcatatgcttctttaggtgaacgaatatcgggttcagatacaatttcaattaatggcgtaccttgacggtttaagtctactagagaataaccatctttatgtgttgatttacctgcatcttcttccatatgaagacgtgtaataccgatacgttttgtttctccatcaacttcaatatcaatatagccattttctccaataggttgatcaaactgagaaatttgatatgcttttggattatctggatagaaatagtttttacgatcaaattttgaatttgtagcaatatccatatttaatgccattgaagctctcattgcccaatctactgcacgtctattaactactggtaatacacctggataagctaagtcgataacatttgtatttgaatttggttcagctccaaaatgtgcgggtgatggagagaacatttttgagtccgtttttaactcaacatgaacttcaagtccgattactgtttcaaaatgcatgatttccactccttataaattttcgtatgcgtcatgtaagttgtattgtgtttcaaattgataagcgacacgatataacgttttttcgtcaaaaggtttaccaattaattgtaaaccaattgggcgtccgtttgattgtccacaaggaactgaaataccaggtaaaccggcaagattaactggtgtagttaataagtcattcgcatacattgttaaaggatcatcaatttcttcgccaatattaaatgctgttgtaggtgctgtcggtccaaccacaacatcataagattcaaatactttgtcaaaatcatttttaattaacgttctaactttttgagattttttatagtatgcatcgtaataacctgagcttaaagcaaaagtacctaagaagatacgtcttttgacttcttcaccaaagccttccgatctagacattttatataattcttctaacgattgtgcttctttagaatgatatccatatctaataccatcaaatcgcgctaaatttgctgaagcctctgatgacgcaataacataatatgatggaataccatattttgtatttggtaatgagacttcgtcaacttcagcaccaagtgattttaacgtttcaaccgcttcttttacagaagtcttaacttcttcacttacaccctcacctaaatattctttaggtaatgcaattttaagacctttaatatctttaccaatatcagaagtaaaatctacatcatcaacaggtgcgcttgtagaatcattcgcatcaacaccggaaattgcctcaagtactaatgcgttatctttaacattacgcgtgattggtccaatttgatctaaagaagaagcaaatgcaactaaaccgaaacgtgatacacggccataagttggtttcataccaacaacgccacaataagatgcaggttgtctaatagaaccaccagtgtctgaccctaaactaaaaggaactaaacctgctgcaaccgctgctgcagaaccacctgaagatcctcctggtactgctgtgtgatcgaaaggatttaatgttttcttaaaatatgaagtctctgtagagccacccattgcaaactcatccatgtttaatttaccaattaaaaccgcgttttcatcatgtagtttgttcattacagttgattcataaataggtacaaatccttctaacattttacttgcacatgtagtttctacatcttttgtgatgatattatctttgattcccataggaattccaaatagtttaccatccatttgatctttagcttgtaattcatctaattcttcggctttttttattgcattttctttatctaaagctaagaatgacttgattgttggatcagtttcttcaatagctgcgtatatatcttttactacatcagaaggtttaatttctttatttttgattaattcagttaatttttcgatagattcaaaacgaatactcatcttaagcgtcctccccattcatgatggatggcactttaaattgaccatcttcagtttctttcgcatttttcaatgctaattcttgaggaatgccctcgattgctttatcgtcacgtaatacgttttgtaaatctaatacgtgataagttggctcaataccttctgtatcggcactatcattttgtttcgcaaaatctaaaatactttctaaagtattagccatttcttctgtttcttcaggagaaatttgaagtctagctaaattagcaatatgttcaacttcttcacgtgttactttagtcattaaataaaagcctccttaatactcattcatcaccaaattgtatcaaatttcgaaccaaaaatctaaatatttatgaataagttactcaaaataaacacttgatattaaggtgtttaataaacttttacatatgaattcccttaattgtcatctctatgttttaaaatgatagatgaattaaagtttaattctaacaataattttatacatatttatgcaatagatattaattaattataagacacacctagagttaaaaactttttatcaaagactttttatactactattaaaatttttacttttctgaacatttagttgcattgtataatgttacatgtatcttatatcattatttaataaagggagtgttaatta

SEQ ID NO: 4066 - DNA, 3771 bp, Artificial Sequence
  Description of Artificial Sequence: synthetic nucleic acid sequence
atcccaattttctaaaaatacgtctagtataactatcaggtatgaattctttacctttaaaaatatatactattaagacatcggcggtctcttcacctataccacggatggtgagtaattcttttcttaagctatcaccgtataacttagctatactactataatcaaaatgatgttgatttaaccatagtaacaatgcctgtatagccttagctttatttttatagaaaccactcgaacgtatcacttgctgcaacgattctaaaggcattttcaatatcgtctgtgcattaaaagaagtttcttcttttaatcttgataacgctatatctgcattgttccaattagtattttggactagaattgccccaagcatcatttctattggcgtttctgctggccaccaatattgagggcccatattttgatatagaatttgatataatttttctattgataacatgatttctccccctacaaatcttcgcatgattgttatatctcgcatgctacattgtccaattttcccaagaagtctgaggtgttgtcctacctaattgttaatattccttttataacaaactttatgctgtgtcccaatatcggtttgctttgcttgttttttctttttggaatgcatcaataataaggactaaataatgtaagagcctgtacatataaatatgtcacaggctctcgtgtatctattttatgaagttttacatagattctggtgctgtaacacctactaatgctaatgcattgtgcaaggtaatacgcaccgcttcaatcatagctacatgtgctttagttttttccgtatcatctgtaagcactttttcagcattataaaatttatggaatgctgcagctagatcctgaatataattagttagacgatgaggtgcacgatgttcggctgcactctctatcgtcgattcgaattctgctactttttttaataagtctattgctttatcattatttattttagaaaagtctgcatcagtagacacttcaataccttgttctttagcttgctttagaatagaacaaattcgtgcatgtgcatattgtgcgtaataaattggattgtcttgagattgctctttagctaactctaaatcaaagtcaaaatgagaatcaggactacgcattgttaagaaataacgtgcagcatcgataccgacttcatccataatttcacgtaaagtaatcgcattgcctgtacgcttactcatcttcacttcttctccgttttgcataaggcgaaccatttgcataatttgaatttcaagacgatcgctgtctacaccaaatgtttctaagctagctttgagacggttaatataaccgtggtgatcagcacccattaaatcaattaaaatatcatttcctctattaatcttattgtagtgataggccgtatctggtgtgaaataagtgtaattaccgtctttttttattaatacacgatctttatcgtctttaaagtcacttgtacgtaaccaagtcgcgccatctgcttcatacgtatagcctagctctttcattttagataatgtatttttaatcgcgccattttcatataaagatgtttcgctaaaccaattatcaaagtgcacgttaaaatcagataaatccttttttaatttttccatttcataatcgacaccaagttgtctaaacgtttttaagcgttcttcatcagagtagtcttttatttctggatgtttaacagcgagatctttaccgatttcaataatgtctttaccattataaccgtctgccggcatctcataactcgtatcacctaaagcttcgaagtatcgtgcttcaattgatcgtgctaaattagtgatttgattacctgcgtcattaatataatattcacgtgtaacattgtaaccagccgcaatgagaatattagctaaagaatcgcctacagctgcattcctagcatgaccaatatgtaagtctcctgttggattagctgatacatattctaataaaatgttagtattcttagattgtgttgcatatccaaatcgatcaccttttgtgatagcttctggaataatgtctgttaaatattgattatccagataaaagttgatgaaacctggcccagcaatatcaacctgtttaacgtgtgctttgcttgtatctaaatgatcgacaatagcttgcgcaatttcacgtggattacgcttagcaatttttgttaaaaccatagcaatattagaagaataatctccatttttagtatctttaggtatttcaattttaatttctggaatatcttctgcgaggttagcttttctaatactagcttctatttcttctattagcgtctgtttaacctgatcgattatattcattcgcttatctccttataatttatttcatattgataagaacccatcttttgttcatcttgatataactcataatgtattttaagtttaccgccattatgagtaacgaaatgcataaggcttagtgttttaacagttaaaggtatttttccggtaggtacatcatagagtgttgtcgtctcatgtccttcgacgaaatgtaagttcatattaatgtcgcctttacgaattaactttacaccgctatcttcaattttaatcgtaacattaactttagcatcttcaatttgttcttcgtaacgtataaaatctgcaaatttttgttgccaagaaccttttgtagtaaactcaaatctctgcttttcaccattctgtttcaaaacttgacgggtttgaatgttaatatttttattcaatttactactcaccttaacccttacaataataaatgtcattatagcataaaactgctattgcttgtagtactcaagacatgtgttcatgtcaaaaatttacacaatatgaaaagaacctgaaacattaatcttgtctcagattcttttcacatattcacaattcataactgaggtgaaagtggtgctttcctattctagatattgttgccacagagaactcacacatttaatataaatgtcacctatcacttcaatcagatttacaattattcaacatcaataatgtcaatttcatatttttttaataaaaatctatatttatcgaaatatacgatgccgaatatcattgctgcaatgatgaacattgtctttttcatcttttaacctcatattcctcaaaatatttttaaatctataatatattatagcattatcaaattgtatttctataaaatattcaaggttagagttagttttcaatcatatattttagaggaaatgcccatcttcaaatataacacgctcttttttattttgaataaagtaattaaaattattattttgaaaatcacttaaaagagctttagatgtactatagttaaacataaaatcctctgtctcaataaacatttttttaaaaagcagtccgtcttttaaagtgatttttttatatcattataatcgacttcatctactttaatatattcaaaagtgttaaaatttacatttaaaagagccaagaatttttttccaaaataataaacgtgtaatggttgtctcttattttgcccaataaggagacgacctttttcaaatgtttgttgtggaaaatttaaatctaaaaattctaaaatttcatcttcttttaatttaaatcgcataattagcccttccttttttacattcacaaatcaaaagatagtttaatttctaaatattatattatcttttatgttcactttcagtgcgtgcttttc

SEQ ID NO: 4067 - DNA, 3257 bp, Artificial Sequence
  Description of Artificial Sequence: synthetic nucleic acid sequence
ccaatgtgctctaaagaatcgaacgtaaaacaggagcgcgtggattacgttcaattatagaagaagcattaattgacatcatgtatgatgtaccttcttctgaaaatgtaagtaaagtagtcattactgaacaaacaattaatgaagaaattgagcctgaattatatgatgatgaaggaaatctaattaataagaacaagacatctgcttaaaatatttgatttaagactgagtcacgtgaattgtgactcggtttttttatatgtaaatatagaaaaaaatgttaaagttaattatacaatagtataagaaagaggaagtctatgaatataaattttaataatattaacttaattataagtgctgtaaaaaaagcacagtatcctgacactggattaacagaagtagcgttaagtggacgctcaaatgtagggaaatctacatttattaatagtatgattgggcgtaaaaatatggcgagaacgtcacaacaacctggtaagacacagacattgaatttctataatatagatgaacaacttatttttgttgatgtaccaggatatggatacgctaaagtaagtaaagttcaacgagaaaaatttggtaaaatgattgaagaatatattacacaacgagagaatttaaaacttgttattcaacttgtcgatttaagacatcaacctactgaagatgatgtgcttatgtacaattatcttaaacattttgatataccaacacttgtaatatgtactaaagaagataaaattgccaaaggaaaagtacgagggtccagagaggctccgaagatatgaataattaggataataatattttgatgattaagttactaatacttttgctgtgtttataacttaagaatgtgaatataatagagaatatagattattctctttaactttttgtctcatatctttattaaagatatgagtttttttatattaaaagaggtgaaacaatgtctgaacgaattattttagatgaggcagcgatacaacgtacaattacacgaattgctcatgaaattctagaatataacaagggaactaaagatttagttctattaggcattaaaacaagaggtgcttttttagcacatcgtatacaagataaaataaattcaattgaacaacaattagtaccaacaggtactatcgatatcacgcattttcgagatgacgttgataaggtagtgcaacaagctgatcaatacgcttttgatattaatgtagatattaataacaaagtggttgttatcattgacgatgttttgtataccggacgtacagtaagagcctcattagatgcgattttattacatacaagacctattaaaatagggcttgcagcacttgtggatcgtggtcatcgtgaactccctatacgcgcagattttgtaggaaaaaatatacctacagcacgagatgaatctgtttcagtttatttagaagaaattgacgatagaaatgcagtcgtcattgaataattatccttttaaaacagtacgagagactgaaaaaggtgaagtgtttcttatggataaatctacatatgactataaaaagattatgtaaactataaatatccaatagaagcttcattgataaatgtgatgataaaagtttaacttaacattacacttagatatatttcattttagtctctttacattctactgattgtaaagagactttttttatgaaaggaaatgaatcaacatggaaaatgagcaaatgtttgagcgtaccgttcagccagttcttgatgtaaaagataaaccaaaaccagcacaatgggcatttctgagtcttcaacatttatttgcaatgtttggatcaactgtacttgtaccatttttaacacatctgcctatatcagcagctttgttggcatcaggtattggtacacttttatacatattaatcacaaaagcgaaaattcctgcctacctaggatcgagttttgcctttattacacctatcattacagggttaagtacacatagtcttggagatatgctggttgcattatttatgagtggattaatgtacgtgattataggtattttcattaaattgagtggaacacattggttaatgcacttgttaccaccagtagttgtcggaccagtaataatggtcattgggttaagtttagctcctacagcagtaaacatggccatgttcgaaaattctgctgaaatgaaagggtataacttaagttacttaattgttgctttgattacattagcagtaaccatcatcgtccaaggattcttcaaaggatttttatcactaatacctgtacttataggtattatagtgggatatattgtatccattttcatgggcatagttaaatttgctccaatagcacaagcgaaatggatagattttcctcatatttatctaccatttaaagattacacaccatcttttcatttaggactcattctcgtgatgatacccgtggtgtttgtgacggtaagtgaacatattggtcatcaaatggtaattaataaaatagtaggacgcaatttctttgaaaatccaggtttagataaatcaatcattggtgatggtgtttcaactatgtttgcaagtatgataggaggtcctcctagtacaacttatggtgaaaatataggtgtactagcgatcaccaaaatatatagtatttacgttattggtggtgcggcagttatagctatcattcttgcatttattggtaagttcactgctttaatatcttcaatacctacgccagtgatgggtggtgtctcaattttattattcggtattatagcagctagtggtttaagaatgcttgttgaaagtcaagtagatttcgcaagcaatcgcaacttggttatagcatcagttgtgcttgttgtcgggattggtaatcttcttatcaatttaaaaggcataggtatcaatttacaaattgaaggaatggcattatcagcactttcaggaataatattaaatttaattttgccaaaagataaaaaccaaataaattaagctttatttctataggaggcgctttatggaacacttattatcaatggagcatttatctaattcagaaatttatgatttaattactatcgcttgccaattcaaatctggtgagcgaccattacctcaatttaacggtcaatacgtatcaaacttattcttcgaaaattcaacgcgaacaaagtgtagctttgagatggcagaacaaaaatt

SEQ ID NO: 4068 - DNA, 3069 bp, Artificial Sequence
  Description of Artificial Sequence: synthetic nucleic acid sequence
agatgacgaatcttgattactttcattttctaaatccaatgaactttcgcctgtgtaatgttgggcttgcttagcatacatttcatcaatagctttttgaattgaatcctcttctgactgttgattttgttgacgtttttgttgtaaggctttcttaaaacgtcgtttctgtagaactttacgttctctttctcttctgatttcttctacaatttgtgaagcatagatattttcaatattaatcgtattatctactttagagtaatttggtgttttacgcttagtagtttgataatttgacttttcaacattatgcatattttctgatgatgactcagtttgagcagttgtttgttgttttttctgttgatttttttcaatattgttatcgttactattagaaacattttttgatgcatctattgatttcgttgaatgcgagacttcatcctgttgaacaatctctttatcatttaattccttatgttctggcggtatgacaccattctcaatcggtcttcgtttttttgtaccaaaaatcgctgagggtacctcgcttgatttaaaactatgatttaaatatgtaaattcaggagatgtcgacgtattcttagtgtttgctttgtttttgatattttcagattgtattgatttacgttgttgtgaagatttcttattgtcgttttgattaaaaacactgttattatttgtataattgttatctgcaaattgcttttgttgtgtaatcttagattgatcgtgttttgaatacgcttggcgtcggcgtcgatgtcttttaccagaagaatcaaattcaggattatcatgctggttatatgatctcattatatcgtttgtttcttcttggttatgttcattataattttcatttttttgcgtatattcattttcagaaacttgtattggaaatctaaatttacctcttggtcgactataaatatcattattttgaggcagtaatgagtcttgattattttgttttgattgctgagactgacgtctatttttatttttgcgtaacaaatcgtcattcgaaccgttgtcatcgccaaataatttatcaaaccagctcataattacactacctttcttaattattcaaaaaatgcctgaccaatatcatagtcatcgttaagtaccataattcctttttctttaggagcattaggcaaatttaattctttcattgagcaaatcataccactagaatctaccccacgtaattgggcatctttaattaccattccgcttggcataacggccccaacttttgcaacaacgaccttctgaccagattctacatttggagctccacaaacaatttgaagtttttcagtacctacatttacattcaacacacttagtttgtctgcattagggtgtttttctttagtttctacgtaaccaactacaaatttaggcgatacatcagtatcaagttgataatcaaaacctgcttcagtaatcagttgttgtaaatctttgattaattcagtagttagtttaatatgtccattatcatttattgtcacattattagacacattaaatatattataacctactacctcattttcttttttgatttctaccacaccatgtttttgttcatattcaaaaggaccaactgaaggttcaatttgaataaatgcaacatctccaacacctttaggattgtaaaataagttcatttataaaactccatttctatcattaatcttttttgaatttttttctgttcgcttctaaacgttgaataacgttaggatctcttttttgtttattatttttccccaaaataaatattggctctagatgtccgttatcataaccaaatgataaagaagtaatcggaacaagtcctttagtaaagaattccatagtcaaatgagccataacatcataacctgttttatttctaatatctgcaagaattaatacatcttgatgtggcacaccaacaagcatttcaccttcacattggtgttgaatatgatttaaaaaagaagtatttaaaatacgacttgcatcatatccatcatttgtgttgatgaagtaaaaaatattacctttaacttcatccgtactatagcgacactctaacttacgaacattaaatagtgacatttctttcacttgttgagcagttaaatttaacgtttgtaacatattttcatctattagccgataagatttccctagatcaagagcgtaatatatattagtttcagcagtatgttctgttaacacaaatgcatgaccttccttagtttctttgtcgaaacttgtagctcttataaccggcataatttgtatgtcctcaacattattaatcacttcatcacccatctgagcgattgcttcctcgacataataacaaatttcatctataattttttctttttgttcttcatattttgcgacgatagcgttaagtttaatcgttacacctttgtgattgtcaattcttacaatacgtaacgtttcttcttctctatcaaacttgaattctacgtctaaatgttttaaacgcgctttcaatttatctctcatttggaagacattcattattaacactccctattttcgcacctttttacagtttacaataaataatgttgagttaacagaaaaaactcagataatcacattaatttgttattataaattaatgtagatttgctgagtcattttctgactaattattaaatgtgttgagataaaaattgatcaatttgatcaattgattttctctctttacctatatagcttcctaaaagttgaccttctttaaagataagaaaactaggaatgcctaaaatatcattttgaacacaaatatctataaattgatctctatctacagacacaaattgtaattgactgtattttttctctaatttaggtaaatccggttcaattactttacaatctggacaccatccagcagtgaattcaaatactgtataccctttttttaattcttcaaattgttgttctgattcaagtttaatcataaatatcaaaattcctttccatattgtaatt

SEQ ID NO: 4069 - DNA, 2744 bp, Artificial Sequence
  Description of Artificial Sequence: synthetic nucleic acid sequence
taggcattaacgtacatatcacaatgcttagaaatatgttgaacaaatgctggagtacttggcgcacctcctgtaatcactttaggaatatagaaatgatgcatcacattatatacctgtagtggaatagatgcgatggtgatattttcttgtgaaattaacttttctaataaatctgtattggtccgctcaactgatgttgcaatgacaagcggatatccatttaataaactacagtagaaatcagttgccgaagcatcgaacacataattagcgtactgcagatagacttcatcatcggataaattgagtctttttgtccaagcacatactaaatttaatatattacgttgtttcactgatactgctttaggctttcctgttgttccagatgtataaatatgatacatatcatcttccaaattccctgcatattctatatttaaccttttattattttcagtgttatcaatatcttcaattttaattactggtatatgtgaggatattgcttttccatatgtgagcactgctgcgacttcagcgtcttcaataataaattcaatgcgtttatcgggataagtgacgtcaataggtacataagaacctccaacttttaatacagcaatcatactagcaaccatttcaaaacttcgttcagttaaaagggctacacgttcccctttttgaatgccattttgtatcaatgtttgagccatactattagaataatcatcaagttcttgatacgtcatcgattgtccattcattttaagtgctacatcatctgctttcgctttcatgacatcatgtaaaagttgctgtattgacttattttttggcaagtctaaagaacaatcattcacatgcttgtccaaccaaattaataagtcatcattttcatcaatatcttgaatttttaggttttcggtagatattacatgtttaataatcatttgaagttgttcagcaatatgatgaatggtctcttgtttatataaatctgtattatattcaatattgacgacatagtcatcttgatcttcttcaataataaatgacaaatcaaatttagctgttgttgactgaggtggaatatgtgtcaattgactatgtccaaaattcgcatgatttgtttcattattttgaagtacgagcatcacatcaaataacggattatgtgaagcatctctttcatcaacaagatcattgactaagctttcaaaaggatattcttgatgttcatatgcccctagacacatctctttcatctcagccatcaattgatcccatgtcttttgatcatgtggtcgaccacgatatacaagtgtattagcaaacatacctaacatattttcagtatcgcgatgagtacgcgcactgattacactaccaatagcgatatcgtcctgacgtgtatatttgtgcaataataccatgattgcactagcaaagaacataaagtctgtcacttgatgttgttctacataagatttcaattgctgtttgatttgacgattgtaatgaaacgtcaacatattaccgttggttgttttaatacttggtctaggataatccgtaggcatatttaatattggaacctgattttcaaattgctgtaaccaaaagtgacgttgtttagataagtctctgtgcaccatccactcactataatctttatactgaagcttaagttcaggtaatgatttatcttggtataaagcgttcaaatcagatagtaaaatcgtgttactcataccatcattaatactatgatgagtatccataaataaataatcttgttgtggtccatgtatatatttaactcgcatctgacttggttgttctaaatcaaacggttccataaatgattgaataatatcttgctcgttcgttagagatgtcgttacctcttcaaaatcaggcgaaacatgtgtcgcaatacgttgtttaacttcattgtcatcaattacatattgtgttcgtaatatttcatgacgttcaatcaacttagataatgcacgttgcaattgcataacattaagttcagaagataatctccataagaatggaatgttatacactgtgtctttaggattgaccttccataaaagatacatacttttttgagacgcacttaaatcatattgatacgattcatttgctttgggaatcacttcatagacatcattttgcagttcttcaatttgttgtccaagttgctctacagtaggcgatttcattaaatcacctactttaagacgtttttttaacctttcttcaatacggtttacaactaatgttgctctaagagagtgtccacctagttcaaagaaattatctttaacacctacctgatcaacatgtaaaatctcttcgaaaatacggcaaactgtgcgttcaatatcgttacgtggttctacataatttctattattctttagattaatttcaggtaatgcacgcacatctaatttcccattcatcgtgataggtatacgatccaccttcataaaatgcacaggtatcatatattcaggtaatgtttcacttaaaatatcttttaattgacctgttgattttaattgcgatgcttcataatatgccactatttgtttatcttggtcttgctctcgaacgatgactacagctttattaatatcacgtatagcttctaatgctttttcaatttctgataattctattctaaaaccgcgtattttaacttgcttatcgatacgact

SEQ ID NO: 4070 - DNA, 3646 bp, Artificial Sequence
  Description of Artificial Sequence: synthetic nucleic acid sequence
atcttacacttattattataaatggctaagattaaaattaaatgagaaaaacctaatttttctgagaaatcttaaaaataaataaaaatgtatatctctctttaacgatatacccagatattgatattttaacacaacttacaaattaacgaaatactgttataatgttacataaacaatattaattagaaagtaggcatctaatatggaaactttattctcaggaattcagccaagtggtattccaacaattggtaactacattggtgcattaaaacaatttgtagatgttcaagatgactatgaatgttttttctgtatcgtagaccaacatgcaataacggtaccacaagatcgcttaaaattacgcaaacaaatacgtcaactcgcagcaatttatttggcaacaggtattgatccagataaatcgactttatttattcaatctgaagtccctgcacacgtgcaagctggttggatgcttacaacaatagcttctattggtgaattggaacgtatgactcagtttaaagacaaagctcagaaacgcgcagatggagtgcctgctggtctactcacttatccaccattgatggcggctgatatcgtgatttacaacactaacattgtccctgttggtgatgatcaaaaacagcatatggaactgacacgtaatttagtagatcgtttcaatagtagatataacgatgtattagtaaaaccagaggtacgaatgcctaaagttggtgggcgtgtgatgagtttacaagatcctactaaaaaaatgagtaaaagtgatgataatcagaagaatttcatttctttattggatgaacctcatgtagctgccaaaaaaattaaaagcgctgtaacagactctgacggtataataaaatttgatcgtgagaataaaccaggcatttcaaatttactttcaatatattctggtctaactaatgaatctattaagaatattgaatctaaatatgaaggtgaaggttacggtaaatttaaaggtgatttatcggaaatcgttaaagattttcttattaatttccaagaaaaatatgcaagcttttataattctgatgacctagatgatattctagataaaggtaaagaaaaagctcaaaaagcttcatttaaaacattgaaaaaaatggaaaaagcaatgggcttaggtcgaaaaagataatactatataatatacaaataatgcctcgaaaataattttcgaggcatttttatacttctatttacctgtctccctattgattgatttatcaatatagacatgtttaagcgtcgtttcaggccctactttgtgatattgtaatccttttacttgcggattcgttaagtgtgcttctcctttttgataaacaggagcgactggcgcttcatgtaataagatatattccgctttttgtaatgaggtattacgttcacctggctttcgtaaaagcttgctgttagcatctttgagtaattgatcgtattctttattactccaatctgtattattctgtgcattattttttgtcattgtttgaagaaatgctgttgggtcaggataatcaggactccaccctgaataacttgcttcatagttatttgctaattctaaagtagttttttgtttaaatggcatttgtttaattttgagtgtcacacctggcaaatgactttcaatttgagattttatatattcggcagcaatttttgaagcaggtgtatcctgtgtgttcatcgtaaaagtaaatttattttttcctaattctttttgtgcttctctccaattctttttcgctaaatcagggttgaattttaatggtgatttgatggttcttgcaaaatctttgccatccggtgtatcggcagttcctactccagtaaaattatttgatggtagcgaaccatcatttaaaacagaattgacatacccttttttatttattgcttgagatatagccaatcttaaatgcttatttttaaattcaggaactgttttttgattcattttaataaagaatgttgctgctgttaaacgataattcaaagcagattctcctctatatttatcaacttgttcagaagttataatagtatcatcgaccgagccagtatcatataacgatgcacctgcttgttgatcttttaatactttatagttcactttatctaattttacattcttcttatcccaatattgttcatttttaactaattgaattttatcttccactttccaatttgttacttcaaatggtccattgtacactgctttttcagcagttgtaccatattgttctccaaactttttagcaactttctcattttgaggattaaatgtattaagtgctaatagttcattaatataaggtacaggtctttctaaatctacttgtaatttatatttacctatagccttgatacccaaatccttgactgattttttacctgcattaacttcatctgcattttttatatcgctcattatgtatgcaaactcagaagccgtcttaggattaactacctttctccacgcatatacgaagtcatatgcagttaccgaatctccattggaccattttgcattttttcttaaattaatcgtaagtgttttgccaccattacttttctttggaaaagatttagcaatagctggttcagctttgtcttctttatttaaagtatataatccttcaaaagcttgagctgctatatcaccagaaacagcatctgtaattaaagctgtatctagtgtagtcatatcttgtgtgattaccttcctaaaaacttgcccctggtctgaatataaactctgcttattactacaagcagataaaattatgcatacacttaataaaataattaagactttaaaacctttcatcctttaattcctcctttcttaacttattaaacagacaaaccatacttttgtttcaatttaactgcttcgttttgagtagaaaatacataatgttgtggtctaatttcatttaattgacgttcttcattaagcgttgcatcttcatgatataaaacacgttgacgatttctctcaacatcaggatcaggctgtggaatggcacttaataatgacttagtataatcatgtaatggataattataaatatcatcagccggtccaatttctacaattttaccgaagtgcatcactgcaattctatcggaaatatatttcaccattgataaatcatgagcaataaacaataaagtaatatcacgttcacgttgtagctttaataaaagattaacgacttgagcttgaatcgatacatctaatgctgatatcggttcatctgcaataataaattctggctctacagctaatgcacgtgcgataccaatacgttgtctttgtccgcctgaaaactcatgtgggtaacgattcgcgtgttctttacctaaaccaactgtttctaaaaggtcgtatacacgtttctttcgatcacgctgactactagcaagtttgtgaatatctattccttcagctacgatatccattacctttaaccgaggatttagagatgcataaggatcttgaaatatcatttgaattttcttattaaacttcaatcgctctttacgttttctaatttgatgaatatctttacca

SEQ ID NO: 4071 - DNA, 3379 bp, Artificial Sequence
  Description of Artificial Sequence: synthetic nucleic acid sequence
tagagatttctttgatttttcaagacgtataccaaaaagggtgaaaaatagaaaattacttgagtctcttatcttagtaggcgcattcgacacttttggcaaaactagagcgacattattacaagcaattgatcaagtattagatttgaattctgatgttgagcaagatgaaatgcttttcgatcttttaactcctaaacaatcgtatgaagaaaaagaggaactacctgatcaattattaagtgattatgaaaaagaatacctaggattctatattagtaaacatccagttgaaaagaaatttgaaaagaaacaatatttaggcatatttcaattgtctaatggaagtcactaccaacctatacttgttcaatttgaccatatcaaacaaataagaacgaagaatggtcaaaatatggcatttgtaacgatgaatgatggaagaacgatgatggatggagtgattttcccagataagtttaaaaaatacgaaacttctatttcaaaggaacagatgtatatcgtattaggtaaatttgaaaagcgtaaccaacaaatgcaacttatcatcaatcaactttttgaagttgaagcgtatgagcaaacaaaattgtctaattcgaaaaaagttattttacgtaatgtaacacatctagaaccacaatttgaacattcaaaagtagaatctaatgaacaacatgcattaaatatttatggttttgacgaaagtgcaaataagatgacaatgttgggacaaattgaacgtcaacgtcaaaattttgatctattaatacaaacttattcgccagctgatattagatttatttaacttttaacgatttttaaattatgatatagttaactgatgattatttcttaatcatcagtttttcttttataattattttttgttctgatttaacacactaaatctgttttatcagcagaagaaataatttgaattgcaacatctaaaaatcaatttactttcaatgattgtactattgttctacatatttactagtaaatcgtgtatatttaaaatgattcagttttcttttcagccagtgattaatattaaaaatttaaataaaaaatttggagcaaatgaagtattgagagatattaatcttactgttgaaaagggtgaagtggttgcaataattggaccatctggaagtggtaaaagcactttactccgttgtatgaatttgttagatgtaccttcaaaaggtaaagttatatttgaagataatgaattaactcaacataatgttcatttagataatttacgacaaaaaatgggtatggtatttcaaaattttaatttatttcctcataaaaaggtcattgaaaatgtaatgttggcaccacttttattacataaagatagtaaagatcaattaaaagagaaagctttatatttacttgaaaaagtggggcttaaagacaaagcagattcatatcctaatcaactgtctggaggtcaaaaacaaagagttgctattgcaagagctttggcaatggaacctgatgttatgttatttgatgaaccaacatctgcacttgatcctgaagtagtaggggatgttttaaaagtaatgagacaattagcgaatgaaggtatgacaatggtgattgtcacgcatgagatgaactttgctaaagaaataagtgataaagtagtatttatggccgatggtgttgtggttgaatctggtacaccacaaaacatatttgaaaatcctcagcacagtcgaactgaaaattttttatcacgagtgttataaaatttatgttttcgaatgataaaagtcaaagtttatacaagcaacagtaacgttgatgggtaagtgaggagcaggttagacgtatccaatgtctaaacctcgaaattcgaaaggtggaaatacgaatggcttcattaaagtcaatcattcgtcaaggtaaacaaacacgttctgacctaaaacaattaagaaactcaggtaaagtacctgcagttgtatatggttacggtacaaaaaatacttcagttaaagttgatgaagttgaatttatcaaagtaatccgtgaagtaggacgtaatggtgttattgatttaggcgtaggttctaaaacaattaaagtaatggtttcagattatcaatttgatccattaaaaaaccaaatcactcatattgactttttagcaatcaacatgagtgaagaacgtactgttgaagtacaagttcaattagttggtgaagctgtaggtgctaaagaaggcggcgtagttgaacaaccattattcaacttagaagttacagctacacctgaaaatattcctgaaactatcgaagtagatatcagtgaattacaagttaatgacagcttagcagtttctgatattaaaatctctggtgatttcacaatcgaaaataatccagaagattctatcgtaacagtagttcctccaacagatgaaccttctgaagaagaagttgaagctatggaaggcgaatcagcaactgaagaaccagaagttgttggtgaagacaaagaagacgatgaagaagaaaataaagaagactaatcttcgtgtctcttaagtaggtattctcattagttgagattacagatttaaaggcgagcactgtgcttatgttaataagcatagtgctttttgtgttattatagggaatgattaattatttaggacggttttagaggaggttgacatatatcagtggtcaatcatttttacgtcctttattttaaaataaacacagcaatagcatttgaaaatatgtgaagatacataatattaatagtggaggtaacaataatgaaatgcattgtcggtcttggcaacattggtaaacgttttgaattaacaagacataatattggtttcgaagttgtcgatgatattctagaacgccaccaatttactttagacaaacaaaaatttaaaggtgcatatactattgaacgtttaaacggcgaaaaagtattatttattgagccaatgaccatgatgaacttatctggtcaagctgtagcccctttaatggattattataatgtcgatgttgaagatttgatcgttttatatgacgatttagatttagaacaaggacaagtgcgtctgcgccaaaaggggagtgcaggcggtcataatggtatgaaatcgataattaaaatgcttggtacagatcaatttaaacgtattcgaattggtgttggccgtccaacaaatgggatgtctgttccggactatgttttacaaaaattttcaaaagaagaaatgatcattatggaaaaggtaattgaacattctgcaagagctgtagaatcttttattgaaagttctcgttttgatcatgttatgaatgaa

SEQ ID NO: 4072 - DNA, 3269 bp, Artificial Sequence
  Description of Artificial Sequence: synthetic nucleic acid sequence
ccaatgtgcctaaagtattgatttaatttgtccctttcctctatagtaagtattctttcaataaattttgtttgattctgaagatttttaattcgttcaatttctattaaatctatacctattccataaatcacttgtatcgcctctttagtatatcaccaataatcttttatcaagtcttttatatatcatcgtttaatttttctaatgaagttacatttgtcgttattgatttttgttgtttaatttgttttttcaatctttgtgcttcttgaatatctatcaatgctatttcagaatttcccccagcagttgataatgacagcgaagcgagttggaactttctcatgataaatccctcaactacacaagggttactgtcatcgcaacgatttatgtaatagaaacgttggttttatgcgatttatgacgaaattttttaacattcgctcataaaaagtaatattacactctttattctgcttttttgtctctttccataagtgttctaacacttttacttacagggacatcttcaaataaaacttcatataatgcgttagtgataggcatctctactccttcttgttgagcaagatgatatactgatttagttgtataaataccttcaaccaccattttcatctcttttaaagcttcttctgctgttttgccttgccctaatttaaacccaagtgtgtaatttcgtgaatgtgtggacgtacaagttacgatcaagtcacctatgccacctagacctaagaaagtcattggatctgcaccaagtttctcaccaagtcgactgatttcggctaaacctcgtgtcattaaagctgcttttgcattatcaccgtaacccatgccggcaacgataccactagctatagctataatattttttaaagcaccacctaattctacacctactaaatcattatttgtgtaaacacgtaaatagtcgttcataaataaatcttgaataagtttgctcacattattatctttagatgatgcagctacagttgtaggttgttttataacaacttcttcagcatgacttggacctgataagacgccgattcctccattatgttctgaagagatagagtcctcaatcatttcagatacgcgcttaaatgtatcgttttcaatgcctttagcaacatgaataaaagtctttttagatgtgagtaattgatcgatatcttttgatacttctctaattgcttttgtaggtagtgccataagatagatatctgaaaattgcactgccttatttaaatctacagttgcttttatagatgaatctaatttagcatctttaagataatttttgttcatatgatgtgtgttaagttcatctacattctctacatttttgccccacattaaaacatcatgaccattttgagctaatacattagctaatgcagtaccaaaactacccataccaaaaactgtaatttttctcattattgaattcccctttgtttttaatttctttttcttggaataatatgaataggtgttccttcaaaaccaaaagcattacgtatttgattttctaaatatctcctataagaaaaatgcattaattcaacatcattgacaaatactacaaatgtcggtggttcaattgcaacctgagttgtatagaatacattaagtcttctacctttgtcagtaggtgttggattcatagagatggcatcagtaacaacttcatttagtgtagaactttggacacgctttttatgattttcactggcttgattgatataagggaataatgtttttaatcttagcccttcttttgctgatacgaacgcgatttgagcataatctaaaaattgaaattcatttctaacatcatcagtgaattttttcattgtcttactatctttttcaactgtatcccatttatttactacaatgacaatagctttaccttcctcatgtgcatagccagctacacgtttatcttgttcaattataccttgttcagcatcgataactactaatactacttctgaacgctcaatcgcttttaatgcacgtaatacagaatatttttcagtcgattcatacaccttacctttttttctcattccagcagtatcaatcaatacataatcttgtccatcataagagtactcggtatcaatggcatctcgagttgtaccagcaacattagacacaataacacgttcttcgcctaaaatagcattgaccaagctagatttaccaacattaggtctaccgatgatagaaagacgtatcgtatcttcgtcataaggatcttctgattctttattaaagttttcaacaactgcatctagcaaatctccaagtcctaatccatgtgaaccagaaataggatatggatctccaaagcctaaagaatagaaatcatagatatcattacgcatttcaagattatcaactttattcacagctaatacaacaggtttcttagatttataaagcatttgtgcgaccatttcgtcactttgtgtaagtccttctctaacattgaccataaaaatgatgacatctgcttcttcaattgctatttctgcctgtgcacggatttgagtttgaaaaggagcatctccaatttcaataccacctgtatcaatgatgttaaattcatgagttaaccactcgccagatgaataaatacgatcacgagtaacgcctggcgtatcttctacgatagatatacgttcgccgacaactctattaaaaattgtagattttcctacatttggttttcctacaattgctactatcggtttagtcataggataaacttcctctcttttttaatctacataattttatcacaagagcagatttattcaaaacttgaatatgtttattttacatgttcgaaaagatatattttgtacagtatatcatttaaaaaaagactccaattatcacgcgtaaatttgattttaagcttacacgtaaattggagtcattacattttatatcgcaaatgattttagtttaattaaaacttaaggtctttaaatttatcaccaaaaacatcgcctaatgttggtttatcttcatcattatcatcttcaagatatgattgagttgtggatgcgtcactttcaatgacattttctttaggtaacgttgctttgattgataatgaaattctttcattatcttcatcgatacctaatatttttacattaacttgttgtccaggttctaatacttcgttaggagaaccgatatgtttatgatcgatt

SEQ ID NO: 4073 - DNA, 3043 bp, Artificial Sequence
  Description of Artificial Sequence: synthetic nucleic acid sequence
tgctgtctcaatagagtccgctaaacgcgtctcaatgccatctttaactacaagtctatcaacaacaacttcaattgtgtgatttttatttttatccaattgaggcacttcatttacatcgacgatttcatcatcaacacgtaaacgcacatatcctttcttacctatatcttcaattaatttttcatgacttccttttctatgtgatataactggagcaagtaattgaatttttgtacgttcttccaattctaaaatacgatcaaccatttgttgaacagtttgtgattcaatttctataccgtgataaggacagtacggtttaccgacacgcgcatataataatcgaatataatcatagatttcagtcacagtggcaacggtagaacgtgggtttttacttgtcgtcttctgatcaatagatattgctggtgacaaaccttcaatggtatctacatcaggtttgtccatttgtcctaaaaattgtcgcgcatatgcacttaacgattccacataacgtcgttgaccttcagcataaatagtatcgaacgctaacgaagatttacctgagcctgaaagtccagtcatgacaatcaacttgtttttaggtaattcaatatctactccttttaaattatgtgctcgtgcaccttttactacaattgacggtcctttcatttaatcgtcacccttctgcttttaattcaaataacatatctcttaactctgttgctttttcgaaatctaaatctttggctgcttttttcatttctttttctatattttctattgttttttgacgttctttctttgtaattccccttagatcagcattctattcgtaaagaaattacaccacctcaaagctctgataaagacaatgatattttaatttgtctattacaaaaattaatcaacgaaattaccaaatgtcaagttcctgtttctctaaagaataattctttcgaaataaaactaccaaactatatcataaaggttgatttaaactatcacgaacagcaagaccatttatatccattacaatatagcatccacgcatggcatagagatttccaatatctcgaaatctcaaataccttcacaataccgtctttgaatgatcttattttccatatacaaaagctttttttacttatatttcaattacctgaacatctcgcgagacaagaatattcattgagtcaatattatttttactcgcaatgccatacaaaaaattaaatagacacttaaaatatttgatagtgagatgtcgagcaccaccataaaaggtacgaaaggtaagttataagaaggttaaagtatgataaaattcgtttcatttatttgatattaagtcattaaaacacattatttaacataaacattcatattgcttagaatctataccataaaattacgtgtagattctcaatcttttcgcaatcattgattgaaatggaatttttggttcattaagttttttataaactcagtcaataagagcgatagagcgggacatagaatttttagatgaattcagttccgctccttttttaattgtgactaattttttacaaacatgacttttagcgttagaatacatggagtcatcttagttatgcattgacaaaatattgaatcattgtgattaactttttacttttacagtatttaaagtagataaataaaaccaattaactaaaaaaagtaatttgaaactatcgtaaaatataaaattcgtgtatataaatgttttaggaagactattaaaacgattttgtgaattaattcacaatatagacttaattgtgttcaataaattgttgaaatcgctttctttagggtgtacgataactatggcctaaaaataaagaaagaaggttttggggaaatggatattattttaggagtagggactttagtactcgttcttattatcatgacgcttttcttaaattttgcgccatatggtaaacaaggtttacaagctttatcaggggctgcttgtgccacgtttttaccacaggcgttcttaagttacgcaattggtggcgtattccatgttaaatttttccaagaaattggtgatctagcagggagtttaagtggtatagctgttggtatattaacttgtctaaagttagaagtgtctccagtatttgcagtcattgtaggtttagtattacatgactcaaaattattacctgcgtttatcgcagcgtatgttgttgcatttggaatcaagtttgttgagaaaaaagttccagagggactagatttaattgttgttattttattggctccagcagttacatttggtcttgcaaacttaatttctccaggggttattgcagtacttaaacaaattggtagtgcaatcacttcagtaggtgataacaacccatatgcattagcagtcattttaggacttgttattcctgtaactggtatgacgccattaagctcaatggtacttacaagcttattaggtttaactggtattccaatggcaattggtgcattaacatgtacaggagcatcttttgttaatggaatcttatttagcaaattaaaaattggtaataaaggtaatgccttcgcggtatttgtagaaccgttaactcaaattgacttaattgccaaatatccactacaactgtttggtgcgaatgccattattggtgttgtaaatgcttgtattgtcacatacagtggactaattattgatattaaaggtatggcaacacctatagcaggtgctattgtactttatggctttaacgacgctgtaagatctacaattacaattatcgcagtagcaattgcaagtgtgatattagcgtacgttattagtgctattattaataaatttaacttgatgaatgtcggattcaagttaccacgtagaaaaaaccaagttaaggagagtgtttaatgatggctaaaagctatgattatcaaagtgctttcgatattattggaccagtaatgatgggaccttcaagttctcatacagcaggtgcagtaaaaattggtaatt

SEQ ID NO: 4074 - DNA, 2993 bp, Artificial Sequence
  Description of Artificial Sequence: synthetic nucleic acid sequence
gataaatttaacgttgatgcattatatcccatcgcaacagctgctatccgtcaatctaaaaatcgtgaagctatcattaaagaaattaaacaagatattcatatcgaaattcaaattgtacctgaagaagatgaagcattttacggttactatgcgattacacatactactgatattgaaaatggaatttctgtcgatatcggtggcggttctaccgaagttacccttttcaaagacaaacaacttaaagaggctcatagctttccatttggcgtggtatcacttaagcgtcagttttttggtgataaagaacataatgacaaaacagccattaaaaatatggaacagtttttacgtgagcaatttagtcagttagactggctatccaaccaacatattgcgctcgtaggagtaggtggttctgcacgtaatgttgcacgcattcatcaatcagcacatgcataccctatcggtggcgttcataactatacgatgacttcgaaagatattaacaatgtttatgatctaatccgtaaaagttctcgcgatgaactaacaaatttagacggtttaagtcgcgatcgcgtcgatattattctgccggctatctccgtctttaaaacacttttcaaaaaaattgacgccacacaattcaccttctcaagaaaaggaattcgtgaaggatttattatgaaccacatcagcaaacgatatcctgatgagtttaataaaagtaacgtacgtaaagatgcattacgtcatttagcgaacgaatatcatattgaagaaacgagtgctaatcgtcgtgtgaaattagctcaatccttattgaatcaaattataagtgaacgatcacttaatatttcagaaatggaaaaagaattatttattgaaggtgcctacatttattatctaggtagtttcattgattcagactcaagttcaccacatacgtattacttaatcgcaaattcaatgattaacggcttttcacataaagatcgtgtgaaattagctttgttagctagttttaaaaacaaatctttacttaaattttattgcaaagaaacacagtggtttagtaataaagaaatagatacaatacaagctttaggagggattattaaatttgcaaacaccttgaatatctcacatactagttttgtagaggaagttaaactaaaagcaaagaaagatgacaaatacgatttattagtttattacaaaggttcacctattgcagaagaataccaagcaaatcgtcagaaaaagcatattgagaaaattttaaaaggtaaggtttctattatatttacaaaatcttaaaattattatgatattttagattgggcataataaagattaattaatgaggtgtatgtatagtatgcaaactcgattgggagaaaaagatattaatttaccgcagtattacaacaatagggagttaagttggctagattttaactacagagtattacaagaatcatatgataaaaataatccgttgcttgaaaaacttaactttatttctatcttcagttcaaatttagatgaattctttatggttcgagtggctgggttaaaagaccaagtcaaaatgggatatgacaaacctgaaaataaagcacagatgacgcctcaagaacaacttgatgctattaaaattaaaaatactgactatgtgaacactcaatatcaacgttataacgaattaattaaagaattagccaattacgatattgagatggtaaaacctgaagacttatcagatgcattgatagaaaaattagaaaaagagttcaagttaagtgtcttgccgacactcactccgttaggtattgatgcgtatcatccatttccaaagttaaataataaaagtttaaatatttttgttgatatcgatacggaagatgccattaattcagctatcgttcaaattccttcattaattccacgctttttaactttaaatgagggtacaaaacaatacgttgtcatggtagaagatgtaattacgtatttcatcaattatctatttacaggatacgaagtactaaatacttttactttccgaataacacgtaatgcagatttaaccattcatgaagatggcgctgaggacttgcttatagaaattgaacgtttcttgaaagaacgtaagagtggttcggctgtacgtttagaattagattgtcgcacttctgaaaaagagaatgtagaatggttaatcgatcaattagaaattgaagataatgatatttattatttagatggtccacttgatttaacattcttatttggattggttgatcatctatctcataagctcaaatatttaacgtatgagaaatatacccctcaaccacctagatcattaggcaacaagaatatctatcaattatcattagaaagagatatattcttccaccatccgtatgaatcatttgaaccaatagttgactttattcgacaagcagcagatgacccaaatacaatcgctatcaaacaaaccttgtatcgagtgagtaaggattcgccgattattaacagcttaaaagaagccgctgaaaacggcaagcaagtaacggtgctcgtagaattaaaagcacgctttgatgaagaaaataacgtacattgggcacgtatgttagaagatgctggctgtcacgttatttatggtatgacacatctaaaaacgcatagtaaaattgcgctagtcgttaaacgcatcaacaataaacttacgtcatttgttcatttaggcacaggtaactataacgataaaactgctaaattatacacagatatgggtatcatcacgacaaataaagatatcgctgaggatgcaattaacttctttaattacttgagtggttactcaacaaaaccagaatacaataaattgattgtagcaccatacgatattcgagacgtcttcattgatcgtatcgataaagaaatacgtagtcatttacaacatggtaacggta

SEQ ID NO: 4075 - DNA, 3055 bp, Artificial Sequence
  Description of Artificial Sequence: synthetic nucleic acid sequence
attaaaacgaacaaacgttcttatcaggaggataattatgaaaattgtacataccgctgattggcatctgggtaaaattttaaatggaaaacaattgcttgaagatcaaaaatatattttaactcagtttaaacaacatatggagaaagaacagccagatttaatagtaattgcaggtgatttgtatgatacctcatatccaagtaaagaagcgataggtttacttgaagagactattgaatacctaaatatagaacttaaaattccaataatcatgataagcggtaaccatgatggtagggagagattgaattatggctctaaatggtttgagaataatcaactttacataagaactcaactagaaaatattgatgatccaatagaattgagtggtgttcaatttttcactttacctttcgcaactgtgagtgaagtacaaaattattttaaggataagcaaatagaaacatatcaacaagcattaaacgaatgcttagagcaaatgtctagttccatagataataataaggtgaatatattaattggtcatttaactattgagggcggtaaaacttcagattcggaaagaccattaactattggaacagtagaatcagttgatatgcattcttttcggttgtttgattatgtaatgctcgggcacctacatcatccatttagtataaataactcttttatcaaatatagcggttcgattttgcaatactctttctctgaagtaaatcaatctaaaggatatagagttcttgatattgaaaacaaccaactattaaatgaaaccttcgttcctttaaaacctctaagagaactagaagttattgaaggtgattatgaggatattattcaagaaagaattaaagtaaaaaataaaaataattattttcattttaagttaacgaatgtttctcatattactgatccaatgatgaaactgaaacaaatttatcccaatatattagcactatcgaatgtagtatttgatcatagtgagaattttagccatgttgaaatcaaaaaacaagatgatcagacaattatagaaaatttttataaaaatatgacagatcaacatctgagtcaagttcaatcagacaaaataaagcacttgttaagttttatattggatagggaggggtaagatttgaagcctttacatatagttatggagaactttggcccttttattaaagaaactattgattttgagcaagttgaaactgatcaactctttttaattagtggtaaaactggatctggtaaaacaatgatttttgatgctatagtatacgcattatacggtatggcttcgaccaaaactagaaaagaaggagatttaagaagtcattttgcagacggtaaatcgccaatgtctgtaatttatcaatttaaagttaataatcaaacttttaaaattcatagagaagcgccatttattaaagaggggaatataactaaaacacaagccaagttaaatatatatgaattagttgataatcaatttgaattaagagaaagtaaagtgaatcaaggtaatcaatttatcgtacaattattaggcgttaatgctgaacaatttcgtcaattatttattttgcctcaaggagaatttaaaaagtttcttcagtcaaatagtaaagacaaacaatcgattcttagaacactttttaatagtgagcgatttgatgagattagacatctacttgtagaaaatgtaaagcaagaaaaagtacaaattgaaaatagatacactcaaattgaaaatttatggaatgatatagatacatttaataatgatgaattggccttatataaagaattagagagttctcagacagataaaatgattgaaaaattcccacaatttaatgattatggatgcaaaattctcaagtcatttgaagaagctaagaataaaataactaaggaattagatgatttaaatcataaatataaagtgaatgttgaattaagtgagaatactaaaaaattaaaagcggaaaaaatcaaatttgacgatttgaaaaaagaacaaaattatattgataaattaaagcaagaattaaaaatgattcaggaatctaaagtattaatcacttattttactaggttacaaagtttaaaaaaagataaagatgaattagtgtcacttcatgagcaatcaaaattaaacgaaacaaactatcacaatgaaattaaaggttttcaaaaacaactcgaacatttatcaacacgagaaaatgaaataactcaatttaatcagtatctagaaaaaaaccaagttttcttcaatcaattagataagattattagtagttatcaacaaaaaccggtaattgaagaagaaataaaaagattatacagtgaatataatgatttaataaccaaaaaagaagaattgacgaaagaaatgaacaacaagaacaaagattttgcaattattgaacattacactgaagagatttataagctgaaaaagattatagatgaatctgaaagacaaaaaaaggatgagaaattatttgataaattacaactagataaatcatcttatcttagcaaattaaaagagaagaaagaacagttaaatgaaattgaatcatcaatcaccaatatagatgcgactttaattgatttgaatgacaaaaaggattttgtaaatgaaataaagtccgctatgtcaattggagatacctgtccaatttgtggtaatgaaatacattcattgggagaacatattgattttgaatcaattgctcaaaaaaataataaaataaaacggttagaaagtaagaaggtaaaaattcgtgatgaaataatcaaaatagaaactcgaattgaatctaacgctttacctccgcctaaaccaataacaacgtcaatgtttttttctttatattgtttaactatacgttgaatttcttcttcagaagattctcctttaaatacttcatattcaaaatcaacgttgttatttgctgagaaactttcttttattttttcttcagtgatattccaaaccacttcatctgca

SEQ ID NO: 4076 - DNA, 3742 bp, Artificial Sequence
  Description of Artificial Sequence: synthetic nucleic acid sequence
ttaaattatcttcaaccgttttttgaattgctctaatgagtggtctagcaccatattcaggatcatatccttcttctgcaattttttctttcgctttatcagtaacaacaatattaatattttgctctgaaagacggtgagtaagtttatttaccatcattgtaacaatttcttttaattcatcttttgtaagtttgtggaagacaataatgtcatcaacacggtttaagaattctggtcggaatgaattttttaattctttcatcattgtttttctgacagtttcgtagtcactaccttctgaagcacctccaaaaccagcaaagcgttggtcctgtaattcttgagctcccacattagaagtcataataatcacagtattacggaagtccacagtacgacctttagtatctgttaaatgaccatcatctaaaacttgtagaagaatattaaatacgtcaggatgtgctttctcaatttcatcaaataaaatcacagagtatggtttacgtctaactttttcagtcaattgaccgccgtcatcatgtcctacatatcctggaggtgcaccaactaatcgactgacagcatgtttctccataaattcactcatatctacgcgaatcattgcatcgtcttcaccaaacatagattcagctaaagcacgagccaattcagttttacccacacctgtaggtcctaagaaaataaaactaccgattggacgttttggatctttaagaccagcacgagctcttctaacagctttactaattgaattgacagcatcgttttgtccaatgacacgtttatgaagtgtatcttcaagattcaataaacgatctgattcagtttcattaattttagttaaaggaatacctgtccaaccagctattacttcagcgatattttcttcagataaggcagtatctaaaccaccttgtgcatttttccattcatttttagcatcttcatattgcttttcaagtttagattgcttatctcttaaattagcggcattttcaaattcttgagcatgaactgcagcatctttttcattttttactttatcaatttcttgttcaatctcttttaaattacttggcgttgtatgacttttaagtctaacttttgaacttgcctcatcaattaagtcaatggctttatctggcaagaaacgatctgaaacatagcgatcactcaatttagcagccgcttctaaagcttcatctgagatattaattctgtgatgagcctcataacggtcacgtaatccttttaagatttcaatcgtgtcttcaactgtaggttcatccacttgaattggttgaaaacgacgttctaatgcagcgtctttttctatatttttacgatattcatctaatgttgtggcacctatacattgcaattctccacgagctaaagcaggttttaaaatattagatgcatcaattgctccttctgcgccaccagcgccaactaaagtatgaagttcatcgataaatagaataacattaccagcttgatggatttcctccataacttttttcaatctttcttcaaattcaccacgatatttagtgccagctacgactgtacccatatctaatgacattacacgtttgtcttttaaagtttctggtacttcatttttaacaattgcttgcgcaagcccttcagcaattgctgttttaccaacaccgggttcaccaattagcacaggattatttttagtacgacgacttaaaacttcaattacacgagtaatttctttatctcgtcctacgactggatctaacgttccatctttagcaataacagttaaatctctagctaatccatctaaagtaggcgtgttattagacttattagcttgcgcatttttattactcatttctggacttcctaaagcttttacaacttgggcacgtgctttagtaatatttaaatctaggtttgcaaatacacgtgctgcaacaccttcattttctctaattaaacctaatagtatatgctctgttcctacaaagttatgatgtagctttcgagcttcatccatagacagttcaattactttttttgctctcggtgtataatgtagtgtgcccatttgctcttgaccgtgaccgataagtttttcaacttcttcgatgactttatcttcagtaatattaaaacttactaatacctttgctgctataccttctggctctttcattaaaccaagcaaaagatgttctgttccaatattagaatggttcaaacgaattgcttcctcttgtgcatgtgccaacacacgttgtgcacgctctgtcaatctaccaaataacatgtataaatacctcctattttatatgttctcttaataaatcagctcttttttcatttactgttctattatcatcgtcatctattaaaaatggtgactgtattgctaccattaattcattaaatttaaaattttcaagcaaaatataattcaaatcaatacctagtttcacttcgctcaaacgatatgaggcttcttccatagaaataattctactgttttgtagtacacctaatgatcgataaactctatccagtgtctctacagaattgtgtttatcaagtctttctcttatttgcttttcttcatttataatttgatttacaacttcagttaagttatcgataatgtcttcttctgttttccctagtgtaagttggtttgaaacctgataaatgtgaccatatacttgtgacccttctccgtatatacctcgaattgtaaatccaaaacgattaattgtttgtgcaattctgttcattcttttcataatggagagtccaggtaaatgtaacatcacacttgcacgcattcctgtaccaatattagtaggacaggtagttaaatatcctaaatgctcatcataactaatgtctaacgctttatctaattcatcatcaattttagaagcgcgttgatataaatcctttagcgataaatcagttcctagagcctgtattcgtatatgatcttcttcgtttatcataacacttaccgattcatcatcatttaacattactgctgaagcaggttgtttcactagttcaggactcacaagatgtttcgcaaccaatttcattttactttgttgatccatcgtatctaatcgatttaaagttaagttggaaagcgcatcttgaacttcatttatcactcgatatccttcttgctctgaagggaacataagtgggtggacatggttttcaagatttctagctaatcgaattctggaagaaataataacaggtgtctcctcagacatcttcatccactcactaatattagtatggatattactcatcatgagacacctcgctctcactttttaaagctttaatttcatcacgaacaatcgctgcctcttcaaactcttgaccatctatcaatttatttagatattttgatttttcttcaatttgcttttttattgcaagtttcttatacgatgattgtggtgtttttcctacatgttcaaattgaccaccttgaacacgttgaactatatcaatgatgtcttctttaaacgtagcataacaatcagcacacccaagcttaccaacatgtgcaatatccttaagtgtcatctgacacgttgggcattttttttcttctttaaatgccatctcatgaaaattaataccatgttttgcagcaaggtgttgaagtatctgtttcactacaaatgcttcttcc

SEQ ID NO: 4077 - DNA, 3033 bp, Artificial Sequence
  Description of Artificial Sequence: synthetic nucleic acid sequence
gaaggaataggaacaaatgtattgatacaagccattataataaatccaattagaaagtaaggaatatcgattttttgttgtacttgacttgagtgtgacttataacgcatatacaaaatcaagacaatacttaatggaataagtaaaaacacacggcctaattttccaagtaaagcaaatgtcattgcctccgacccgccaatacctgctgctaaaacgacttgagcgatttcatgtagactgatacctgtccaagcaccataagttatagtaggtatgttaaaaatagcctcgatagctgtataaataagtgcaaatatagttccaactagtgcaataatacctacacttattgcaatgtctttttctttagattttaagattggtgctgtagctgcaatagctgcagctccacatactcctgtaccaataccaagtagtatagagatatctttatttcctttaataatttgattcaaaagtaaagttaaacttattgaaaagataattacgataatatcaataagtagtaatttccaacctttacctagaatatctcccatatttaattttaacccatataagataatcgcaaattttaataaacgtttcgatgcaaacgtaatacctgggcgaatatgctcaggataacctatgacttggcggtatatcatcgcaaaaatgatggcaatagctaacgccccaatcgtatgtaaaataggaaatttagctaatatataactgattattgcaatcgtaaatgtaaacataatacctttcataaatgaagcctgcgttattgatttcatatgtactttcacctcgatatgaaatcttagcacgttattgttatagcgttaaataaataataagtatagtatatatatcaaaaatgttatattagaattaaaggagaatgatgcatggatccgtataaggtattaattgaagtaatgaaaacagaaagttttactagagcagcagaaaatttatatacttcgcagccttctgtgagtcgtgatattaaacgtttagaattaaaatataatgttaaaatatttgaatttaaatctccatatttaaaactaactagagatggcgaaaagctattacaatacgcattgcaacgggaaagtattgaacaagaattatggcaaaacttaacatcggaatctgaaatcatctcaggcaccttaacaattggaagcagttatacatatggtgaatatttattatcagaacagcttaccagtcttatgcaacaataccctaagttacatattcatttacgtgttaataattcagattctgttataaatgatattaaacacaacagagtagatataggtattgtagaaaaggaaattcaagacaatgcaataaaatgtaaggaaataatggaagacgaaatggtgtatatttacaaaaaatcgattcaacctagaatggatatatgtttcgttagagaaaaagggtctggaacaaggttttatcaggaagtaggtctttctgagttgaaattaaatccatatttgatagaaattaacaatattaagattattaaacaaatggtagaggctggaaatgggtttgcaattatttcaaaatcagcacttcatccagaagattatgaaaaattaatgataacaactttaaatgtgaaacgtcactattaccttgctcaacatgttgataaatatataggtgaaaatattagagctgtcattgaaatgattatgaagtagagtatataaaaaatctgaggctaggaattatgtcccagcctcttcggtatctattagtcttggaatttaaattctaatggcggaggaagagggattcgaacccccgcggcccgttaaggccctgtcggttttcaagaccgatcccttcagccggacttgggtattcctccaattaacacaataacaataatataatgactttaattaaaagtcaatataattattcttgagtttacactagaacttctttacttaagtattgatcaacagaatgtgctacttcacgaccttcttttattgcccaaacaaccaaactctgacctcgtcttgcatctcctgcagcaaatattttagcgtgattagtttgataatttgtatcattagctacaattttattacgctcggtgtgtatatcaaacgcatgcggaacagtggtttcagtaccaacaaaccctatagataataagactaaatcagccggccaaaatcgttctggtccatcttccatcaccatgccatcaggcgtttcttttaatatttgtgtatataagcctttaacatttcctaactcgtcaacatcatagcgcattgtttgtacaccataggctcttggttcttgaccaaatttagcttcatattccttatgcgcataatccattttgaaaacaggcattgctaatggccaggaagtattactttcaaaagtaatctcttcaggctgtttcgtatatttattaaattgaacaatagatttacagttttcacgtaatgctgtcgctacacagtctgcaccagtatcaccagcacctataataattacattcttatctttagcagtaatgctcaaactttcaatctcaccatttagatactgtgtttgttcagtaagatagtccattgcaaaatgaataccagagcccattcgtccttccaatggtaaatctctcgcattttgagcacctgtgcataaaataatagcatcataattttcttcaagtgtttcacggctcacatcgacgccaatttcaacgcctgttttaaataaaaccccagcatctttcataagtgatacacgtcgacgtattacgtctttatctagtttcatatttggtataccatacattagcaagccgcctggttcatgcgccttttcataaacagtaactttatagcctttaaagtttaattcttcagctgctgtaagtcccgctggaccactacctacgatagcaactcgttggtctttatgatcttcaggatatgcgggatgaacccactcattctcata

SEQ ID NO: 4078 - DNA, 2259 bp, Artificial Sequence
  Description of Artificial Sequence: synthetic nucleic acid sequence
taatgtgtcaacgccttactcatagatgtaaaggttttaacaccgtttataacataaccattttcagctttaacagcatgtgtagatgggcgaccacctctagtaggactaccagtttccgcttcactgactgctctattgatcagtgcaccatgaacaacttctttagcaaaggaatctaacattgatagtgaccacatatgttgctcgtacaattgaccaattacacttaaatgccaccctatagataaagcagttgctccatcaatagtacccaaataactttgtaaaatcaccatatcttcaatagtagcaccttcacccccatactctacaggcaaagttagtttagtatatccttcctttatcagccactcaatattttcatatggaaatctagattgaatatcattttcagctgcgcgtgctttgaattcactttcaatctttttaaatttacgaatccactttttttgaatgtcagtgtgaattaaaaaagactccatcacatttacgccccctatgactcgttttattttaaatttaattattcatagtttaacactcgactttattttttcaaaatttactaattgtacttcatacgcatttccctctgatattgaaaagttaacaattaatatatacataacttaatctatgaatgtatctagatagtcaattttatttcttttataaattttaaatataaaaagcatcgccacattcataatgtagacagatgctttttagtagaattttgattttcaaatacgtttaaactttatagagtaatgctaaaattttggacataaaactcattgaattaaaaatctgatctaaaacagttgcgactataaatttaaaaataatcacaatgtatcaattaaggttaactcaatttttaaattttaatattttcattttttatgcattatttatacagattgatttttaattcctgcaaacaacataatccatgtagcaaaaataaatggccatgttaaagttggtaaacctaatggtgcgagcaatgtgctcaaacctaaatgtatgaatgcagtgagtactattcctaaaatcattgcgagataactatggattgctgtctcaaaagtgacacctagcgcaatcgcagataaaactacattatagccaaatatgccttcatttatactactatagtctccacccagtaatataattattaggaacccaataatgtttgcaattatagaaacaattccagcttttttagaacctataaaaatccctattagaattaacaaaccacctattatgctgggcattaaaaatatttgtccaaatccatctaaaactgattgaaaaaaatgaacacgggtgtggtcattatttaaagataccttttctatatgctccggaataatatcaatctgagtatgtaacgttttaagttgattaggtattaataaagtaatccacgtcataataacatacggactagttagaaacgctattttatgtggtttcaatacttctctaaccgctgctccaatcggtagcgttaaaatagtggctacgaatgtgattaatataccgctccaattgctatccaaaaataaagtaagtgcaattgcggttaatacagggttaaatccggctaatccactttcgatttcttcttttgtgtaattcatatatggtgccaatatccaagtcattacacttgcaatcattgcactgattcctactttccaattcactgcgaacagtccaattaaaatgaataacccagtatatggattattaattaaaaccacttgagagatactacttaaaattacttttatcaatttcaattttatagcctccttttattcactacattaattatttaataaagacagttttcaaattaccattaaatattcatcatatcaattacattttactaaaataatgtttatgtacgctggatatttttcatatttattcaactttatacacttaatttaaaaaaacattgttaattagataaaattatcaaagtattatacttgtatacttcattaaatagttttaatataaaatttgcaagacaaattaatatgaaagaagggatagttttgcactttacacaacgtgaacaagacaaattgatgatagttgtagctgctgaggttgcacgtcgtagaaaagcaagaggacttaaacttaatcatcctgaagcacttgctttaatcagtgatgattaaagcaagtgcttcaggatgatta

SEQ ID NO: 4079 - DNA, 4095 bp, Artificial Sequence
  Description of Artificial Sequence: synthetic nucleic acid sequence
cttcttatttataattaaaaactaccctgcaattgatttaaagacagttgcgggtagtcatagaactttattatacaattaacctttccaaagacttgctaaatcttgtaatgaaaagataccagtcattattgtgacaattacggctataataccaaaaacaagcatccatgttgggtgttggtaattaccaacgatagattttttcctacttgcaatgagaattgcacctaatgtgattggtagaatccaaccattaatcgcaccagctattataagtaaactcaccggtttaccaataaataagaaaacaaaagttgaaattacaataaatgtaataacgataagattatttttattgagtaacgatttgtgtagtgtttttaaaaatgttgcgcttgtatatgcagaaccaattactgaggacattgctgctgcaaatattactacgccaaaaatatttttacctataggacctaatgcatgttggaaaactgatgctggtggattttctgaactaagcgtaacgccagttacaacaacacctagtacagctaaaaacaataaggtgcgcatgacaccagttgttaaaatacctgctacagcagatcgatttacgaaaggaaggtatgacttaccttttataccagaatctagaattctatgtgcacctgcaaaagtaatataaccccctactgtaccaccaactaatgtaattataggtaatataagtttgaaaggatgttcaggtgcaaatgtatgtactaatgcatctccataagggggatttgaaacaaccatgacataagcgactactaaaatcattacgatacctagaatcatactaataacatccattattttctgaccacttctactaacaaagataagtatcgcaaaaatagctgttattgcagcaccccattttacatcaagaccaaacattgcatttaaacctaaacctgcaccagcaatattacctatgttaaatgcgagaccaccaaatgcaattagtatggagataatagtaccaagtccaggtaatactttattagatatttcttgtccacgtaatccagttaccactaatattctccaaatatttatttgagcgcctatatctataataatagaaattaatattgcaaatgcaaaactagcataaaattgtgcagtaaacactgcagtttgagtcagaaatgctggaccaatagctgatgtagccattaaaaaaactgaaccatataataatcgtctatgtttttttgtgaatttaaaattttgtcctttttgattgaaatcttgttttgtattttcccccatcttttgaccccctataaggattgaatatcaatgccttctttcattaattcatttctaatttgcgtaacaaattctaatgcgtgttttccatctccgtgaacacaaattgtatcagctttcaaatcgatgatttttccatttttacttacaactttattttccaaaaccatttttaatgcttgttggattgcttcgtcagtattagtgatagtggcatcggttttttttctacttaccaattgtccgtcatcttcataacgacggtcagcaaatacttccgaagctaccttaagccccactaattcagcttccgaaataagtaatgtattcgctaagccgacgaaaattagatttgagtcgaaatcaaaaactgcttgagcaattgcatgtgcaatttctttatttctagcccccatttgataaagggcaccatgaggtttaacatgcatcatttttacatgattgattttacaaaagccacttaacgcacctaattgatatataactaagttataaatttcatttggagtaagatccattttacgacgaccaaagcctttcaaatcaggaagacccggatgtgctccaatacttatattattttttttcgctaattgaacagtttcattcataacatcttcatcacctgcatgataaccacaagcaatattagcagaagttattaatggtaaaatgtgctgatctccaccgaatgtatagttaccaaaagcttctcctaaatcacaatttaaatcaattttcaacttcatttcacctctttaatgatttgatgtttttcaagaaattttatatctactttactggcatcgccttttgcatatattggataatttaaaaccgcatataaaaagtcagctgtagtagtaaaaccttcgatgaccatttcatctaacgcaacttttaatttattaatagcagtttgtctattagaatcctttacaatcactttagctacaagtgaatcataataaggagaaacctgataacctgtgtaaagtaaagaatctacacgtatattaaatccttgtggtaagtgtaatttattaacttttcctggagtgggtaaaaagtttttttcaggattttcagcatttatacgcgcctcaattacatgaccattaaataaaatatctttctgagtgaatggtaattcaccgtgtgttaataaatataactgagcttgtaataggtctctatcagcacgcatttctgtaactgtatgttcaacttgaatacgagcattcatttcaataaaataatgtgcatcttctgtaactaaaaattctattgttccagcactacgatatcttgaagcttgagctactttaactgcgtcgccacatattcttgttcttctttcttcagttaatgcagcacaaggcgcttcttctattaatttttgattctttcgttgaacagaacaatcgcgttcacctaagtgaacatagttatttttaccgtctccgataatctgcacttctacatgttttgctactggtatgaacgcctctacatacactcgatcatcattaaaatatttttgtccttcacttttagcttctttcaaagcctgatccaaatgagatgcttctttaacaattctgatgcctttcccaccaccaccactagctgcttttagtacaactggaaatcctatttctttggataataatttaatttcatctacactttgaacagcatcattagaacctggtataacaggtactcctgcttgtttaacagtttgtctggcagtaattttatcccccatcatttccatagttgtcttactaggtccaataaaatgtatatgattgtcttcaacggctttcgcaaaattcgtagattccgataagaaaccatagccagggtgaattacgtttgattctgtaacttttgcagcagatataatacgatcaatatttaaataactgtctaatggatttgcttcacctatgcatattgcttgatcggctaaacttacatgtaagctattttcatcaccttttgcataaatggcaactgtctctatgttaagctctctacaagctcttataattcttactgctatttcgcctctatttgcaatcaaacatcgatacatcattgaattcctcctatttaactctgactagtagctgatcatattcaacattgtctccatgttctactaatatttcagtgacctcaccagtaacatccgtagttacttcattcataactttcatagcttcaatgtaaccgataatatctccttcagttacagtatcgccaactttaatcttaggttctgttagttctttactatcttgtaagaaaaatgttccaaccataggagatttaatctcttgctggtcatttgatatggactcttgcttttcatctaaggatttaatattctcttgttgaatatcttgagatgattgttgcgaatgttgttgagatgctccattagtaaaatcaagttctatttcattatgagagtccttatacttaaatttttttacatcattagcttttaccaatttaatgacttcctcaatttttttaatatccatttatctatcctccttaattatttctgcgattttattagaagtatgtctaagttgatttaggttaaacaatggttgctcatcaaaacgctttaataattgttcaaatttagtattaaattctttaagcttttttgaagcttcttcaacagttatccatttaaactgtataatgtctccaggcttcatctgtgct

SEQ ID NO: 4080 - DNA, 3246 bp, Artificial Sequence
  Description of Artificial Sequence: synthetic nucleic acid sequence
tactgatatttattaccacagaagtgacatacagcttcagctccatgatcctctttaatcatgctatgaatttctgcctctcctaaacctttaatagcatttaaaaatttctcatgactacaattacattcaaattgcgctgacgttgaatttaaaatttgaacattaccttcacccaaaatttcatttaatattccttcaggtgtaagtccttgctcaattaatttcgatacaggttgcatttgactaatggcttcttctaatttagtcaccgtttcatcagtagcacctggcataacttgaataataaatcctcccgctgctttgattgagttgtctggattaactaatacacccaatcctactgatgatggtgtttgttcacttgtggcatagtagtatgtgaaatcatctcctagctcacctgatactattggactcgcaccagaaaagtagtctttcattccaacatctttaacaacctgaatggaaccatcagtaccaactgctcgccgtacatccaatttaccttgatcgttgagtggaaaatgcgtttgtggatggtctacatatgcacgaacatttccttgagcatctgcgtcagcaataattctgccaattggacctttgccatcaacagtaactgttaacttttggtttccttttaacattgcacccatcataacagtagctgtcatagttcttcccatagcggcagaagcagtaggccatgtataatgacgtgtttgtgcttcttgtactgactctgttgtgattgcagcatatgctcttatttccccaccgtatgctaaacctctcactatataatcatgtgtcattgttaaatctcctttttaaaaataatctataatttaaaactttttattttttaatactgattggttattatacatctcttattggctaatatgaaatctattgctcatacatgtttattgagtattataaccatgagagatgataacaatatttttaccaaaagtttaaaaatgtattggtataaactatacataaaaaagtcccttttcactcaattcatacgtgagcaaaaagagacttactaaaacttgtactattgtctatgatttggatcgttaggattgtatggtttatcgatgttcggagattgttgatgacctggttcattcgtatgtgaagtattatcagcttctctgtctgtgttgtcttggtttacttcatctttttcatggttgtcatcatcttctttatcgtcatcttctaactgttctttacgaatgtcgttgtatgattttccatactttccatcactataatcactattttcatttttcacaacttttgcagagtcataatctacttctggtaaaacaccatcatagaataatgattgaatttgttctgcaactaatgtttcttctgaaagtagtgttttagcaattaacttaagttgttcttcatgttctaacaagatttgtttacaacgttcatattgctctttaacaattcgttgaacttctttgtcaatttcataagcaatttgaccagaataattcggctcaccttgcatatctttaccaaggaatacttgtccaccactattgcttgagaattgtaatggtcctaatttcttactcataccatattctgtaaccatagatcttgcaatttgcgttgctcgttcaaagtcattcgaagcacctgttgatacttcaccaaagttaatatcctcagatactcgtccacctaataaaccacatattttgtcgagtaattctggttctgtcattaagaagcgatcttgttttggtaacatcattgcataaccgcctgcttgtccacgagggacaattgttaccttgtgtacaatttcagcttcatcaagcaccataccgatgatagtatgacctgcttcgtgatgcgctacaatattacgttctttttcagaaattacacgagattttttagctggacctgcaataacacggtcagttgcttcttcaatatcgcgcatatcaattttatttttaccctcacgtgctgcaattaaagatgcctcatttagcaagttttctaagtctgcaccagaaaaacctggcgttctttgagaaatagcttttaaatctactgtttcatcaagaggtttatttttcgcatgcacatgaagaattgcttcacgacctttaacatctggtcgtccaacttgaatttgtctatcaaaacgaccaggacgtaacaatgcagggtctaagatatctgggcggtttgtagccgcaatcataataataccttcattttctccaaaaccatccatctcaactaatagttggtttaatgtttgttcacgctcatcatgaccgccacctacacctgcaccacgttgacgtccaacagcatcaatttcatcaataaaaatgatacatggggcatttttcttagcattttcaaataaatcacgaacacgactcgcaccaacaccaacaaacatctcaacgaagtcagatccactaattgagaagaatggtgcaccagcttcacctgcaaccgcacgtgctaataatgttttacctgtacctggaggcccaacaagtaagacaccttttggaattcttgaacccatttgtttaaatttcttgttatcttttaagaaatctacaatttctattaattcttgtttctcttcgtcagctcctgctacatctgagaaacgaactcgacgtttattactgtcgtacatcttagctttggattttccaaagttcatcatacgaccaccaccgccgccaccttgggcttggctaaggaagaaaataaataataatgcaatgattaatacaggaatcagtgtcgttaaaatactaacgaatacactttgtttttcttcttctttaactgtaaatttaagattatcttgtttcttagctgtatctgtgattttttgtaaatctttttcattgttatataaaattgtcgatgagtaatcttcatctttttttgttttaccacttaccatatatacgttttgctctggttgaatttctaaagtttttaaatcgcctttattcaacttattaacaaactgagtatacccaataatcatagctgtgcttagcttaccaataccaggtatcgaatgaatattttcaaaataatcgagttgttgtgctaattgaatcatggcatcatctaattgtttgagatgatgaatagattgttttaattgttgaataagtaagcgtaattttt

SEQ ID NO: 4081 - DNA, 3009 bp, Artificial Sequence
  Description of Artificial Sequence: synthetic nucleic acid sequence
attcagataacgtagccgtccaagttttaccagcataagtagctgtaaaagtttgatttgaagcattatatttcaaattaacattatttaatttttgaccatggaatttaccatctaaatcattagtagtattatctgcgtagttaagaaaatctgttgatggagtacctgatcctactttagaagtattaccttgggagtcatttttaacaaatgtcccataccctctatagccttgaccagcttgtttctgtattttatctaatggatcgttattataatatcctgtatcaattctgaaaccagctgcactaggtgtacctttttcacgtaagataccaccgttttttaggaaatcatccccatctttcttgctgaacataaagccccaaccatctgcaccagttgtattactttgacgattgtttgctactctaatgttaaagtcgaaatctttatcaaaactaacttgatttttaaattgaactgcaccagctgttgttgtaccaggtggctgtccataattatatctcgttaaatttgtcgcatttaaatctgtaggattactttcgatatctactctaccgtaaaaatcgtaattatctctacctttaaccgtagttggcggtatatctattgtatttttagtgttattggatgaactatcagcaggcatgcttaataaggacataaacggagaactataatttaaattcacaggttctgaagttgtaggttctattttactgtcagtgtttggttgtgatgattgtaattcctcgtttttagaaacagcagggatatcttcttttctagctaggtcatttcttgtaggggcttctgaaaattgtgtttgtgtatcattatctgaattagctttgatagttggaacattcggtgcttctgcattgcctccttcttctgtcttcgttggctcagattgaggtgcttctgcattgcctccttcttctgccttcgttggctcagattgaggtgcttctgcattgcttccttcttctgtcttcgttggctcagattgagctgcttctgcattgcctccttcttctgccttcgttggctcagattgagctgcttttgcgttgcttccttcttctgtcttcgttggctcagattgaggtgcttctgcattgcttccttcttctgccttcgttggctcagattgagctgcttttacgttgcttccttcttctgtcttcgttggctcagattgagctgcttctgcattgcctccttcttctgccttcgttggctcagattgagctgcttctgcattgcctccttcttctgccttcgttggctcagattgaggtgcttctgcattgcctccttcttctgccttcgttggctcagattgagctgcttctgcattgcctccttcttctgccttcgttggctcagattgaggtgcttctgcattgcctccttcttctgcttgcaatgtagaagacatctgtggtgcttcattgtttacagtaggttgatttgtgttttcaagtgatctttcactactatcattttgattagcttgtgtaattggatcaacttgtttttcttctgcagctttcgcttcatggctactacttccaaaaataagtgtcgaaccaagtaatattgaggccgtaccaacagtgaattttcttatagaatacttgtttaatttgttaggtaaaaaatccacttttttattaataggaccttgtctacgtttgcccatattatacctcccatgtatttaattttaaatgtaagatacatatattttatgtatctagtatgtaatgttaccttcttttacattttaacgcaatactttacatattatttatgattaaaaaaatatcattttgtataaattattattttttaaattttatttaactttaaaccttttatttattttttataaagaagatcaaaatccattcaatagtgaaaatatttaaaaataataatgcgacttataaaactacaagcatttgaataatcaataataatgttaaaaagagacagctttatgatggtattgtaattacaagtaaatgaatattaaatacaaaaaagctagatacctataggcatctagctctatttataaaacgtagttagtatgaatagattatgtaagtgataacttagtaaccgaatgcatgtgcaatgtcttgaataataccgccagcattcgctacgatattaacgatactttttgctaactcagcaccatcttctgcttgtgctgctgatacagtattagctatagcttcagctaatttagaaacatgttccacgttgtattccctcctcctaattaagttatctatagaatagcattgcttttttaatacaaattaaactcaattttaaaattttgtaaataactcaatcgttcattatacgtaattttgatttatactttaattttatatattagcacacaattaataagggatttcaacaattctgcaatgcattgtagaattatcttgagtggtattacttattatgcttaagaataaaatctcttggattaccatataatgattctgcacctgccacttcttgttgggcataaggatgattagaactacctcttaaattatatccatacgtacgaaccccataaacaacgtactggctatctaccataggagatcctgaatcaccagctctaaatttatcttttgtcatgagttctgatttattcgatgcttcttgtaaaaaacgtaacttattccagtatgcatatgtattgtttccgttcatcactggatatcctaaagaatataatttcttgttaaattttaaactcttaattttttgattggttgcaagtttaagtggttgcacgttagctttttgagccatattttctttagtttcaacgacaaccatatcgtatgaagggattttatatatctttttagcatgaaattgatagggtatctttttaccgtctctgtttaattgaaattttattttactcggactcgt

SEQ ID NO: 4082 - DNA, 4215 bp, Artificial Sequence
  Description of Artificial Sequence: synthetic nucleic acid sequence
agtgaccacatttgtgatttacagtgtaattccagaatttactagaataaattataaactcatttgtattaatttttaatttagaatatcgttatctacaacttcgaagttctttaaatattatcaattacagtaccttcatcgccccatgcattcattccaccttcgacatttacagcatgaacaccttgttcttctaaatatgaaactactttagcactgcgtgaccccgctgcacacacaatataatacgtgtcatttttattgaattcttttaaattatcaggaatttcatccataggaattgtttttgctccaggaataacacccatttcagtttcttcgtttgtgcgaacatctacaatgttaactggatttgaatctaatatttttttctttaattcatctactgttattgactccatttaatagcactcctttagaaaaatattatttagcaactatattaactagcttttgaggtacagcaataacttttttaacttcttttccttcaatactcattttaacattatcattagacaaggctaagtcttgcatttcttctttagataaatcttttggaatattgatttttgctctaactttaccattgacttgaactacgatttcaacttcatcatctactaataaactttcatcaaatgttggccatggttgataagtaatggtattttcatgccctaatcgatcccataattcttcaccaatgtgtggtgcaataggcgataacatttttacaaacccttcgatataaggtttgtaaacttcattagttttataacactcattaataaacaccattaattgactgattgcagtattaaaactaagtgtatcaaaatcttctgttacttttttcacagtttgattgtaaaccttatcaagtgaatgattgttagaatctacaatttttttattgattgaattttcatcagtaatgataagtctccaaacacgatctaagaatcttctagaaccatctaaacctttttcactccatgcgatcgcagcatctaaaggtcccataaacatttcatatagtcgtaatgtatcagcaccatgtgatgcaacaatatcatctggattaatcacattacctttagacttactcattttttcattgccttcgcctaaaatcattccctgattgtatagtttttggaatggttcttttgttggtacaacacctaagtcatataacactttatgccagaatcttgcatataataagtgaagtactgcatgttccacgcctccaatatataaatcaacaggtagccaatgctttaatttttcaggatctgctatcattttttcgttatgtggatcaatgtaacgtaaatagtaccagcaactgccagcccattgaggcattgtattggtttctcggcgccccttcatacctgtcttttcatcgataacgtttacgaacgcatctatatttgcaagtggagattcaccggtacctgatggcttaatttcatctgtttcaggaagtagtaaaggcaattcatcttcaggaactgtagtcattgatccatcttcccaatgtataataggaattggctctccccaataacgttgcctactaaataaccaatcacgtaatttataattgacttttttctcaccagcacctttagattcaagcaattctatcgctttacttattgccgcttcattttctagaccgtctaattctccagaattaatgtgttttccttcacctgtgtatgcatatttttgaacttcgccaccctctataacttcgataattggtaaattaaacttcgtagcaaattcatgatctcgctcatcatgtccaggcacagccattactgcaccagtaccgtaagttgataaaacataatctgctatccaaataggtaatttatcgccagagagcggattaattgcaaatgttccagtaaacacacctgttttttctttagctaagtccgtacgttctaaatcagatttttttgatgcttcattttgatacaatttgacttcttgttctttatcacttgtcgtaatttcattcacaagtgggtgttctgggcttaaaactaagaaagaagtaccatagattgtatctggtcgtgtcgtaaacacttcaatattttggctttttgagcaatatctatttgttgagactgttgtgtgctttgtttttcgctttgatgtgtttcattggtgttacgattttgtaagtactctgctctcactctcagccattggtcagccggcactccaactactttgacagttttattaactatattacaaactacactttcaatattgtttctcttttcatcatctttatttactatttcacaatgaatttcttcatcaaatttaactaacacatgatcttcactagctgctactggttctgaattcagtagcaaacttactaaagactttttatcattactttttgcatgatcaatcacttcttgccaatggttcttcaacaatttgatatcatctttgtttgctttgtctaatactttcgctatttgttgcatagaaaacgtatttttagatcgttgaatcgtacgtgttggtttcttaggttgttgactaactttattagttttgatcccttgttcttttaaggttttaagctcattttcaagttgttctaaacgttgtaataacatctcattatctggttcattagctaccgatgctgttgctacattttgtacagtttgaggctgtgtcttaatcatttctgcaagtttaactagcaacacttcaaaatgaacactttgatttacactgaacctaatggatactagtgtatcattgatgatatctatcatcctgtataacatatctaagtcgaaatgaataagtgattcaaaatgaacggattcgttagacgttttattcataattgtatctctaacaaagtaaatcatatcattaatgagtctgttgacttctttaccttctgaaataaaatgatgatatctattaaatgcggctttaacatcactttttacaatgtcattaaataactcatttaatgccgcttcatcaacactacctgtaacatttaaagcatcttgtaaagtaagtcgttcgtctccaaacgctattgcttgatccataatgcttaatgcatctcgcataccaccttctgatgctttagcaataaattctaatgctgcgtcatcgtaatccaaagattgagaattagctacatacttaagtctatctataatttggtcactgctaattgctttaaagtcaaatcgttgcgctctcgaaataatagtgggtggaattttatgtggttctgttgttgccaagataaatatagcatgcgctggtggttcttctaatgttttaagcaaagcattgaaagcaccagtagttaacatatgaacctcatcaataatatatactttatacttagattcactaggtgcgtacttaactttatctctaatattccttatttcatctacaccgttattacttgcagcatcaatttcaattacatcgttattcgtaccttgtgtgattcctttacaaatcgcacattcattacaaggttcaccatcgtcactattaagacaattaatagctttggcaaaaacctttgcaatactagttttacccgtacctctcggaccactaaaaatatatgcatgggattgtttaccttttgaaattgcattacgcagcgttttagttacatgcgtttgtccaaccacatcatcaaaactttgcggtctatacatacgatacaaagcttggtaatccaccgtagcacctccattaacaattactcattattatatcacgctcttatattttcttatcaattaaaatcaatccagtacttccggataatacaccgtcattccagaccattcattttgaactggttttagaaattttactaataatgattgatgatttcgtttttcttctatatgtatattatataaatgggctgcttcataatcagatttctcaaagtactgaggatgattatttacaaaaatagcacaatagccttgttctttagcacgttcttctacagcttttaacagggcttgacctaaaccttggtttcgaatagatttatctactgacagtgcaccaatggctaacgctatcgcttttttgtttttagacgacaacttaacctctgctaacacaacgtga

SEQ ID NO: 4083 - DNA, 2995 bp, Artificial Sequence
  Description of Artificial Sequence: synthetic nucleic acid sequence
ctttaggtagtcacctcgtttgggcagctattgttggtgctgcggcagtaatagtgaaagaaacaaagcatttcgaatgggcgaatatcatcgataaacgttttatatttttcttttttgtggcagtgacattacacggaatatgggatacggaaataacacttttaagtagtggttatttaaaatatatcttattaattatgattgcatggctatttatatttatacttatgaaagcagggctaactcaggtgaatcagttgcgtgatgaatacaatcgtttagaggaaaggtgatataaatgaaattctgccctcattgtggaaatccgataaaaaaggaacagtcattttgtaataaatgtggaaaacatttaaagacatcgacacaaagaaaaagtgaaaatcaaattgaacatatgcgtgaacagcaatcgtatatttcttgtgaggaaagacaacatcatgattcaacattttataaagaacaaaaacatactggttggctaattgtattatcaattatatttgtcttgttgatagcagcgctattgtatggtgcgtactatacttacaatcattatattagtgatgagcaaagtcatcaaacaacacagtctcagcaatcaaatgaaagtggtcaaaataaggatcaatccactggtccaagcattgatgtttttagtgatgactttgatcaaggttatatgaagtcagcttcaacaagtggatatagaggtgtttataatggaatgacacgtgaagaagttgaagataaatttggaacatccaatggttctgtagaaagtttgaagtggagttacgaaaaatatggtgatttagctgtagcctacgatgataatgaagttgttagcgtaggtgtagcacctaatcatatttcagaagatcaatttttaagtatgtataatgaaccggatgatagaaattcaagccaactcatttatgatagtaacaaagataatgacttctctgtgttagctaatgttaaaaatggatatgttactgtcattgaaaatgtaaatcaaatttaaatataacgcttatggaaagcctaagacctcacagagtgtcttgggctttttctatgattagtggtcagggtagattggatatagtattattccaagtcgctttaactttatagttgatggtttaatgagaaaattttaattgtgagcatatatattatgaatatatgcgagtcattttatactataatcaatcgcgcacgattgaaaagaggtggagatgtgaaacaagaacaaatgaggttagcgaatcagctttgtttttcagcatataatgtaagtcgtttatttgctcaattttatgagaaaaagttaaaacagtttggtataacttattctcagtatttagtattactgacgttatgggaagagaatcctcaaacattaaattcaattggtagacatttggatttatctagtaatactttaacccccttactaaaaagacttgagcaatctggctgggttaaaagagaacgtcaacaatctgataaacgacagttgataattacgttaactgacaatgggcaacaacaacaagaagctgtttttgaagcaatttcaagttgcttaccacaagaatttgatacgactgagtatgatgaaacgaaatatgtgtttgaagaactagagcaaacattaaaacatctcatagaaaaataagaaaggatgagtgttaatgaaacaatatgatgtagtatttttaggaagtggtcatgcagcttggcatgctgcgttaacattaaagcaaagtggtaagcaagtagctgtagttgaaaaagataccatcgccggtacatgtactaactatggttgtaatgcgaaaattttattagagggaccttatgaagtgcttgaagaagccaaacaatatcctaatattattgatagtcacaatttagaagtgaattggaagaatttaatgcattacaaagaacaagtcattaatcctatgtctgaaaccctcacatcgatgtttgaacaacagggaattgatgtaatcatggggaaaggtaaacttgtagatgctcatacaatagaggtaaataatacaactttacaatcagattatattgttatagcaactggacaacatagtcatcaattagatattgagggtaaagaatatacgcatgatagtcgggaatttttatcaatgcaatctttaccggatagtatcacttttattggagcaggtattatcagtattgaattcgcttctatcatgatcaaatcaggtgtagaggttaatgtggttcatcatacaaatcatgcacttgaagggtttaacgaatcacacgtcaataaattaattcaaaagttaaaagatgaaggtgttaaattttactttagtgagaataccaagtcagttaaaccgaatgcacaacgttttatagtagaaactgagtctggaaagatgattgaaacagattatgtactggatgcaaccggtagaaagcctaatgttcagcaaataggtttggaaaaagtgggtatactatttagtgatagaggtattgaggttgacgattatttaagaacaaatgtgaaaaatatatacgcaagtggggacgttatcaataaaatgattcctaaacttactcctacagctacatttgagtctaattatatcgctgcccatatccttggattgaatacagatgccattcagtatccaccaataccttcagtgctttattcattgcctcgtttatctcaaataggtgtcacagttagcgaggctaagaaagatgatacgtatatgattaaagatataccattcggaagacaaatggtatttgagtatcaaaacgaaacagaggctgaaatgtcaattgtattagatagtcacaaacgtttagtaggagcagagatttatggtaatgacgctggtgatttggttaatctcctagtctttatcattaatcaaaaacttactgcacaaga

SEQ ID NO: 4084 - DNA, 3543 bp, Artificial Sequence
  Description of Artificial Sequence: synthetic nucleic acid sequence
taatttacactttcttttatttttttaaattctcttttgaacgatttatccatttctgatatatcttttccctcttttggcaatcgatcaacatcaatttgagctaatttttcgctagttttaatcgtatctactctcgtatcataataattttgcaaactataatacatctcaattgcattttttctagcattatcaacatgattatcagaaatatttgttttattaatatccgtaatttgtttgtcaataagtggtgaaatatgatttttgattgcttctttcgctgaatcagaatcattatttgaagaatttaaatattttttagcagtatcttttaattgttgattattttcttctaattttgatttaagttgacttgcatcttctttattttgtgctttattaatgtcagactccacttcagttctatttttctcgaataatttagtataatccaaaatatcttcattatctttaattgagcgattacataaatctacaaattcttttaaatcatagacgaaaatcaagataacgaaacacttaaagatatgacgaaaagtgggaaacaacgcccatggagagaaaagaagatagataatgtaagttatgcagatatactggaaattttaaaaataaaaaaggcttttaatgtaaaacaatgtggtaacgtcttagagttcaagccgactgatgaaggttatttgaagttacataagacatggttttgtaagtcgaaactctgcccagtttgtaattggaggcgtgctatgaaaaatagttatcaagctcaaaaagtgattgaagaagttgttaaagaaaaaccaaaagcgcgttggttatttttaacactttcaacgaaaaatgcgatagatggggatactttagaacaaagtttgaaacatttaacgaaagcatttgataggttaagtagatataaaaaagtgaagcaaaatcttgttgggtttttgcgttcaacggaagtaacagttaataaaaatgatggtagttataatcaacatatgcatgttttattatgtgttgaaaatagttattttaagaataaagctaattatataactcaagaagaatgggttaatttatggcaaaaagcattacaagtaaattatcgacccgtagcaaatattaaagcgatcaaaccaaatcaaaaaggcgataaagatattcaagcagctatcaaagaaacctctaaatattcggttaagtcatctgattttttaactgatgatgatgaaagaaatcaagaaatcgtgaatgatttagaaaaaggtttatatcgaaaacgtatgttgagttatggtggtttgcttaaacaaaaacataagattttaaatttagatgatgccgaagatggcaatttgattaatacaagtgacgaagataaaacaacagacgaagaagaaaaagcacattcaattacggcaatttggaattttgaaaaacaaaattattatttaaaagatttgaaacgttagctaaaaagctagcgtttttttatgtctttttgcccctgcgggaactatagcgttcaaccggcatggttgaccagttttcatgttaacttttaagtttgcatgtaaatgggcagtgtttatttttttctgcccagtttgctaaatttttaatttgcatataactgggcagtgtttatttttttctgcccagtttgctaaatttttaatttgcatataactgggcagtgtctaaaaaattagtcactggttttgctcaaatttttgtttgtgaaattaagatatatttatttggctcatatttgcgttttaaaagcgtatatagacttttaggtataaaactatatgatttaccccctgaatctttaaaatgcccccttaaaattcaaataaaggcatataaaaataaaaagccaacccagataaaatggattggctttttatttgcttttgcgaagtagattataaaaaactacttttaataagcaccctaaatgtgatgtctatattataacaagaacacgcatttatgccgagaaaatttattgtgcgttgagaagaacccttaactaaacttgcagacgaatgtcggcatagcgtgagctattaagccgaccattcgacaagttttgggattgttaagggttccgaggctcaacgtcaataaagcaattggaataaagcaattaatgcgatgttccgaaaatgtttaacgaaactacgccgactatgattaaaactatagatactatagttattagatttatttgttctttgaaaataattattgagactacggttgttaagactaaacctagtcccgcccaagttgcataagttatatttagtggtaggtgttgcattgttttacttaaaaaatagaaacaaattccaaatgaaattattgttcctaaggatggtataaattttgaaaagccttctgaagatttaagaaatgcacttccaataacttcagtacttatggctattattaaataaatataaggcatttttaactccttttaattttcgtattttatttaattttattctaaaggatggtataaattttgaaaagccttctgaagatttaagaaatgcacttccaataacttcagtacttatggctattattaaataaatataaggcatttttaactccttttaattttcgtattttatttaattttattctaagtattttttaattgtagtcttgtattttgagtgtcattcgcgtggtatttttgtggattgatggtttttgaaaggtttttgaaacgagttgaaaacgagtttcttcttgtcttgatactatatagaaataactcgattttaaaattatagctgtaatccttggtatgtaagggattatagctatttttcttgttgaaaggaatttttgacataaaaaaaccggttctgttgcaaagttgaatttatagtataattttaacaaaaaggagtcttctgtatgaactatttcagatataaacaatttaacaaggatgttatcactgtagccgttggctactatctaagatatgcattgagttatcgtgatatatctgaaatattaaggggacgtggtgtaaacgttcatcattcaacggtctaccgttgggttcaagaatatgccccaattttatatcaaatttggaagaaaaagcataaaaaagcttattacaaatggcgtattgatgagacgtacatcaaaataaaaggaaaatggagctatttatatcgtgccattgatgcagagggacatacattagatatttggttgcgtaagcaacgagataatcattcagcatatgcgtttattaaacgtctcattaaacaatttggtaaacctcaaaaggtaattacagatcaggcaccttcaacgaaggtagcaatggctaaagtaattaaagcttttaaacttaaacctgactgccattgtacatcgaaatatctgaataacctcattgagcaagatcaccgtcatattaaagtaagaaagacaaggtatcaaagtatcaatacagcaaagaatactttaaaa

SEQ ID NO: 4085 - DNA, 3393 bp, Artificial Sequence
  Description of Artificial Sequence: synthetic nucleic acid sequence
accgttatactgaatttaggttagaagacttaaatcaacgtttataccactactgggcattaggacatatacaccaacgtgaacagttaagtgacatgccagtcattaactatccaggtaatatccaaggaagacatttcaatgaattaggagaaaaaggttgtctattggtcgaaggtgatcatcttaaactcactacacaattttatcctactcaatttattaaatttgaagaagctacaattgaaactgatcatacatctaaacaaggactttatgatgttattcaatcttttaaagataaagtaagaactgaagggaaatcattttatagattgaacgtacgcattaatagtgaagacattattgcaccacaagatttaattcaattaaaagaaatgattactgagttcgaagaaaacgaaaatcaatttgtttttattgaagatttaaatcttcaatatgttcaaaatgacgaaatgccaatagttaaagagttttcaccagaattacttgatgatgcgtcactttttgattcggcaatgactgatttatatcttaatccaagggcttctaagtttttagatgactataatgaatttgataaagttgagttagtcaatcatgcagaaagacttttaaaggatgaaatgagaggtgaacaaaatgataattaaatcattagaaatatacggatatggccaatttgttcaacgtaaaattgaatttaatcgtcaatttactgagatatttggtgagaatgaagctggtaaatctactattcaagcatttattcactctattttgttcggatttcctactaaaaagtccaaagaaccacgtttagaaccaagattaggtaatcaatatggtgggaaattatcactcattttcgacgatggcattgaagcagaggttgagagaatcaagggaagtgctcatggagatgtcaaaatttatcttaaagatggtactattcgagatgaagtttggctaaataaaaaacttaattacatttcaaagaaaacatatcaaggtatattctcttttgatgttttaggtcttcaagatattcataaaaatctagatgaagagcaactacaagattatttattagaagcaggtgcacttggatcaactgaatttacaagtatgagagatagaattggacaaaagaaagaagaattatataaaaaatctggaaaaaatccaattattaatcaacaaattgagcaacttaaacaattagaaaatcaaattcgaaatgaagaaagtaaacttgatacatatcatcgacttgtagacgataaagataaatcatcaagaagactagaaaatttgaagcaaaatttaaatcaattatcaaaaatgcatgagcaaaaacaaaaagaggttgctctacacgatcaaacacaagaatggaaaaggttagaacagtcgcttaatatagagcctataaattttcctgaaaaagggatagatagatacgaaactgctaaatctcacaaacaatcacttgaacgagataaaagtttgcgagaagaaagattaagcatattaaataaagaggcggagtccatcaatccagtagaccaaaagtatattgattcgtttaatagcctttatcaacaagagactgaaattaaacaaaaagaatttgagttacgttcaatagagaaagatattgctgataagcaacgtgaactagaagctcttcaatctaatataggttggcaagaagtgttttacgacacagacagtactgaagcgatgaaaagtcatatgagtgatttagtattaggcaagcaagaacaaattgcttatatcaatcagttagaacgtggacttgaagaaaataaaattgaaagaaactctaattctaatgagattaatcaagttgagaatgagcttgttcctgacgaaacctttgaaaagaaaaaggaatatacacaacaagttttagaattacatgaaaaagagaacttgtatgaaaagttaaaagaaacttttgaagaagaacaaacacaaaaaaataaaagacaaaagtttttgagaataggatttattgttttgactattctatcagcagcactttctattttttcttttttcactgcaaatcttatttttggtataatatttgctctattaactgtgatttttgtagtaggtatcattttttctagatctaaagcagtagattatagcacagcaataagtcaggaaattaatgatttagaaaaccaactcacgcaacttgaaaaagaatataatcttgacttcgatttagaatatcaacaacaagttcgtgaacaatggcgtcatgctaaaaaaaataaaaaaatacttgaagaaaaacatcaatatatcaatcaatcattaacgactgcaaatgagcgattagatagtttaaaacatagcattattgaaataaaaaaagagttacgtttatcagaaaaactttctgatgaattagtggttgaaagtatctcaaccattggtcaaattaaagcgcatgataaatacattattgatttaaatcaacaacgcaataatctgctaaaagatatcaatcacttttatgaacgtgcacaatctgtaactgaaccacatttaaaactatttaatcagatgtctttcttccatgatgtgaaacagtggttaaaaaatgcagaagaacaaaatgaggcttggaataaaaatcaaactgaaacgcaattactcaataatgaattaaagcaattgaagtcacgcttaagtgaaacgaatcaaatgattaagcaattatttgattatgttgatgtagataatgaagaagattattatacacatcatcatcattttgaaacatatcaaagtgatttaaatcgatttaatgatttaaatcaatatttagaaaatcaaaattacacttatgaaatgagttcgcaattaagtgagaaaactactgctcaactagaagaagaagatcatagattggctaaacaagttgacgattacaatgatcaatttttagaaatgcaagcagaagttagtgatttaaatgctcagattaatcatatggaaacagatagaactttagcacaattaagacatgaatattatagcttaaaaaatagacttaacgatattgctaaggattgggcaagcttaagttatatgcaagctttagtggaagaacatatcaagcaaataaaagataagcgtctaccacaagtgattaatgaagctgtatctatttttaaaaatttaacaaatggtacttacaatatgattcattatactgaaaatcataaaatacatgtaaagcattctaacggacaagtatttgagccagttgagttgagtcaatctacaaaagaattattatatgtggctttacgtattagtctt

SEQ ID NO: 4086 - DNA, 3232 bp, Artificial Sequence
  Description of Artificial Sequence: synthetic nucleic acid sequence
tttttctaatataatcaattaaaatgttgcttcatttgacagtttttgcgctgatacaacagtaccaacaacacctgatttcaaatcaatcgctactgctttattatcatcgcgtaacttgtctaaccattcactaaagacttcaccttcaatttcgattaaatcacattcttcaaaatcttgatcacgtactttacgcgctctactcttaatactccaaacaggcatgatgtgtggtttgttatggtcatcatctgaaatcataataaaattcttttcacctttgtttgtcaatccgtatacttcgtcatattttgcgacatctttaataaactctctcattcttatatcatctaattcagacatcaactcatcagtcattttaactatatctacaatgtttccttcttcaccattattcacattaactaaaactttgtcacctggatcaaagatttcatccatttcatatgttacaaaacggtcaatatctgctctaatgattttgtcgtaatcaattgaatgatgtaacaaataagactcagcaacattttcgtctgtccacatagcaatatatggcaaattctcatgttgtattctaattaattttttattttttgaagcaaaataaatatattcattaatcaaaatatctttaaaaaatgcttcatatttgtatgacatacttaaccctcaattcataagttattcatagtgtttcttactttaaatcttaaaatactaacgattgatagtcaataatgttaaaattcaaatcttatttgtaaactgggacatgattgattattctaacttttttatcaaacactacttaatattcttaaagaatcatacacttataatccagcttccaatataaattgttgttcatatcgattaattaattctttattttccccatgccaaatgcagccaaatctagaattaacttgattctttccataccaatctccatcgtaataggaaagtggataaagtacacctaattctacgtattttaaaatagcattatagaattttgtattatctccattagaaaagtaactgtaaaatttatgatatccatgagttaaatcttttgctaaaagtagcatactcgttgatccgttttgcctaaagtttaaatcaatcgcataaacatcattattatcatctactagtaagtcaaaacctgctacaccaaaaaaacctttgcttacgcctatttccataatctctctaccagcgtctattacattctgaggcacatcattaacattttcatttccgttgtaaaatccatagtcattagttaactgttgcgctgttcctaagtatttgataccaatatcatctgaataagcaaattgtacacaatagttattcactgcattaattttttgttcaatgattaaattttcagtctctgctgatgcattgttgatgcgtgtgatagctttagctaaatctgtatcattataacaaatcataacaccatatcctcctgctgtaggtaaatcatcgcctggttttatgacaaatggatacgaccatgcttgaatatgagattcaaaatctttaattgagacaatttctctttgtggtagatatttgttattagtccattctggaattcgtgctttattattaagagcaacaaaaacatctttatcaagtgcataatattctttaggtaaaatatcttcatcatgaatatattgaaagtagatttttttaccttggtccagaatattttatttttgggggattatataaaatcaaaaagattgaacctgaagtatttgatgaggtaggttatgaattaactttaatggatgattataaagaatatagaaaaagacttatcgttaaattaaaaaaacctataggtagagatttatataatagattatataaaaatattcaagatactttagaacctgaggtttatgaaattgctcctaatactaaattaggacattttcctggttatcagaatgtaacgttatcccacccacaaatgcaacaaattatatcaagaaatgaacctagttggaaacaagctttaatgaatgtaaaaggtgtttatgttataaccgacttaagtaatggcaaattatacataggatcagcatcaggtaatactgatggaatatggcaacgatggtcggactatgccaacatagaaaatctaacaggtggtaataaattattaaatgaaattaaattagataaagggaaagattacatcataaataattttcaatattcaattttagagatttttgatacaaagactaaggtagacactataatcaatagagaaaattattggaagaatgtattttgcactagaaaatatggtatgaactttaactaataaaaataacaattattacattgaaatatgatgatgaaaatcataaaggtgagtgtaaatcactagtaattttaatgttattaaagagtttattatgagaagaaataatcaaatgtatccttatttatgataggtatacaagaaaaagtttttactaagtaataaaatgacattattgaatatctttttagcaatatcactgatagggtgaagcatatcataaataaaactaaaaaataaattgtatataacttactttgaaattgatcgaatatatagtatctttaataaaatgcagatattgtggcgtagaatttgagaatcaaaaaatgattaatatagtttgaagaaactgagcataagtactagaaaaatagccagtaaatgagtttattatgaattcatttactggcttctttaaataatgatttagacagtttgcttttctagaactactttgaaatgcgttattttctttaagaatattaatatataacttgtgttgctaatgctaaccttggtcagagtgtattgtcatgcgatagttaagatgagatcttttaattaaaaccttgttttaaacatcgatgacaaggtctaatgtaggaggtgtagaaataattttcagaatgatataaataaatccataaatgaagataaatcgaaactatttataccgtaggggggtatatgttatggtataagtaactttactatcacgttttcattgggaggggttaatttgaataataatggtgaagagcataatcatcaaaatcacatgaatcattccaatcacatgcatcatgataaccatgcctcacatcatcatagtggccatgcacatcatca

SEQ ID NO: 4087 - DNA, 3806 bp, Artificial Sequence
  Description of Artificial Sequence: synthetic nucleic acid sequence
tgcaagaattaagagaagatagtaatcaagcttatgaggcaacgcaatatatagatcctaagaaaaaacttaaagtaattaatcaaataataaccaatataaggacacatcatctagactcatcaaactatcacaggagtgatatgaatggctaaaggtgttaaccaaattattaataatattaggttaagaaaattgcgcaaaatattaaatcaaattaatgcgcttagtgaggagttctcaaattttagtgatgaagcacttcaagcgaagacaaaagaatttaaagtttatttaaatgataataaagcttcactcaatcacattctgccacaagcttatgcaacagttagagaggcttctaagcgcgttttaggtatgtatccaaaagatgtgcagattttaggagcaatcgctatgcatcaggggaatattgcagaaatgcaaacaggagaaggtaagacgcttacagctaccatgcctctgtacttaaatgcacttacaggtaaaggtgcttatctaatcacaacaaatgattacttagcaaaacgcgattttttagaaatgaaaccactatatgaatggctaggcttgtctgtatcattaggatttgtggacattccagaatatgaatacgctgaaaatgaaaaatatgaactgtaccaccatgacattgtttacacgactaatgggcgactagggtttgattatttaattgataatttagctgatgatattcgtgccaaatttttaccgaaattaaactttgctattattgatgaagtcgattctattatattagacgctgcccaaacgcctttagttatttctggtgcaccacgtgtacaatctaatttatttcacatcgttaaaaagtttgttgaaacacttgagaaagataaagacttcatagttaattttaataaaaaagaagtgtggctcactgatgagggctcggaaaaagcaagccattatttcaaagtgaatagtatataccaacagcaatattttgatttagttaggatgattcatttatcgcttagagctaagtatttattcaaatataatttagactattttatttttgatggtgagattgtgcttatagatagaataactggtcgtatgctacctggaacaaagcttcagtctggtttacatcaagctatagaggctctggaaaatgttgaaatttctcaagatatgagtgtgatggcaaccataacattccaaaacttatttaagcaatttgatgaattttcaggtatgactggaacaggtaaattaggggaaaaagaattctttgatttatattcaaaagttgttatagagattccgactcacagtccgattgaacgagatgatagacctgatagagtatttgctaatggtgacaaaaagaacgatgcaattttaaagacagtgattggtatacatgaaactcaacaacctgtgttactaattacacgtactgcagaagcggcagaatatttttcagctgagttatttaaacgtgatatacccaacaatttattaatcgctcaaaatgtagctaaagaggcacaaatgattgctgaggcgggacaattatctgcagttactgttgctacaagtatggcagggcgtggaactgatataaagttatcaaaagaggttcatgatatcggtggcttagcagtgattattaatgaacatatggataatagccgtgttgatcgtcaattaagaggacgctcaggtcgccaaggagatcctggatattcacagatttttgtatcacttgatgatgatttagtaaaacgttggagtaactctaacttggcagaaaataaaaacctccaaacgatggatgcatctaaactagaaagtagtgcactctttaaaaaacgtgtaaagtcaattgttaataaagcgcaacgtgtatctgaagagactgctatgaaaaatagagaaatggcaaatgaattcgaaaaaagtattagtgttcaacgagataaaatttatgctgaacgtaatcacatacttgaagcaagcgattttgatgattttaattttgaacagcttgcacgagatgtgtttacaaaagacgttaaaaatcttgacttaagtagtgaacgtgcacttgtgaattatatatacgaaaacttaagttttgtcttcgatgaagatgtatcaaatattaatatgcaaaatgatgaagaaatcatacaattcttaatacaacaatttactcaacaatttaacaatcgtttagaagttgctgctgattcatatttaaaacttcgtttcattcaaaaatcaattttgaaagcgatagatagcgaatggattgaacaagtagataacttacaacaacttaaagccagtgtaaacaatcgacaaaatggacagcgtaatgtcatttttgaatatcataaagtggctcttgaaacgtatgaatatatgtctgaagatataaaaaggaagatggttagaaatttatgtttaagtattctagcctttgataaggacggagatatggtcattcatttcccataaacaaagaggtgttagacatgacgatttataatatcaattttggaatcggttgggccagtagtggtgttgaatatgcacaagtgtatcgagcaaaactattaaggcaattaccttatccaacaaaatttatatttttagattttattcaatcagaaaatattcaaacactcacaagcaacatagggtttaaagatgatgaagttatttggctatatcaatacttcacagacgtaaaaatcgctcctacaacgtacacagttgatgatttaatttcagagttaggtaatgaggttactcgaaaagaacaaaacggtaaagtattacgactctatttaaataatcagcaaacattcgtaacctgctatttaaaaaatgctaacgaacattacgttgatcgtgcagagtttgtggtgaatggaatgttaattaggaaagatttttatagctatgtaagaacattctcggagtattatgctccttttaacaataaagctaaaatatatatgcgtcaattttataatgaaaatggatcaattgcatatcgcgaatatatagatgaagatgaacatgtttttgtgtttgatgatgcacgtttatacagtaaacaagcactcgtcgcatactttatacgtcaattgctattgaattcagaggatatcattattattgatcgagcaactgatgtgggacaagccatattagaaaacaagggatccagtaaagttggcgtagtcgttcacgctgaacatttcagtgaaggtgcgactgatgggactcacattttatggaataattattatgagtatcaattcgaaaatgcacagcatattgatttctttatcacagcgacagatttgcaaaggcagacactaagtgaacaatttaaacaatataagaatgattgtccacgtatacgtacaattccagtaggtagtatagaatcgttacaatatcctgaaaaagaaagaaaaccatattccatcatgaccgcatcacgtcttgctaacgaaaaacatgttgattggatagtggaagctgtgattaaagctaaacatcagttacctcaattgagttttgatatctacggacaaggagaagaacaagaaaaaattaaaaatattattaccaaacatcgtgctgaggattacatacaaattaaaggacatagaaatcttcgtacaatatatcagcaatatgaattattcatagcggcctcacaaagtgaagggttcggactgacattaatggaagcggttggctctggttta

SEQ ID NO: 4088 - DNA, 3214 bp, Artificial Sequence
  Description of Artificial Sequence: synthetic nucleic acid sequence
tgtccgtgcttaggatatcaaagacaatggatgacagatgatatagcatatgaaataaatcatgctttagtcgattttgatatttagtatcaacttatttaataaagtctctagaaactgaatttaaacagtctctagaggctttattattaattatcgatatatatgcatttttttcctggggcattataactattttccaaagtgtgctttttaattttaatgatttgtttagagttaggaataatagatgggaaaataacaaattttgataaacgactccataacggatcaatataataataatagtcatcatcataccctatcaataaagtaacgtgaatatttgagactagttttgttggttgattgtcgaaatgaaatacacgtcgaagcggtttagaacccaaactagtatgataaatgatcaccggctgacctttgtcgataaatttttcaagttgatttaatgatgtacctgtaccatctacaattcgagaatcatattgtttaagaaatggcgcaaaagcatcaggaaatattgtttgatgatggccaaatttaactaacaaaggatgaccaacatagcctttgtagggattggttggatgtttaggccaatgactcataatttgtgttgctttaatatcgtaattattaaattgtaatagcatcgctgcggatactccctcacaccccattacaaaagggatagggaatagttgacttataggctttactggtaaaattatcttcataaaatgtatcctctaataactttgataaattatattatataacgtgcgatttatttagtatacaaaattgatgtagacaaacttgaaatgagcgttttcatcggatgttcagagtagaaagggaagaattagtattaaaattgtcaagggaatgaaaattgaagtgaaaataggagtgctcatttaaacactacaaaatataaatttagaattataagtctatgggtcctattaaaatagaaaataggagtggaacttaattatactacattgtcagttcactcctatattttggtttacgaataactatgtgtttttcataaataatttgaaataaataatttgtagtgcaataagtaaaacagctgtcgcactaataataattagatacggggacatatcatgctgaccgttcaaaccaactaggggagaaatgaggcctcctaaaataaattggaataggccaagtaaacttgaagcattgccacttccacctgtgcgttcagccattgctatagaaaaacaaagtggtgctatagaagtgactggacatatattaataaaaaagccaataagtaaaacatacaatggaagatgtaatgttaaagtaaatattaaaattacaacacctaacatttgaatgattgttaaatatatgagcatcgcatatcggcttaccttttctactataatagcggttatctgactgacgactatcaaacccactccattaatagcaaacattgcactgtattgaagtggtgtcatatgatacatcttttgtgaaataaaaggtgcggctgacgaataactgaataacatgacataagttaatccttgcaataacattggaataacgaaggtgggttttgttaataacagaccaaaatctttaaatattgctttaaaatttaactgagattgttcttgatggggcccaactggcatctttaataaaatgcctaagatgactattaaggtaatgattgttaaaaatataaaaatcattctccaacttgcaatagataaagcgaggccacctaacagtggagcaatgatggtgattataccgtttatgaccataagagaagttaaaaattttgctaattcgtctccgtcatagttatctccaatagaagctttggctatgacgattgcaccacctcctgctaaaccttgaattaaacggataattaaaaatattgttaaatgaactgtaaaaactgataataatgaggctattaaatatccaatcaataaaatgagtgccatttttttacgacctaatacatctgatagtggcccgaatacaaattgaccaatagctaaacctatcatagcaaaggataatgtaagttgtatttctgaaattgatgaaccaaacgcatgctgaactttaggtaaagatggtccgtacatatcaatagtcaaaggaccaaatgcagtcataacgccaagtataacgattaatattttagataagtgtttggaacttgtagtcatcatcattattctcctagaaaagttatagcatctattatatacgttttacataaaaaagtaatcagcttacacaaataaaaaaagaagagtattatcaaataggcattgatagttttgtcaacgtaatgttgatcaatgaaaaaatggtaaatatgtatatacgtcattcaatcaccgactgtctttgataaaaaagaacccgagacaagcatttatgtctcagattcttaagggtttgtagatatttagtttgaagtctcatgcctttagtttcctgaatttgatccattcaagatattttctagtttagctttaatactatcaaattttgtattgatgtcttcaagcatgttgttaactttactttgattttcgttattaagttgagcgttatttgcatttttcagtttgtcgatttggttttgataaaattttgtgaatttagaatccgcattagtttcttcattttgttttaattgatcaatttgattttgtagtttatcaatttgggattgggtgtcctttttattttttatatcgcttttggctgaatcaacttgtcgattaatgtcgtcgttttgattttcaacttcttttttatagttttgtgaaacgttagggtcattacttactttatcattattatgattgataattgcacgtgtgataaagatagctacaataatgagtaaaataactatgattgcaatcagccattttttagttttgcttgatttttcattttcttcttccaattgctgctcacgtcgatagtctcttccattgtaataacgttcaggatgattttcatactctctatcattttcactttgtgttgcacgatttgaatttgctctctgttgggactcttgatgttgtcgatacatatcttcttctgaacgtttacgatgattttgatattggtcatcatatttgtatgaatctctatattt

SEQ ID NO: 4089 - DNA, 3413 bp, Artificial Sequence
  Description of Artificial Sequence: synthetic nucleic acid sequence
ctgcattaaccgctgaaatcatgggagtaagtgtaaaacgattttatgatgtcggggtttcaggtattcatcgcttattatccaacattcatgatatacgcagagggaaagtttctatcgttatagctggaatggaaggcgctttagcaagtgttgttggaggattagtcaaccaccctgtatatgcagtaccaacgagtgtaggttatggagcaaacttgaatggggttaccaccctattatcaatgataaatagttgcgcacccggaaccagcgtattaaatatcaataatggatttggtggcggttacaacgctgcacagattattcatatgctagaaaataaagagagtgaggtatctttatgacaaaagcattatatttagattgccacgcaggtattgccggagatatgctactttctgctttagttgatttaggagcaaaccctgaagacattgaatcagaactaaaaaaattacctttagatcaatttaagctacattttcaaaaaagagtaaaacaaggtattcatgcaatgacattaaacattgatgttaaagaagcaaatcatcatcgtcacgttaatgatatatttaaaatgatagatgacagtacacttccggaaagggttaaatatcgcagtaagaaaatttttgaaatcattggtcaagcagaagctaaaattcatggcatgtcgtttgaagaagttcactttcatgaagtgggggcaatggactctattatagatattattggtgggtgtattgcactagaacaactagggattaacacattatactgttcagctattccaacaggtcatggtaaaatcaatattgctcatggcatttatccaatccctgcaccagctactgctgaaattcttaaaggtataccaatcgcacattttgatgttcaaagtgaactcacaacccctactggtgctgcatttgctaagggacttgtttcatcgtttgggccatttccttcagcaacaatacaacatataggctatggcgccggcagtaaggattttgatttccctaatatattaagggttattcaatttgaatctgaattcgagcaacaagatagcgtccaagtaatagagtgtcaaatagatgatatgacacctgaagcattaggttattttatgaataatgcgttagagcaaggtgctttagatgcttactatacgcctatatttatgaaaaaaagtcgcccaagcacgcagttaacgttaatatgtaaattacatgataagacatatttcgaacaacttatcttacaagaaacaagttctttaggcgtcagaagtacttctgttaatagaaagaccttgaaccgcgcattcaaaattctttctacacaacacggcactgtttccattaaatttggcctacaaaatggaaaaattatgaaaatgaaacccgagtatgaagatttgaagaaaatagctaaaactacaaaacaaccgtttcaagtaattcataacgaggtattacaacaactctatcaaacatatcatataggaaatatacttcaataaattagttttattcatttaaattttgcacatcaaaaaaggatagggacagtcattctacataaaacagtcacctatccttttattctattcaaatgctcgatatagttcttcactagaattattccacatttcaacgttatgattttgtagaaattcttttaaaatttgtttgttatcatcaccgatttggtcgatgataaattgatgtttcatagacttatccatcatattaacatgttctggcatgctcttataaccacgtctaatacttttgttaactaataaatagcatgcagtcacacccgcataatatggcccttcttcactacgttcggtcgtcacccaacatagccagtatgctttagcctcctcaccttcaacttgtgatttgtcagtaatccacttgacacccttttcaacttcagcacgtgcgtgcataccaccaatatcaacaaatgccttctgattttcaacatctataaaaaccggggcaatattatctaaactaatcgaaccaatattggttcctttatgaccatctagtggatcattttttataatattgaaattgaaaccttttttctcagacaaacgagatacctcctaataagtcatcaaataaagactatatatcttattcttaactgttaatttaattcattaagtaagttaataatagaacctttaatttgataatctttaatttttaaaatcatctctttaggataatataatttatggtcttctctattaatccctgtaatactattaatcaccaatgattgattacttatttctgtaattccaccattactttttaataaatgaatcggtttgcgatttgagcctgggcgatcataatcataaggtaaatctgaaaatgcttcacttacaaagtaataatcaggattaataccacccgcttcaaataattcttgcaattccgaaatggtaataattgaaccgtcgaaaggaatatatttaaataaatctcgattgataaaccgtcttgataaatcacttaatattgtatcattttcatgaatccatttcttcaagtaatacaatacaactgcttcatcaagttctacatattgttcaatcgtcattgttccttcaaagaatggtataaagtcttttggatacattttaaattcatatccttcattataaagctgcttagctcgttttaaacaattgtttaataaaacttccccaccacggcttactggatgaaaatatatttgccaatacatttgataacgactcataataaaattttcgacagcatgcataccactatctttaattaacacttcttctttagatggtctcatcaaccttaaaatacgctccatatcaaatgagccatacgttacgcctgtaaaatatgcatctctttgtaaatagtccattcgatcagcatcaatttgtgaggaaatcatagaaataacaagcttattatcgtgcgttttattaattacatcagctacttgtttaggaaagttatcagagactcgacttagtacaccattaacctcagtgtctcctgtgataatagcttgtgtaaatgcttcatggtctgtattaaatattttttcaaaactatgagagaaaggaccatgacctaaatcatgtaacaacgcagcacacaacgcaagtggccgatcagtattatcccacgcgtcttgtcctataaatgtctcatcaatcattcggcgcacaatttcataaacacccaaagagtgtccaaaacgactatgttcggctgtatgaaatgataaatacaaagtacctagttgtttaatacgtctcaagcgttggaattcttttgttttaattaagtcccaaatcaattgat

SEQ ID NO: 4090 - DNA, 4642 bp, Artificial Sequence
  Description of Artificial Sequence: synthetic nucleic acid sequence
gattctaatcgaactgtaaaacgtgaaatgggtcaacaagctgggcaacttttagaaggtatactttatgaagatgctattgtctctgtaactggtggttcaacaatggcgtgcgtgagtgagtcgatacatttattaccgtttaacgtattctttgttccagctagaggtggacttggagaaaatgttgtttatcaagcgaatacaatcgcttcgagtatggcccaacaagctggtggctattatacaacactctatgttccagacaacgtgagtgagtccacatacgatacgttaatgttggaaccttctgtcatgcatacactagataaaatcaagcaagctaatataacaatacacggcactgagagatcccctcataatttccccaaaacgtaaccatgtgtgaatagattttgagtaagcagggttgcagccacgagtgagtcttcccttgttattgtgtagccagaatgccgcaaaacttccatgcctaagcgaactgttgagagtacgtttcgatttctgactgtgttagcctggaagtgcttgtcccaaccttgtttctgagcatgaacgcccgcaagccaacatgttagttgaagcatcagggcgattagcagcatgatatcaaaacgctctgagctgctcgttcggctatggcgtaggcctagtccgtaggcaggacttttcaagtctcggaaggtttcttcaatctgcattcgcttcgaatagatattaacaagttgtttgggtgttcgaatttcaacaggtaagttagttgctagaatccatggctcctttgccgacgctgagtagattttaggtgacgggtggtgacaatgagtccgtgtcgagcgctgattttttcggcctttagagcgagatttatacaatagaatttggcatgagattggattgcttttagtcagcctcttatagcctaaagtctttgagtgactagatgacatatcatgtaagttgctgataggtttccagttttccgctcctaggtctgcatattgtacttttcctcttactcgacttaaccagtaccaacccagcttctcaacggatttataccatggcactttaaagccagcatcactgacaatgagcggtgtggtgttactcggtagaatgctcgcaaggtcggctagaaattggtcatgagctttctttgaacattgctctgaaagcgggaacgctttctcataaagagtaacagaacgaccgtgtagtgcgactgaagctcgcaataccataagccgtttttgctcacggatatcagaccagtcaacaagtacaatgggcatcgtattgcccgaacagataaagctagcatgccaacggtatacagcgagtcgctctttgtggaggtgacgattacctaacaatcggtcgattcgtttgatgttatgttttgttctcgctttggttggcaggttacggccaagttcggtaagagtgagagttttacagtcaagtaaggcgtggcaagccaacgttaagctgttgagtcgttttaagtgtaattcggggcagaattggtaaagagagtcgtgtaaaatatcgagttcgcacattttgttgtctgattattgatttttggcgaaaccatttgatcatatgacaagatgtgtatctaccttaacttaatgattttgataaaaatcattaggggattcatcagtacacggcattggtgatgcgctgaagatggcgcatcgacgtcaatcatctcaaaatgtgattgataaccttcaacatcatcaagccgttggagaagcttttggatattattttgatgctcagggtcaaatagttcataaggtcaaaacgattggccttcagctagaggatcttgagaacaaagactttatctttgcggttgctggtggacaatcaaaaggagaagctattaaagcttatctttcaattgcaccggaaaacactgtattgattacagatgaagccgcagcaaaagtcattttacaatagtaataaaaagtttaatactttttaaatatcattttaaaggaggccattataatggcaattaaagtagcaattaatggttttggtagaattggtcgtttagcattcagaagaattcaagatgtagaaggtcttgaagtagttgcagttaacgacttaacagatgacgatatgttagctcatttattaaaatacgatactatgcaaggtcgtttcactggagaagttgaagttatcgaaggtggattccgtgtgaacggtaaagaaattaaatcattcgatgaaccagatgctggtaaattaccatggggcgatttagatatcgacgtagtattagaatgtactggtttctatactgataaagaaaaagcacaagctcacatcgatgcaggtgctaaaaaagtattaatctcagctccagctaaaggtgatgtaaaaacaatcgtattcaacactaaccatgatacattagatggttcagaaacagttgtttcaggtgcttcttgtactactaactcattagcaccagttgcaaaagttttaagtgacgaattcggtttagttgaaggtttcatgactacaattcacgcttacactggtgaccaaaatacacaagacgcacctcacagaaaaggtgacaaacgtcgtgcacgtgcagcagctgaaaatattatccctaactcaacaggtgctgctaaagctatcggtaaagttattccagaaatcgatggtaaattagacggtggagcacaacgtgttccagttgctactggttctttaactgaattaactgtagtattagacaaacaagatgtaactgttgaccaagttaacagtgctatgaaacaagcttctgacgaatcattcggttacactgaagacgaaatcgtatcttctgatattgttggtatgacttacggttcattatttgatgcgactcaaactcgtgttatgactgttggagatcgtcaattagttaaagttgcagcttggtacgacaatgaaatgtcttacactgctcaattagtacgtacattagctcacttagctgaactttctaaataattgaagcttaacggataagcacgttatttaaagttatagcgtggagagtgtaaagctcttctacacgttcataatttgactagtgctctgtactgtttaattagatatataagcttatgagtaagcggggagcacatacgcttctccgcttatttttatataaagttttcctatacgaaggaggaaatagataatggctaaaaaaatcgtttcagacttagatttaaaaggtaaagttgttcttgagcgcgctgattttaacgttccaattaaagatggtgaaatcactaatgacaacagaattgttcaagcattaccaacaatcgaatatattattgaacaaggtggtaaattagttttattctctcacttaggtaaagttaaagaagagagtgataaagaaggactttcacttaagcctgttgctgaaaacttatctaagaaattaggtaaagaagttatattcgttcctgaaacacgtggcgaaaaactcgaaacagcaattgaaaacttaaatgaaggcgatgttttattagttgaaaatacacgtttcgaagatttagatggtaaaaaagaatctaaaaatgatcctgaattaggtaaatattgggcgtcattaggtgatgtatttgttaatgatgcatttggtacagcgcaccgtgaacatgcgtcaaacgtaggtatttctactcatctagaaacagcagctggttacttaatggaaaaagaaattaaatttattggtggcgtagtgaatgatccacaaaaaccagtagttgctattttaggtggcgctaaagtttcagataaaattaatgttatcaaaaatttagttaatatcgcagataaaatcttaatcggtggcggtatggcttatacatttattaaagcgcaaggtaaggaaataggtctttcattattggaagaagacaaaattgattttgctaaagacttgttagagaataatggcgatcaaatagtattacctgtagattgtaaaatcgctaaagaattttctaatgatgcaaaaatcactgaagtatctatcaatgaaatcccttcagatcaagaagcaatggatattggacctaaaacagtagaattatttaataaagaattacaaggtgcacatactgtagtatggaatggacctatgggtgtattcgaatttagtaattttgctaaaggtacaatcggtgtatgtgagtctattgctaaattggaagacgctactactattattggtggtggtgactctgccgcagcagcaatttcattaggtttcgaagatgactttacacacatctctactggtggaggagcatcattagaatacttagaaggtaaagaattacctggtataaaagctattaatgataaataagtttttaaatactttgatgtgggaataaaacaatagaaagtcatttttgctttcaacgtttatttcgaaataagcaagtatttggataaaagcttacaaatttaacactaaaaattaaggagtgtaatgaatgagaacaccaattatagccggaaactggaaaatgaataaaacagttcaagaagctaaagactt

SEQ ID NO: 4091 - DNA, 3183 bp, Artificial Sequence
  Description of Artificial Sequence: synthetic nucleic acid sequence
atcgaatgactattcgttaaaaaagtctgggatattatttgtattctagacttttttgaatacttatcaaaatatttattattttaattattgataaaaattgaagtaatggcatcatcaaatatttagaaatatgttatgatgatttagaaataaaaagatggggggacaaacatgttacatgtccatattttaagttgggtattagcaattattttatttatcgcaacttatttaaattattcaaaaacgcaaggtgcatcaccttattataaacctttgcatatggcattaagattattcatgctattaacattaatttctggtttttgggaattaatcgaagagtttatggctgcctctaatggtgaaggtggaaatcatatgctacttactttaaaaatgttatgtggtttagctgttatcgcttttatggaaatttccattgctaaaagaaaaaaacaacagactagccataaattcttttggattactattattttaatcataataacaatggctattggtgttattttaccttggggtccaatttccaaaatatttggaataagttaaaaatgcttggatacaataacgtatgatttatatttattgaagtatgaacatcatattattcctaaataaaacatactaagattagctatgaagaaatctatgacgatagattttttcatagctattttttatagttatagagagaagtagactgtccagactcttggattttaaatccgtataaaaaacaagtcagctttactctcgccttttgaaattcgtttgtagtatgttgggttcttgaaaccgtgtataggaaaatgaaatgagaaaggttaagtaaagtttttagcttctcaattattcaaaggaggtttttttatcgattacttaggtgttgatattagtaaaagaagtagtgtagttgcacattataaaaatggaaaattctaaaaagagtttttcatccaaaataataaaaatggttacaattatttactcaagtatttgaatgacttagaccacccacaactcatttttgaatctacaggtatctattcaagaggtatggaacgattttgttgtgtaaatcaaattaactatattcaaatgaatccgttagaagccaaatttaaaacgagcgctctaagatcatggaaaactgatcaggcagatgctcataagcttgcttgtttaggaccgacgcttaaacaaacagacaacttacctatacatgagttaatattctttgaattaagagaacgcgtccgttttcatctagaaatcgagaatgaacaaaatcgacttaaatttcagatccttgaattactccatcaaacattccctggtttagaaagattgtttagtagtcgatattcaatcattgcactcaacatcgcagaaatctttactcatccagacatggttcttgatatcgacaaggaggtactgattacacatatattcaattctacagataagggaatgtcaatggataaagctacaaaatatgcacttcaattaagggtgattgctcaagaaagctatcctaatgtcgatagacattcctttctagtcgaaaaattacgcttacttattcaacaattaaaacaatctattcatcatctcaaacaattagatgatgccatgattcaattagcacaacaactcgattattttgaaaatattcattcgatacctggtattggtaagctaagcacagctatgattattggggagattggtgatattaagcgatttaaatcaaataaacaactcaatgcttttgttggcattgatatcaaacgatatcaatcaggtcatacacactgtagagataccatcaacaagcgtggtaataaaaaagcgagaaaacttttattttgggtgattatgaatataataagagggcagcatcattatgacaatcatgtcgtcgattattactacaaactaagaaagcagcctaatgagaaacctcataagactgccatcattgcttgtataaatcgattattaaaaacaattcattatcttgtaatgaatcataaattgtacgattatcaaatgtcaccacattagccaaacgtacaatcaaatatagtttaacaccttattcaaaaaaattaaaatgaacggtttagttaagtaatgcttattttaattataagtacttgactaatcgtaggaaagaggctgggacataattccctagcataatagccagtaaatgagttttcataaattcatttactggctatttatttacaatacttcgtattgttggctcgctttcttatcggacagcttcagcctgtagtcttcagcttgtcctgttccctcaagagtctcgccaaaatactttgtgcttatatgtaattttatattaaaatactttaaaaaatatggccctttcgtataatttaataaataccaataaactaatttaacgaggtgccttatgtataaagactataacatgactcaacatactctactaatggaaacttcagttcttatccccacaaatgatatttcacgacatgtaaatgatattgcagaaacaattcccgatactgaattcgatgaattcagatatcatcgtggcttaatataagaaaagtaacagctcaacgagttgaaaatcatcaaaaaattataaaaaagacaatttctatattatttcaatagaaattgtcttttttacttatcttgaacctttttgtaccagcttctttttatatgaaaattataagttcattttcctaaatagtcactcttgctatttctcccatactattcataaattatgatttgtgtggaatgttattgcgctttatacccaattaaattaattaaatcttttggatgactataaggaggtgcatatgctacttcaaattctgttaaatcatccacagtagcattattcatcattgccattgataatacgtctattcttttatcggcaccttgtttaccaactgctgctgcgcgtataagttttctcgagtctttttcaaaataaacacgtaaatgtagtggtgaatttcctgggtaatatcctgcatgagctccttgcttaacttcaaccatatcataatcgaaatttttaagttcatttggtttgatgccaacacttgctaatgtatagtcaaaaaatttcac

SEQ ID NO: 4092 - DNA, 4297 bp, Artificial Sequence
  Description of Artificial Sequence: synthetic nucleic acid sequence
tgtactattttaatatataaatttagaaaggaacatgcacatgagtgaagcaaatcataaaaacatcgttgttgtaggtgcaggaattattggtacgtcagtagcgacaatgctttcaaaagtaagtcctaactggcatatcgatatgtttgaaagactagaaggcgctggtattgaaagttcaaatgaaaataataatgctgggacaggtcatgcggcattatgtgaattaaactatacagttgaacaagatgatggttcaattgatgcatctaaagcgcaagaaattaatgaacaattcgaattatctagacaattctggggtaatttagttaaaaatggtgatatttctaatcctgaagaatttattcaaccattacctcatatcagtttcgttatgggaccaacaaacgttaactttttaagaaaacgttatgaaacactaagaactcttccaatgttcgatacaatcgaatatacagaagacatggaaacaatgagaaaatggatgccattaatgatggaaaatcgtgaaccaggtcatcaaatggcagcaagtaaaattgatgaaggtacagatgtgaactatggtgcgttaacacgtaagttagcacattacttagaacaaaaatctaatgtttcattaaaatacaatcatgatgttgtagatttaacacaaagagaagatggcaaatgggaagttgtcgttgaaaatagagaaactaaagaaaaagtaactaaaatagcagataaagtgtttattggtgctggcggtcactctattccgttattacaaaaatctggcgttaaacaaagagaacacctaggtggtttcccaatcagtggtcaattcttaagatgtacaaacccagatattattaaacaacatgcggctaaagtttacagtaaagagcctcaaggtaagccaccaatgactgtaccacaccttgatacacgttatatcaatggtaaacaaacattattatttggtccatatgcgaatatcggccctaaattcttgaaattcggttcaaatctagacttattcgaatcaatcaaaccatataacattactacaatgttggcttcagcagttaaaaatgtacctttaattaaatattcaattgatcaaatgatcaaaactaaagaaggttgtatgaactatttaagaacatttattcctgatgctaaagatgaagattgggaactttacactgctggtaaacgtgttcaagttattaaagataaccatttgaagcaggaccttactttattgcagcagtcgtatttgttataggttaccattttagccaccgtaatttagcagtacccattgctttgcatatgattacaaatttaatagcattttaaacagtactgctacttatacgattgcgtttaagtaaactattacttcatattagaacctaacaaccgcaaataaactagttcagataataagtattctagtggtgaaaatttagcagttgctatactagtgcatatgattttaagtgtggttgcatttataagtatgtatacatctataatataagtgagtgattgagtacaataatttaacaggtacaaacttaaatttaataatattaaaatagtcaaaatagggaatagagtttagtaatgtcgatataaggatgtgtttaaattgctacttaaggttgaacatcttacatacaaggttgataatcgtacgattttagatgatattaatttgaatattaataaaggagacacgattgctattgtaggtccttctggaagcggtaagagtactttactcaaacaattgaatcatttaattagtcccacgagtggagatttatatttgaatgatcaatcttactttaattataagccggaagagataagaacacgtgtgagttatttaatgcaacaaagtgagttaatcggttatacaattgaagataatatgaaatttcctgctgaggctagaagtgaagcttttgaccgtgataaagcgaaacaactcatctctcaagtaggattaggtaattatcagttagatgctcaaattgagcacatgtctgggggagagcaacaacgtattaccatcgctagacaactcatgtatgaacctgaagttttattattggacgaagctactagcgctttagatacacataataaaaagaaaattgaagaaattatatttaaactagcagataaagggattgccattttgtggattacgcatagtgatgaccaaagtatgcgtcattttaagcgtagaatcacaattactgacggtaagatatcgagtgatgaggagttgaatggtaatgagtaatacagcactttgtctgacagcacttttattactaatccctatctttatttcttataaagaaggattacatattatcaaagatttagttattgctacaattagagcaaccatacaactattgattttaggctttttattacattatattttcgaaattaatgaaaaatggttattagtgctatgtgtgttagtcattattatcaatgcatcttggaatacaataagtcgtgcttcacctgtcatgcatcatgttttttggatatcatttgtggctatatttgtgggaacagcgctaccattggcagcaactgttgctacaggtgcaattaaatttacagcgaatgaagtgattccaattggaggtatgttagctaataatggtttaatcgcgattaatctcgcttatcagaatttagaaagagcatttgttcaagatgtttctgatattgaatccaaacttacgttagcagcgacacctaagctcgcatcaaaatcagctattagagaaagtatacgcttagcaattgttcctacaattgattctgtaaaaacatatggtctagtttcaattccaggtatgatgacaggattgattatcggaggcgttgacccacttcaagcaattaaatttcaattgcttgtcgtgtttattcatacaacagcgacgattatgtctgcactcattgcaacgtatatgagttacggtcagttctttaatgctcgtcatcaactcattgctagaacgcaacgcacaagacaaagtagttaaatatcgttgttaatctacacagtacagctttaaatattatataataaaacagttataaacgatgataagtttgtagctgttttattttagtcaaaatcaatagttacgttattactttgaaaggggcatctagttgttatgactgtcgcacgcacaacaacatttatattaagtgttttcatcgtaggtatggttgagatgatggttgcaggtattatgaatttaatgagtcaagatcttcatgtttctgaagcggtggttgggcaactggtaacgttgtacgcgcttacctttgcgatatgtggtccgttattagtgaagttgactcatcggtttacttcgcgatcagtattattatggacgttaattgtctttatcttcgggaatggtatgattgccattgcacctcattttggaataatagttgtaggacgtattttatcttctgccgcagcttcactcattattgtgaaagttttagcactcacagcgatgctcacatcagcaaaaaacagaggtaaaatgattggtattgtttatacaggttttagtggggcgaatgtctttggtgttcccatcggtacagtgattggcgactgggtaggatggcgatttacatttttattcattattattgtaagtgtatttgttggtgttttaatgttaatttatctaccaaaagaagatgaattgtcacatccaaatcaaacacctcgttcatctagtattgaatcacaaactggctcaagcgtcataagacctcgtgaggtttttaaatatctgatgattacatttttagtgctggttgctaattctgtaacattcgtgtttattaatccattaattttatccaatggacatgaaatgtcttttgtgtctttagcactacttgttaatggtgtagcaggtgtgattggtacttcattaggcggtgttttatctgataagtttactagtaagcgttggttaataatttcgatttcaatatttataataatgatgataattcttaacttattattaccaggaacaggattattattagttggcttatttatgtggaatttaatgcagtggagtacaaatccagctattcaaagtggtattattgaacacgtcgaaggagatacaagccaagtgatgagttggaatatgtcgagtctcaatgccggtattggcgttggcggaatcgtaggtgg

SEQ ID NO: 4093 - DNA, 3513 bp, Artificial Sequence
  Description of Artificial Sequence: synthetic nucleic acid sequence
agctattcttatgttatgaaaattttaaaatagttatgtataatgtgataataagtataattaagggacataatgaagaacacgcagaagatatgttatttctttagtgtcaaatcattgttacttagatttatagattattctcatacatcctttagtatgtttaaaataatttttggaaaagagaaaaataaggtggttaagacaatgaaagttttagtagccatggatgaatttaatggaattatttctagttaccaagctaatagatatgttgaagaagcggtagcaagtcaaattgaagatgcagatatcgttcaagttccactatttaacggtcgtcacgaattattagattcagtctttctttggcaatcaggaaataaatatcgtgtgagtgcgcatgatgctgacatgaaagaaaccgaagcaatatatggacaaacggatagtggtatgactattatcgaaggtcacttatttttaaatggcaaaaaacctattcaacatcgatcaagttacggtttgggagaggttataaaagcagcattggacaatcatacagaacatcttgttatttctttaggtggaataggaagttttgatggcggtgcaggcatgttgcaagcattgggtgcaacattttatgatgatgaagcacaaattgtcgatatgaggaaaggtgcatatttaataaaatatattagacgtattgatttatcaggtgttcatccacaattaacaaaggtaaacattcaattaatgtcagatttctcaagtcgattgtatgggaaaaaaagtgaaatcatgcaaacatacgaatcattagatttgtctcaaaatgaagcagccgagatagataatttaatttggtattttagtgaattatttaagaatgaattgaaaatagcaatgggaccaatcgagcgcggtggtgctggaggtggtatagcagctgtattaaatagtctctatcaagctgagattttaacaagccatgaattagtgaatcaaatcacacatttagaaaacttaattcaacaggcagatcttattattttcggagaaggtttgaaagaagaagatcaaattctagagactacaacaatacgtatagcagaacttacccaacaatacagcaagccagctattgcaatttgtgctacaaatgataaatttgatttgtttgaatcattgaatgttacagcaatgtttaatacatttattgatatgcctgattcatatacagattttaagatgggtattcaaatcagacattacacagtacaagcactaaaattattgaaaacgcaaataaacttaccgctttcatcctaatattagaaaaagtttttatacacatttaatttaaaagccattgacagtaagagtagctttagagctacatactgacaatggctttttatgttatttataagattgatggctgtttgctacttcttgagcaataccaacgacaacatgaacagccttttccattacatcgatagaagcgtattcaaaaggaccgtggaaattgccacaaccagtaaaaatattaggtgtaggtaaccccataaaagataattgtgatccatctgtaccacctcgaataggttcagtgttaggtacgatgtctaaagcctcaaagacacgtttaggtatatcaatgatgtgtttcaaaggttcaattttttctgccatgttaaaatattggtcatgcacatctactttaattggaaaatgattataatgaacattaatatcatcacgaatttccatcatgcgttttttacgtagctcaaactgttctttgtcatggtcgcgaataatatattgtagagttgctttttcaacattacctgtaaaattcattaaatgatagaacccttcgtatccttcagttctttcaggcacttcatgtgagggaagtaaactattaaactgttgacctaaactaattgcattaaccatggcatttttagctgaacctggatgaacgttaacaccatggcaagtgacagttacctctgccgcattgaaactttcgaattgtagttctcctaattgactgccatccattgtatatgcaaaatctgcattaaatcgactaacatcaaattgatgcgggcctcgtccaatttcttcatcgggtgtaaagccaactcgaattgtaccgtgtttaatgtcaggatgatcaattaaatactttatcccttccattatttctacaacacctgctttatcatcggcgcctagtagagatgtaccatctgtcaccattagtgtatgacccacaactttatttaattcaggaaaaacatcaggatctaagatacgctgagattcaccaagtttgataggttgcccattataggcttcaatgatttgcggatttacatgagaagcattgaaatctggtgaagtgtctacatgtgctaaaaaaccgacagtaggtacattataattaatattgctttcgagtgtagcaaataagtaaccatgttcatccatgtctgttttaagacctaatgattgaagctcttcttctaatagatttaataaatcccactgtttattcgtagatggtgtcgtcttggaatcaggattagattgtgtatcaatttttacatatctcgttaatctttcgataatttgtttcttcatacgagttcatccccttagatttatactctattattcatattataggattttttataagttttacccttgattttaccataagattgcttgatgcgtgaataaatgtaatagactatttcagatacaagtataccgaatgcaattgcaccagaaattaatgttacctctaaaaaagtattaactgcattcgtataattatttgatactaaaaatcttgtagcttcatatgctgcgccacctggaacgagaggtataatgccggggacgataaatataataacaggttgcttgtaccgtctactcattgtatgactcattaatcctaatattagacttcctaaaaatgaagcgccaactttacctaaatccatacctactgtcatctgatatattgtccaagcaacagctccaacaaatccacaagctaatagcaattttttaggtgcattaaatataattgaaaaaaggactgtggcaatgaaactaatgataaagtgaaacagataaataaacataactaacagcctttcttataataatagtaatacaatagctactcctgcaccaatagcaaatgcagttaaagcagcttcaacaccacgtgacataccagcaagtaactctccggcaagtaagtcacgaatagcgttagtaatcaaaataccgggaacgagaggcatgacacttgcaatagtaataatgtcttgatttttagctatacctagtttagtgaatattgctgcaatactaataacaacagcagatgctacaaactctgaaaagaatttaatttgtatatatttttgcacgaaactaaacgttaaaaaagctatgccacccgctagg

SEQ ID NO: 4094 - DNA, 3109 bp, Artificial Sequence
  Description of Artificial Sequence: synthetic nucleic acid sequence
aaatactgaataaataagaccaacgacaatactcgcaaaaaatgtgttcattcttgtttcaagaatattttgtaagtaagaacggaaaccaaactccactacaaaagccattaaaatatgaccaattaatatagttaataatgatactgataaatctgaagtttgtaataggatgaaactatcagcataagtattaaagctaaacaagccaatcattaaaatgataagtggtagaatgagtgctaaaagtagacgctcaatcacttttaaactgatagaaaatttcaatcctgctaattgttcttttctgtgcttaaatactaatatgcacacaattgcagctatgaaaggagctaaatctttaatactaaagacaaaacgtttcactccgatagtcgcttgaaaatctctgagtatcacggacaatgccattgtgataacgaaaaatacaaagaccatcatagcccattggaacccagaaaatctagagtttttcattgtatgtaacctccattaggtaacaagcttaaattgatttatttacaattatacatcttacaagcatatgtttaaattgtctattttaattataatcaaaatgtaatagtcttgaatcattttgttagctaatcgtaaataattttatcattatatgggtatgttaaaagagcaagcattgattaagaaaaagtcaatagttatactttaattaacttaactgataaaaaatcaagggggatatatcatgtatcaacttgcacaatctaatctatggacaggtcgtttagatagtgaaactgatcctacacaatttagacacttccaaactgttaaattcggtgatttaagtcaattagatttttcggatgaacacaaaggcgtgggcttattaggatatgcaattgataaaggagtagaattaaacaaaggacgtgtaggtgcaaaagaaggtcccaatgccattaagcgagcttttgctggattgccagatttgaatcaatgtgaagagattatagattatggtaatgtagaacacaatcatgagttgctaatagatacacagcgcgaattcgcagatcttgctgctaagtctatcaaacgacataaacaaacatttttacttggtggcggtcatgatatagcatatgcacaatatttagctactcgtaaagtttatcctgagtcgtcaataggtgtgattaatatagatgcgcactttgacacacgcgatgagggttattcaacctctggtactagttttagacagattctagaagaagatgataatgcagattatttagtgttaggtatatctcaaggtggtaatacacaagctttatttaattatgctaaagaaaaagatattcaatttgtatatgcagatgaattactacatcaggtatctccccccattaaagatatgatagaacgttttatccataatcatgatacggttatgttcacaatttgcatggatgtagtagatagtgcatttgcaccaggagtcagtgcaccagctgtcctaggaatatatccacatacagttttcgaacttgctaaacgggtcattccaagtgaaaaagtaaaatctataagtatagctgaaatgaatccgacgtatgattcagatcaaagaactgctaaattagttgctaatttagtacatcattgtttaatttaaagttagaagtcgtcatgtaaaaatttaataattttagatatatttagtttcaaaatgcctgtgatattcgttgatgtctcgggcattttaacatgttgacagtttatgactgaatgagaaatagcgtgttaatcactaattaaaatgtcacacttgttgtcgtaatcgtactaaccatttattgtgaagattgttcattttaatatgaaagagaatttttaatgcatttttatcatatattccgataagctaggcagtaattaatgataaatgtgactgtttaaaaatgttttcgcttttttaaataattttaataaactagctctcaaaaatgttgaatatttagaattttccgataaaatgttaagatactcttaataaaattgacaattaagttaattaaaagaatgataaatcactagttaagtatatgaataaatttgaagtgtgagaaagggctgagcgatatatgacaaattattctacttatgtagattggagaagaacgtttcatcaatatcctgaactttcagatgaagaatatgaaactacagaaaagttacgaaaaatactcaaaagttatggtatacgtatactggaggtacctttaaaaacaggtttagtagcagaaattgggcaaggagaggaaatgatagcagtaagaacagatattgatgctttgcctatagaagaacaagtgaagcatgaatttacatcaaagtatcaaggtgcaatgcatgcatgtggtcatgatattcatatggcaagtatattagctactggtattcaactaaaagagattgaagatgaattaaatggacgcgttcgattaatatttcaacctgctgaagaattaggacatggtgcatttgaaatcataaatactggagtacttaaaggagctaaagcagtacttggttttcataattatcccactttaaaagttggtgaatttgctattaaatcgggtgcaattacctctgctgtcgatcgttttgagtttaatgttaaaggtaaaggtgcgcatgctgcaaaacctgagcaaggaaatgatccagtcatcgtcgtaggacaacttatcaatagtttacaaactattgtgagtcgaaatttatcagcttttgatagtgcagttgtaacaatcggtgaaatttcttgtggtaacacatggaatgttatagctgacaaagcttatatacagggcactgttcgttcattcgatgaggatatacgtcattatattgaaaataggatgaaaaatattgctgatggtttaagtcgtgtttttaatgtggatattgatttaacttattcaagactacctggtgcagtagtaaatgatgcacatctaacacaagaagcaatcgaggtcgctaaaaatgttggctatcatgtatcaatgctcgatgaaccggttactattggaga

SEQ ID NO: 4095 - DNA, 2253 bp, Artificial Sequence
  Description of Artificial Sequence: synthetic nucleic acid sequence
aagaatagaaaattctttcataaaaaacaagagtatagaaataactcttggagggatgtccctctttccttatttattatattaattgttttgaacataatagtcaatcattttgttaagtgatagaaagaaaaatgaaagagaaggaacatttcgataatgatgaaaatatctatttttacgttgtttaaaagttaataaatcattttttcgattatcttttatacctttactacaatatttagaatgtaaaactaataatgcaagaatatcaattattgctaatactttaaggtttttatcagacagtctttgttttctacctatcttttttaattctctttcaacggtaaagtttttgcgtggatttaaatttaataaaattggttggctatgagcacatttattcctaatgtttttagcaaatttaataaatttaccagccttacgtaactcagagtcatttgttctttcagaataaaattctacaaatgctgaaaattggccaaaagtcattaattctaagcatacccatattggaggatcatcataatatttttgaaaactcggtataactgtaccatctcttttaatcacgctagaaaagattttttctaaatctccattatgattgtttataaaatcttgaacaattgtatatccgtcttcgtttacatcatcagtaatctttttaagaatatctgtttttagtgaatgttctatatccaaacacataggtaataaagtatatcttaatcgcatatctaaagtagcaaaatcagaaagtgcagaaaactcaaaattataatttccactactatccttttttatatttttacgaaaagatatcaatttaaaaaaataagtgttattttttaatatttctttagcttcttcttctgttatttcattgaatagaattcctaatgatttcaactttttaatttgttcctcataatctaattttggtttacgagtactactcatatttaattaatacctactttctctaacttactcatcatatctttatccatttgttcagtaacatgactgtatatctgtagggtagtcttatgatctgtatggcctacacgatccataattgcacgcagtgatatacctaattgcgataataatgatatgtgactatgacgcatagtatggctggttatatgctttttaatacctacattctttgcagcaatttgtatgtttctgttgattgatgtaagtgatatagggtttcctttatgattagtaaatataaaatctctatctacatacatatttttccactgaaatgctttcttattctctaacataactttacgtaaaatatcacaacttcgagtagtcagagagatagttcgataagataaagctgtttttgtagtatctttaaaaccgaggttgttaccctctttacgccaatgtatagtgccatcaatgataagttttttgtttttgaaatcaatgttttctggttgtattgctaaaagttctcctatacgcataccatttaatgcttgaatttcaatgatataagcagtaaataaatatataactagcacgcttattatttgctatatgttttaactcttcagcgataagatgaacttcattcatttctaaatagttctcacgttttgctttaacttcttctattgtagtcgcttttttaggtactattacatcatctatgtaagatttatcagtaatgttatatttcttttgagtatagcgtagtatattttttataatactcaaatcatctttaaccactttatgacttaatccctctgttaatgaagaattaattaagtcttgtaaaacatcagcattcgtattttgagcgagtatatttttatcaatatttcttttgatgtgcgctattttataacttttcgttgtaacggtagattgtttaaatccggaagttaatttgtatctttcaaaccactcatcaaatgatcatggaatgttagtgacttaagtgtagtaggtgtcttatcgtttaattttgcctctataagctcatttaagcgcttctgagcctctttttgtgactgtttaccattctttattaagtaccacgctaacacgtcgtcatttgtttgtgagagggtctttgtacttctcataatagcgatttttagtttcaccatgtttataggtgaatttcttatgccacgtgtttaccctccctaaataaaaagggtagacgtgctaccctatatttcaattatggct

SEQ ID NO: 4096 - DNA, 3005 bp, Artificial Sequence
  Description of Artificial Sequence: synthetic nucleic acid sequence
taggatagaatagatagaacaaatgatatttcactctagaaccccaacttgccttgtccgaggaatttcgtactgaaattctctgtgttggggcctcgaaccccaactatggaattgttgtatatcacatttaatttactataatttaaagaagcttgcgacatgtttgtgtcgcaagcttctttaaatatattcaattttgctaagagggatttatatggtttgtagtattgcaagccaaaacaacatagcgaaataaatagtaagtattgttttatattgatacattaaacccaaaaagtctataatcatagattgtgccaaaaagtggtatggtgtacgacttccaataccatcgaaagaaagatgagcttttttagcaaatttaagcgctcttaaaacatgaaattgacttgttacacacaacatctgacttgaagtaggcatcatcgaatgaatgatagatttagagtataagaaattggttcgtgtattcgtggattgattctccataaatatatggttttccggaacgttgtgagctataaggtatcttttcatcgcaagtgcttctgaaattggttcgtcaggaccttggccaccacttacaatgatgataggtttagtccgttgtgaatgataaacagataaagctttatcaagtcttgcagcaagaagcgtagtcacttcttcagagaaaattccagctccaagcaccataattaactttacgtgtttataatattgatgattttcaaaagctgtagaccaagataagtatccgataaatgaataaattgtactaaatgcaatgatagcggcccataaagctaagctattaatgataattaggggaatagtacttatatataaacaactcacagcaaatagccccacagtataaaaatgatgactaagttgtaaaataaaaaaacgtcctgtttgcaacttgaaaatataacgatatttaatcaataacagtatcattgctacaattacaatgataaacatatcatatggtattgatacagttaccatatgataagtcatcataacaaaaccaatgatggtatataagataaaactaaataaattaagagtaaacgattgcttcgtatataataaaacaataagtaataattcaattagaaaacataaaaaaagtaacattgttttgatacctcagtagttatattacttataaatttagcttatgaaattataattagcaatgtttatgaatatggtaattttaatacatatttatggtttaaattttaaggtattattgctatgctttaaaaggattaaacataatttttttatataaatcgtttagattaattaggagataaaaatggtaagaagaatagaagatcacatctcatttttagaaaaatttattaatgatgttaatacattaacggcaaagttacttaaagacttgcaaactgagtatggcatatcagctgagcaatctcatgtgttaaatatgcttagtatagaggcgttaactgtggggcaaattacagagaaacaaggtgttaataaagctgctgttagtcgaagagtcaaaaagttgctcaatgctgaattagttaaattagaaaaacctgattccaatactgaccaacgtcttaaaataattaaattatctaataaaggaaaaaaatatattaaagagagaaaagcgattatgagccatattgctagtgatatgacgagtgactttgacagtaaggaaattgaaaaagttagacaggttttagaaattatcgactatcgtatacaatcttatacttctaaactttgatagaatcagtgaaagagtctatacagttagagacgaataggaatataataatatgagtgagaaaataaaaaaatgagactaaatctgtatgtttttgattagcgtttatttatataatttagataagtctgtaactttcttttaatggaattacaatgaaaactacatgtaatggaaattgtattttattattgctaaatgtaaaatatatcgagtaggtaatgtgtttatgaaatgtaaatataatcataatgtagtgagatgagtagaggtgataaaatgagtcaatgcccaaattgtggtcatcaagtgaaagatgatacatcgcaatgtccaaactgtgggcaactattaactaagaagaaaaaaagaaagattaaagaccaatcatctcaatcgagtaatgagaattctaccaatatacgtcttcgtaaaattgtgccgataggtattagtgtatttatcttaatacttattatcgtgttatttttccttttaagaaattataattcgcctaatgcacaagctaagatattagttaatgctgtagataataatgattcacaaaaagttgctacattattgagtactaaaaataaaaaagtagacgatgttgaagcgcaacaatatattaattatgtaaaaaaagaagtaggtattaagaagtatattcgagatatcaataatactgtagataaattgaataaaagtaattcaagcgtggcatcttatatacaaacgaaaagtggacaagatgtacttaagataagtaaaaatggtacaaagtatttaatttttgataatatgagtttcacagctccgactaaaaagccaattattaaacctaaagtagaaactaaatatgaatttagaacaagtggtaaaaagaaaactgtcattgctgaagcaaataaaaatacacctttgggtgaatttattcctggtacatatcatttaccagctaagaaaattacagaaaacggtacattcaatgggcatttaaattttgactttagagaaagccactctgaaaccgtagatgtagctgaagattatgatcaatcatttatcaatatcaaatttaagggtgcgaataaattaagtgataaatcagaaaaagttcaaatcaatgaccgtacattcacttattctcattctaaagaatttggtccttatccaaaaacaaaagata

SEQ ID NO: 4097 - DNA, 3068 bp, Artificial Sequence
  Description of Artificial Sequence: synthetic nucleic acid sequence
ctcgcaaacctttaattagaacttcggcaacttctggtcttgaaaatttagttggcaatgattcgccattacgcagtttttctcttactttagtaccacttaaatgtaaatgttgagaagcgtcatgcggacatgttttagcagttgccatattaccacaagcttcgcaataaaaggcatgttcaaattttaaaatttgaatacctaactcatcttcaaattgagtaatcagctcttgtgcttcataagtaccataataatcgcctaccccagcgtgatctcttcccacaataaaatgtgtacaaccataatttttacggacagttgcatgaagtatcgcttcacgtggtccggcatagcgcattgcagcaggataaatgactagacgtgctctatcttcaggataatagttttttaatatcacttcataactttccatacgtacatccgctggaatatcgtctgactttgtttcaccaactagtggatttaaaagtagaccatcaacaatttctagtgctgatttttgaatatattcatgtgctcgatgcactggatttctcgtttgaaaacctacgacagttttccaacctaaatcatgaaataattgtctcgtctctgaaggatccagatgataatttgaaaacgcgtcatgttttggacgatttaatagtttaataggaccacctaaatatatattacctttttcataaacctttttaactccaggatgagcttcttcagtagttccgtacaccaaacgcgcttctttttctttatcatatgtgtacttttcttctaatttaagcgttccatataactgaccatcttcaccatataaagcaatatcatcacctatttcaagtttatctgcttcggattctgttacaggtaaagtgataggaatactccaaactaagccattgcttaaatgtgtttcctctataaccttagtgtagtcttccttgttcataaatcctgtaaggggactaaatccgccaatacctatgagctctagatccgatattccccaaggatttaaagtaatcggtttaaaatttaatgcttcctcaatcaaacgttcacgttcgtttccttcaacaacacgattgatgagttctcctccatgaggtttaattgtataattggttattgtttcattgttagacattataatcaaatctccttttccaattaattatatttgtttactcggcttttcttataagaaaaagacaatttcttgtttcgaacgacttgaaaaacaagcaaaataataattgcaagaataataatgaatcgaactgtatttgaaatagtgttatcttttacaaaatagcttaataatgcattactatttgtaaaaataattaaaccaccgacacaaattgcaagaatgttaatgggtaacactttaactaaatacgctgaaataggtgctgctaccattccaccgagacttaaagcaattacagcaaaccaattaatttgagtgactcctaaaaagataatgaaacttaaagcggcagatgacgtaacaaaaaattcacttgctgagactgttccaatcgcatatcgtggttgaatttttttacttgaaagcaggagcggcgtattaaccggtccccaaccaccaccaccgattgcgtctaaaaatcctgccacaaaaccttgtggaattactttaaaactactcaaatttcccacatgatgatgatgttcatgtgcacgtttaaatagaaattgatacaaaatataaaatcccatacttaacaagaataaagcaatgaatggtttaatataatcaccatgaataaatgtcaaaacacctgcaccgataaaggcgcttattgacccaggtatagctaacttcaacattgttggtttatgaacattatcaaatctccaatgtgatgtcccagatgcagctgttgttgcaatttcagaaaaatgaacggttgctgacactactgccggtgctataccgtaagttaataatattgatgacgatgaagcgccaaatcccatgcctaatgacccatcaacaagttgtgctaaaaatcccgcaattgcgaaaattaatactttgcgcatatatcatatgcccccattcttcatttgacttgtgattttagccatcggatgaaatcttgttgcttcttctcatctaaatatttgtctgacaaaatttgctcgagtaacgcttgtttatcagatggctcaattttaagtgatttaatatattgtctactttcatataaaaactgaatatacattgaatagtcttcattgtatgtatcttttaaatctttaataattcgttgacctaatttaggacttgcaccatcagttgatacacttattgttaatttatctctttttaagaaattagggaacgttacattacctaggtctgcttgtcctgcatgattaaataatacgttcttagacaaagctgcccccacatcgttgttaacatcagattgattagtagccgcgatgaccacatcagcattctcaacatcttgtggttcgaagtgtttcttttcataagtgatttgcttcgtttctagatatttttgtaatgtatcggtaattgttggacttacaacatgaatatgttttgtataagctaataaagttttagcacgacgtgttgccactttacctccacctacaatgacgactttcttgttacttaaatcaatcattaagggcatattcatgatgatttcctcctatacactttaattaatactcattataaacgtgatttttactgtttttttaaatgtatgcgctaagttgatgacatttccgttaacgtttcattttgaacagttgcctgttctacaaaccaattaattttttctctcatcttaaccacttcgcctacaataatcattgctggattctgaatatgatgtgctcgttcttgaattgtatcgagtgtcccagtcactgtcatttgctgttttgacgttcccatatgcacgagagctactggtgtttctgacgaacgaccatattgtattaacaactcacaaatttcactgagtctcttaacc

SEQ ID NO: 4098 - DNA, 3326 bp, Artificial Sequence
  Description of Artificial Sequence: synthetic nucleic acid sequence
gctacacgagataaatattgttcttcagcaagtttgcgaactgcatctggaacgtctttattactgacagtgactttagttgttttttggtttgcaccattcttttgtggtaacgagtcggcgtgagcactattgaaaaataggccaagtgctaaacttagcgtaaaagcaagcataatggtaatcatataacttaattttttcttcataaaaagtactcctttacaaaagtttttgcaactctttcacatcgaatataacatttattttaaaatataattcatttatttcctaaacgttaagttataatacttatacgttaaaaatataaattgaacaaaattaaattgatataaattataatggaataatggatggatatagtgacatgatgtctatacttttaacacgactatgaagcaaatgtttataattatcacttctaattattatcaagtgctcatgcttcttcatcatgtgtaatgaaaaacattttcaatatgttatcaatcatttttaatattgtgtatacacataataattatatgtaagtattgattatttttaataattcaaaatgtaaagtttacaaagttttaataaataaactaaagtaatttatatttttatgttaatatatacataacagttatattttcatcttttataggggaaaaaacttatagaggtgatttttttgaaaaataataatgaaacaagaagatttagcattaggaagtacacggtgggagtcgtgtcaatcattactgggattacaatatttgtcagtggtcagcatgctcaagctgctgaaatgacacaatcatcatcagattttaacgaacagtcacaacaaacagaacaagttgaacacaaagaagatacaactcatttatcatacgaattgaatcaagagggtgacacagctagccaatcaaagactaatcaagagaaccaatctgatgaaaatgtacaaaaaaagaataatcaaactcaacaagattcaacacaaacgtcaccattaaatgaccaagaacaaactttaaaggggcaacaatcaaaagacaatcatgttaccccaaattcacgtcaggatacatatccaaaaggccaaaatcaagatgataaaggcaaacaacagtttaaagataatcaacactcacaaacagaacatcaacctaatactcaaaaccaaaataatgatcaagattcatcagataaaaagcaacacccatctgatcaaactcaagccccatcttcaaaaggaacacaacctaaacaatcacagtctataggagatagagataaaacagtaaaacaaccatcttctaaagtacacaaaataggtaatacaaaaactgataaaacagttaaaacaaatcaaaaaaagcaaacatcattaacttcaccacgcgttgtgaaatcaaaacaaactaaacatatcaatcaacttactgcgcaagctcaatataaaaatcaatatccagtcgtgtttgtacatggatttgtaggtttagtcggtgaagattcattcagcatgtacccaaattattggggtggtactaaatataacgtgaaacaagaacttacaaaattaggttaccgagttcacgaagccaatgtaggagcatttagcagcggtgaagttaatttacgattggaccgcgtgtaccatttcaattcgtcttggctcaaaaattcatcgtcgtacttagtattatcactgatattctcatgtttatcataagtgataaataaaggaagtgtacgatgtttcatacgataaccattgattgttccagattcatctttatcccagtttaataacttaacaaaatcttccctagaatatttgttatatagaattaaactgtttttcttattttgatatctgtcattattataattagcaagatcaattaaatcatgaataaatgtgttaaatagtggtttatttaaagcctctttaaattcatttgctagacaaataagattatccttatattgtattaaaggtaatccgtaagttttacctatagtctttttgaaaaaagtaaaatctaaaatgcttaatgaagtgttaatatcatattccgaaatatcgttattaatgttatgagaataaacgtccttgtagcattttatctggtgaataatctaacccaggaacaatatttgtaggcgtaaacgctgcctgctctacatcaagaaaataattctcaggattacgattcaattcaaattctcccacttcaatcagtggatagtcttttttataccatacctttgttaaatcaaaaggattgtctggatgatttttagcttgttcctctgtcataacttgaatgtacattttccattttggataatctccattttcgatagcattatataaatccctctgtgaagaatctctatccatacctacaattttagctgcttcctcgtcagtatagttttcaattccttgttgtgtacggaaatgatattttacccatacacgttcacctttatcattatacatagaatacgtatgagaaccgaatccatgcatatttcggaatccttttggcatacctctatctgacattaatattgtcacttgatgcaatgcttccggtagacctgtccaaaagtcccagttattttgtgcacttctcatatttgtacgtggatctcgttttacagcacgattcaaactaataaatagtttaggatctctaaagaagaaaactggcgtattgttacctactaaatcccagtttccatcttcagtgtagaatttcaaggcaaacccacgtatatcacgttctaaatctgctgctccacgttctcctgaaacagtagaaaaacgtgcaaacatctctgtttgttttccgacttctgagaatattttcgcatttgtatattgtgtgatgtcatttgtaactgtgaacgtaccaaatgcacctgaacctttcgcatgcatacgacgttcaggaatcacttctctatcgaagtgagaaatttgttctaaataataaacgtcttgcattaataatggtccacgttgtcctgctgtcatactattttctctatccgaaactggcgcaccaaaaagtccagttaattttccatcctgttttgacatagcaagctccccctcacttttatatttaatattgattactatgtagtatctattttaattaaacccttttccgatagcaaataaacttattttaaagttattgatagaaaaatataagaaatatcagaaaaatttaacaattacgctttaaagtactaaaaagttattgaatagtatctttaaaaagattaaaatg

SEQ ID NO: 4099 - DNA, 2978 bp, Artificial Sequence
  Description of Artificial Sequence: synthetic nucleic acid sequence
tatatcttcatcatatataaatgcattcacttcgaaattcagttcaaagcttctaaagtccatgtttgcactaccaattgaagaaatttcatcatcaatcattaatattttagaatgaataaatccattttgataagtgtaaatattaactccgctatccaataaatcagctgcatttgaaaatgtagcccaataaacgaatggatgatcaggtttacacggtatcataaggtttacttcaacgccgctattagcagccatttttaatgcattaatgtatgattggtctggaataaagtaagggctttgtagatagatagactttttagcgctcattatcatttttgtataaccatattctatttgatgtaaatcaaatgcaggtccactagaagcgatttgaatagccgcgtttcctttgtccccattttttttagggaaatatttttgatcaaatttaaattgtggacgatgcgactgtgaattccagtctaaaataaatcttaattgtagtgcatcgatgcattcaccttgaacacgtgtatgtgtatctctccagtaacctaacttacctaatcctaaataatcatcgccgacattaaaaccgccaacgtaaccaatttgtccatctataatgataatctttctatgatttcgattattcattctgaaattgattaaaggtactttcgaagggaaaaatgcttcaacttctccacctaatgctctgaaatgtttaaattttgataatctaacctttttagaaccaacatcgtcatacaaaagtttaacttctaaaccttctttaagtttagtttcaagtgcatctaagattcttttacctaatccatcaagttcaaaggtatagtactctagatgtatatagtcttgagcattgtaaatatcctcaagtactttttcataaagcttatgaccatctgtaaataaatcgattttattattttctgttaaaaaggcatcttgtttcattaacaacatacgtattaaatcacggtgtttaatgacttgatcattgatataaccataattatgtttatcaaaactgtcgatttggtcttgaactaaatcttcaaatgcatgtaattcatcaccgttatttttttccatctttttcttggaaaccgttcgtcctaaaaatagatacaaaataaatccaatgacaggaagaacgaataatacgaataaccacgcccaagttgaactggcagtacgtcgatcacgttcaaggaaaatgatgacaaatgccaatactacgttagttataaacacataatttttctagtgtacgtggacataattgataaaatttaagcattatttgcatccatgatggttgattaatttcaattttatttagtattattccttccactatttgcttggcaagttgttgaggttgtatcatcatgtgtctataatttttaaaatactttagagtaggatctgcgtttttttggaatggtgtatctattggaccgggctgtacattgagcacttttaattccggttgttctaatctcaatgcattaagaacggcgctaaaccctgctttcgatgcaccgtaatgtgccgcattagcctgtgaaacaagagcagcttgactagatataccaacgatatatgctgcttttactaattgtggttgaatcactttgtataacaaattaaaatttgtaagattaacctcgtaagtttctactacttcacgagttgaatgctcacttatagacttaaaatatccaacacctgaactgtagatgaaaccatttataggtgtatttaaaaatttttgtaatgattcaatatcttttcgttgcattaaatcacatttaatcacattgatatgttcaggtttaaaatagttttctttgattcgattgaacttatctatatttcttgcaagtatagtaacatgggcccctctttgaagtaattcattggttattgcaaaacctaacccactcgttgctccagttataataaagtgtttgcctatcacgtcgctcctcctttatgtatattttaataacaagcttaataagtgtgatagcattcaattttatttatgtgtaatattacttatctatgatatatgatactatatatgcataactttaagtcaatgaatagaattcaaaattgaaggagttgagttgaatatgaaacttgtattttatggtgctggtaatatggcgcaggcaatttttactggaattattaattccaacaatttaaatgcaaatgatatttatttaactaataaatccaatgaacaagcattaaaaagctttgcagaaaaattaggggttaattatagttatgatgatgaagcattactcaaagatgccgattatgtatttttaggtacaaagccccatgattttgaaaatttagctaatcgtattagagaacacattactaatgataataggtttatttctataatggcaggtttatctattgattatattcgtcagcagcttaataccaataatccattagctcgtattatgccaaatacaaatgctcaagttggacattcggttactggaataagtttttcaaataattttgatcctaaatctaaaaatgaagtggatgaattaatcaatgcatttggatcagttatagaagtctccgaagaacatctacatcaagttactgcaattacaggaagtgggcctgcatttttatatcatgtatttgaacaatatgtaaaagcaggtacagaattaggtttagaacgaaatcaagtcgaagaatctatacgcaatttaattattggaacaagtaaaatgattgagcgttcagacttaagtatgtctcaattaaggaaaaatattacatctaaaggtggtactacacaagctggacttgatgcactatctcaatatgatattgtatcgatgtttgaagattgtttaggtgcagctgtgaatagaagtatggaattatcc

SEQ ID NO: 4100 - DNA, 4116 bp, Artificial Sequence
  Description of Artificial Sequence: synthetic nucleic acid sequence
tggtcatattctttaacgttttcaaattctttagttagagaatcaaatgaaataactgcatcaatctcaccgtgagtaattcgatattgtaaatcttttgttcgtaacatttccgaacttggaacaatcgctatccctagtttcaatgctgcaatatataattcatatgtaacgattgcacgtggcatcatgatgagaactttatctcccttttttagcccatgattgaggaatacattccctactttattagcattactgataagttctttataacttacagaaatattttcatgctcgttatccttgtaaataatggcttttttatgatcttctgaggcatatttttctatttctgtaacaatattataattctcaggtgctagtaaatttgatttattcataagtgtacttcctttcaattcactttcatctaaacattaccaaaggtttataatctatcaaacctcttaaaaacattcatattattcatcatcaactaacaaattttcaaataagaaaaacctgaaacataaattaatgtacaggtttatcattaactttttgattgttgacaataactttttgctacattcatttatcttatattatttgaacaagtcaaatatacttttacgtgtgtacaattcattaaaagcatccacaaaattttattcttaataaattcaatggcatattatacttttttatattttatcattcatatattcaacacaaatttagttattaagactttctaactctattcttatattataggataaatctctattgactatacgatgatcaacacctttttgagttccacgttttttatgagtttgcgcatatgcttgtgaattttgccaatcatagaaagcttgtctactgttccatagcgtgatgataatgtaatgtctccctttgactaccggtctaagaaatcttaacgctttaaaaccaggcacatcttgcaaatgttgatttcgctttaaaaaccgtgactcaaaaacctcttcattacctccattgacgaataagtgatttaacacacaaaatgaatcattagataagctgttgattgattctaatacttcgtagtgctgctgatcattattcttttcaattgtgaatgaattactagtttcttctattatatatgttttatttgtatcgctaattaacataagacatcccttcatttcaatttaagattatagggctactttactttgttcatatagtgatagtgagcgttttacagcttcaatacaatcgtcatcaaaataatttaactgattaaaatagtttaatatattatgtgctgttgtttcttccataggtaaatcttcatcttggttaatacatgtggctagtttacctagaggtgtttcatcaccaacgaaattttgtataaaatgataaaaactcaccttatcacctctttaatatgatataaatacatactaccatgatttaatatataaaacattaaatccaaaccgacactctatgcacgtcacctatacatatcaacactatttatatattcttactgacatttcgtggtaagaaaagtccggatgataaggactgctgaaattaccattgatagattgaaacaaaaaacttaaatttttattttgacgttaccaaaagtatcttttaagcttcccttaacaactataaataacccacaagaagtgttgttagactcaccactatatttatcgtatcttttcaatttccaaaagaagcttgtatcgtaaaaacaaaatttaattatcaattagataattaacaaatcgtaataactataaaatcggtacctaattacaatgtatagatacctttatattcttgatatttcatacaccttttatttcaaataatctaatacaattgtacccactgcctctgcaactacaagcatagatgtttcattgatattaaacttaggatgatggtgagggtacataggtccatcttctggtgctgcacccgaataaataaatgttgaaggtctttctaacgcataaaacgcgaaatcttctgagggtggctgcggctcacaaatatctattgcttttatgtcatccagcttagcattttttaaagttgttgctacataagaagtaaattcaggatcattgtaaagagctggataatcctttttaaattcaaaatcacaaatcactccgaacatctcttctaatcctctgactagtcgtgtcatttcattctgaatattgtctcttgtatcatcagtcagtgcacgtacatcaccttcgattgttattgtatctttaatcacattgaattgtcctttcccgtcgaaggaacctattgtgactacacccgtttcaaacggatttaagcgtcttgaaacaatggtctgtgcggtcgttacaaaatgcgcacctgctacaatagcgtcattcgatgtatgtggggatgagccgtgaccaccctgacctttcacaacaagtctaaaataagcgcgtcccgtttgaacaaaaccttcacgatagtatattttacctgtttccatcatactcatcacatgtgcacctaaaacatggtccaccccttctaatacgccgtcatctatcatacctttcgcaccgcccggtggcatttcttctgcaggttgatgtataatcacgacattacctctcaattgatctttcatttcaattaatgtttctccaagtattagcatgtacgcagtatgtgcatcatgaccacaagcatgcatgactccctcatttttagaagcataaggtaattctgtttcttcttttatcggtagcgcatcaaagtcagcacgaatagcgatagtttttcctggatgtttacctgcgatggtaactttaattccattaggacccacattcgtctcaactaaacaatccttatctttataaaagtttgcaatatatttagatgtttcattttcttcgaatgataattcaggattttcatgtaagtaacgtcttatttctttcattctttgctctttttcacgtagatgttgaactaaagtttgattcatcttaatcctctcctcaagattattataaactttaatttataaatattgttacacaacgttttagagatacatatcttaatttttatatttaaacaatcatcgtacaaatctatcacagtaatgttacacactaaaaaacctgagacaacaagttgtctcaggcttctatatgagtaaccaatgaataagttacaattgtgtacacaacaattttttaaagttaagtctttatataccgtaacagatgattgaattcaatatgattgctattataatctatttctggttagaatttaagattatattttgaatcaaactattttaatattggtagaatggatcatcttccattgcacctgctttttcatcatcaataccatgtttataatagtcaacatattgaggttcaagcggttttctaccacgaataatgtccgctgctttctcagctaacatcaatacaggtgcatgaatattaccatttgttgttctaggcattgctgaagcatcaacgacacgtaaattttccataccatgtactttcatagttaatggatcgactactgccattgggtcagatgcaggtcccattttcgcgctacaagatggatgtaatgcagtttctccatctttacgtacccaatctagaatttcttcatccgtttgaacttgtggtcctggtgaaatttcgccaccattaaatgggtccatagctttttgttttaggatatttcttgctactctaattgcttcaacccattctctttcgtcttctttcgtagataagtaattaaacacgatacttggtttttcaaatggatccttagatttgattttcaaactacctcttgagttggagtacattggtccaacatgtacttggtaaccatgtgctactggtgctttttgaccatcatatcttacagcaattggtaagaaatggaacatgaggtttggataatcaacatcatcatttgatcttacaaagccaccaccttcaaagtggttagacgccgctgcacctttacgtgcaaaaatccattgtaaaccgatgaacggca

SEQ ID NO: 4101 - DNA, 3573 bp, Artificial Sequence
  Description of Artificial Sequence: synthetic nucleic acid sequence
tttaaacttttctcgatttgtcattgccaaaataataaccaccttaattaatactaaatttaaaactattaaacatcattggatatgttacaactgctcataaagtcactaaataaattcgtttcatattatactactgattgcacgtattttcatgaaaaacaaatagtaaataatacaataaagaagagcaggttagatttaaaattatgtttcatcatctttcctgctctttattaatatcaatttgactatcaaaaattttattgcaacttacttaatattcttaaataattcttgtaagtaatactctaattcatcaatttgcacttcttcacttaaaccgttaatgcgttgttttacctcaacaataccttcttcagctcttttaccaacaacaactcgtaccggtaacccaattaggtctgaatcattaaatttaacaccagcacgttcttttcggtcatcatataaaacatcgtatgaatccattaatttttgataaagttgatcacctaaagtacgttgatcatcctttttaggattgatagtaattagatggatatcgaaaggcgttactgattttggccaaataattccattctcgtcattgttttgttcaacaattgcacttaatgttcttgatactccaataccataacagcccataatgagtggttgagcttttccctgattatctagaaaagttgcattcattgattcagaatattttgtccctaatttgaaaacttgtcctacttcaatgccttcagcaaattgtgctactcccgagccatcacttaacatctcaccttgtgtaatgaatctaaagtcaccgtattctgttacatcaaagtctctaccaatattgacatttatatagtgataatgatcttcattagctcctacaacaaagttatttaaatcttgtaagtaattatcggcataaattttaatatctttatcaaaaataggaccaagagaccccggattggcatctacaagattaacaatttcatctggagtagccatttcaacatgttccgtgccgaaatatgattttaatttcacttcatttaattcatgatgtccacgaactagaaacataataaattcgccatctattttaaagatcatagtttttacaatttcatctaatggtctctttaaatattctgcaacttcttgagctgttttaacattgggcgtctcaactttagtcaattccgcaagtgcagaatgcttatgagaaggatgataaacaacttcagccttttcaatattcgctgcatagtcactctcattactataaactattgtatcttccccaatttcactcaatgccataaactcgtgtgtatgacttccccctattgcacctgaatctgccacaaccggtcttgcattgatgcctacacgtttgaatatgcgactatatgcttgatacatatcttgataagttgcatctaatgaagcttcatctgaatggaaggaatatgcatctttcataagaaattcgcgtcctcttaataatccaaagcgtggtcttttctcatctctatatttggattgaatttgaaataaagtaaggggtaactgtttatatgattttaattcatctcttactaaagaagtgactacttcctcatgagtaggtcctaatgcaaattcacgtccgtttctgtcttttaaacgcattagttctggaccatatgcactccaacgtcctgactcttcccataattctgcttgttgtaaagctggcataagaatttctacagcatctatactttccatttcttcacgtatgattttagatatattatttagtacacgtgtagcaagtggtaagtaactatatataccacttgtactctgtttaattaaccctgcttttaataataaacgatggcttaatgcttccgcctctgcagggacttctctcatcgttggtataaatactttagattgtttcattctctttttcctccctatttataagaaataccgttgtatatcattccaagtgactaaaatcataataataaccacaaaaagtgcgcctacagcaataattcctgtttccgcttttttattcactggttttctaaaaatagcctcatatagtacaaataatatgcgaccaccatcaagcgctggaataggtagcaaattcattattcctaagttaacacttaataaagcggtgtatcctactaaattaataattccagatttaacaacagaatcaacactgtgataaataccaacagggccatttaacatatcaaatgaaaattctcctgtaaatatactagctaacataccaacaacagctgtaaaaataagcttacctttatcgaaaaagttataaataccgtagcttattggtttaaaaacgctgtgttctgtagtaggggcaaaaccaatttgataagttgtttgagttttagttttagttatctttctctctacttttttaggttggagatctacagacttgttttggccatcccttttaatttttacagttgttttcgccgttttattttggtcaagaacatgtttgatatcatcaaaatttttaattttatgattacctacctgaactattttatcacctttgtgcaatccagcttcatcagctggagatttcttcacaacttctcctatgacattggttggcgtaccttggtagtatgctaatccaataaatagaactaaagctaaaataaaattaaataacggacctgcaaataatgttaaaaactttggcaatggtttcttatgtgtaaactgtctatctcttggagcaatttgaacaaggcttccattttcgacaaaaaatgcctttttcgctatagtgaagtgatgcctttcatcatcataagaagtgataccttcaatatataggtcatctttaaaatcacatttcttaacttctatggcttcaatttgttggaatttatgttggtcatctagaattatatgtgtgatttcgtcttggttatttaactttatttttacgttcatacctggttgaactggtggttcttcaagaccatcaccagccatcctgacataaccacccaccggtaatagacgaattgtatataatgtttcatctttacgaaaactaaaaattttaggacccataccaatcgcaaattcaggacacataattcctgctcgcttagcaaaaaacatgtgtccatattcgtgaacagttacgagtacaccaaatacgatgataaatgaaataatcgtaattaaaatgctcatgttctacacctctaatgaatttatgtttaattaaaaaatcatctaagtaattaaatcgatagataatattaaatattataatatgttaatacttaatatcatattattttgtgttgttgtatcttttcagtttatcaataagtgctgaaaaggagttaagagatattcaccactaatcaacatctcaataactccttcattataacatctatttcattttacaattcataaatttaagtttgtatcagtaaaatatttaatagcggtaatacaaacatgaagctatcaaat

SEQ ID NO: 4102 - DNA, 3344 bp, Artificial Sequence
  Description of Artificial Sequence: synthetic nucleic acid sequence
tatcaaaaactttaaaatgagtggtttgcttaatcgtgaccaagaagtgttagacgctttagatattagacttgaaccaaagtataattcggatattgttccaatagcattaacagctaaaggcgctataaatcaacgtagtagtaaagtagctgatgaaaacatcatttatcaattaatagaacataataagaagaattttatcgagacagccagccacattatggatggacatacggaagtggcacccttgaagtacaaacaagtattaccttgtcaattttgtaattataaatcagtttgtcatgtagacggattaatagatagtaagcgttatagaacagtagatgaatcgataaaaccattagatttaattcaacaattaagaaatgaaggtggtgaaagacatgattccaactaaacctcatgatgtgatttggacagatgcacaatggcaaagtatttatgcgaaaggacaggacatacttgttgctgctgcagcaggttccggtaaaacagccgttctagttgagcgtattatacaacgtatactaagagatgatgtagatgtagatcggttactagttgtaacatttacgaatttaagcgcacgtgagatgaagcatcgagttgataaacgtatacaagaagcatcttttaaggatcctaacaatgaacatttaaagaatcagcgaatcaaaattcatcaagcacagatttctactttacacagtttctgtttgaaattgattcagcagcattatgatgtattagatatcgatcctcattttagaacaagtagtgaagcggaaaatatattattattagaacaaactattgatgatgttttagaacaacactatgataaattagatcctcactttatagaattaaccgaacaactatcatcagataggaatgatgatcaatttagaagtattattaagcagttatattttttcagtattgctaatcctcaaccatttgaatggctcaatcaattagcgcaaccatacaaagaagaaaataaacagcaacaattaatgcagcttatcaatgatttagcaatgatttttatgaaagcaggatatgaggaattacaaaaaagttatgacttattctcaatgatggaaagtgttgataagcagcttgaagttattgaaaccgaacgcatgtttattactaaagctattgaaggtaaagtattaaatacagatgttatcacgcaacatgaatttatgagtcgttttccggcaataaatagcaagataaaagaagcaaatgaaggcatggaagatgctttaaatgaagcaaaacaacattatgataaatataaatctttagttatgaaagtaaagaatgattatttttctagaaatgcagaagatttgcaaagagatatgcaacaactcgcacctcgagtggcttatttagctcaaatagttcaagatgtgattcaatcatttggtgttcaaaaacgaagtcgtaatattttggatttttcagattatgaacattttgcattacgcattcttactaacgaagatggctcaccttcgcgtatcgctgaaacgtatcgtgaacattttaaagaaatcctagttgatgagtatcaagatactaatagagtgcaagaaaaaatattatcttgtattaaaactggtgaagaacacgatggtaacttgttcatggttggggatgtgaagcagtctatttataaatttagacaagctgatcctagtttatttattgaaaaatataatcgcttttctagtagtggaaatgaaagtggcttgcgcattgacttatcgcaaaactttcgttcgagacaggaagtgttatctacaaccaattacttgttcaaacatatgatggatgaacaagtaggagaaatttcatatgatgatgcagcgcaattgtattttggtgcaccatatgacgaagtttcacatcctgttcaattacgagcacttgttgaggcaagttcagaaaatagtgacttaactggaagtgaacaagaagcgaattacattgttgaacaagttaaagatattattaatcatcaaaacgtatacgatatgaaaacaggtcaatacagaaaagcaacatataaagatatcgtaattttagagcgaagttttggtcaagcgcgtaatcttcaacaagcttttaaaaataatgatatcccttttcacgtaaatagtaaggaagggtattttgagcaaactgaagtacgtcttgtgctttcatttttaagaacaatagataatccacttcaagacatttatttagtgggattgatgcgttctgtaatatatcaatttactgaagaagaattagctgaaataagagttgtaagccctcatgatgattacttttatcaatctataaaaaattatatgattgatgaaaaagctgattctagattggttgacaagttaaatcgttttattcaggatatacaaaaatatcaaaattatagtctaagtcaaccggtttaccaattaattgataaattttataatgatcattttgtaattcagtactttagcggtcttattggaggtaaaggtagaagagcaaatctgtatgggctatttaataaagctgttgaatttgaaaattcaagtttcagaggtttattccaatttattcgttttattgatgagcttattgatcgtaaaaaagattttggtgaagaaaatgtcgtaggtcctaacgataatgtggttagaatgatgacgattcacagtagtaaaggattagaatttccatttgtaatttactcaggattatctaaaaaattcaacaaaggtgacctgaatgcaccagttattctaaatcaacaatatggtttaggtatggattattttgatgtaaataaagatatggcttttccttcacttgcctctgtggcatatagagcaataaatgaaaaagaacttatatcagaagagatgcgtttaatctatgttgcgttgacacgagcaaaagagcaacttattttagttggaagagtcaaagatgaaaagtcgttaattaaatatgaacaattagctgtttcagacacacatatagcagttaatgaacgccttactgctaccaatccatttgttctaatttatggtgttttggctaagcatcaatcgccttcattgccaaatgatcaaagatttgaaagagatattgatcaattaaattctgaagtgaagccacgtgtatcaatagtgattgatcattatgaggatgtttcaactgaagaagtagtcaatgataatgaaataagaacaatcgaagaattaaaggccataaatactggtaatgaagatgtgaaaattaaaatt

SEQ ID NO: 4103 - DNA, 3734 bp, Artificial Sequence
  Description of Artificial Sequence: synthetic nucleic acid sequence
tagtcgtataaaaggtggccatactaataataagataagagtttcaaaatcgcctgtgcatgcgattagtgatgatttggatatactcattgcttttgaccaggaaacgattgaattaaatcatcatgaaatgagagaagatagtattataattgcggatgctaaagcaaaaccccaaaagccagagaactgtgtggctcaattaattgagttaccattcactagcacggcaaaggaacttggaacagcattaatgaagaatatggtggcaattggtgcgacatctgcactgatggatttaaatacatcaacttttgaaactttaatcgataacatgttttcaaaaaaaggtaataaagtcgttgatatgaatatacaagcccttaatatgggttatgatttaatgaagcaacaagttaccaacgttaatggagactttacattagagaatggtagcggtcatcctcatttatatatgataggtaatgacgcaatcggattaggagcaatagcagctggatcaagatttatgtccgcttatccaattacgccagcttctgaaattatggaatacatgattgccaatctacctaaagttgatggtactgttgttcaaactgaagatgaaatagcagcagcaacgatggcgattggagctaactatgctggcgtacgaggctttacagcgagtgcgggtccaggtctttctttaatgatggaatctattggattgtctggtatgactgaaacgccattagtcattattaatactcaaagaggtggtccttctactggcttaccaacaaagcaagaacaatcagatttaatgcaaatgatttatggtacccatggtgatattccgaaaattgtcgttgctcctacagatgctgaagatgcgttttatcttactatggaagcatttaatttagctgaagaataccaatgtccagtcattctgttaagtgatttacaattatcattaggaaaacaaactgttaaaacactcgattataataaaatcgatattcgtcgtggagaaataatacagtcagatatcgagagagctgaagatgataaagcatactttaaaagatatgcattaacagctagtggcgtatcaccacgaccaataccaggtgttaaaggtggtatacatcatgtaacaggtgttgaacataatgaagaagggaagccaagtgaggcgcctatgaatcgtcagaatcagatggaaaaacgaatgcgcaaaactgaaagcttggttatcaataatcctgtgttactcaatgaacatgaagacgaagcagatatactgtatataggatttatatctactaaaggtgctattggagaaggtgcagaaagactagaacgacatggtgtaaaagtgaatacgatgcatattcgacaattacatcctttccctaaagatattgttcaacaagctattaataaagcttcgaaagtaatagttgcagaacataattatcaaggacaattatcaagtattttaaaaatgaacacacaagttaatgataaattagttaatcaaacaaaatacgatgggaaacctttcttaccttatgaaattgaagaaaaaggtttggaaattgctaaagagttaaaggagttggtgtaattggctacatttaaagattttagaaataatgtgaagccaaactggtgccctggttgcggtgacttttcagttcaagctgctatacaaaaagcgacagcgaatattggtttagaaccagaagatgtagcaatcattacagggattggttgttctggtagactatcaggttatattaattcttatggcgtacactctattcatggacgtgcattgcctctagcacaaggcgttaaaatggcaaacaaagatttaacagttatcgcttctggtggtgatggagacggctatgcaataggaatgggacatactattcatgctcttagacgtaatatgaatatgacgtatattgtcatggacaatcaaatatatggattaactaaaggacaaacatcaccttcctcagctaaaggatttgtaactaaatcaacacctaaaggaaatatagaaaagaatgtagctccattggaattggcactgtcctctggtgcaacttttgtagcacaaggattctcaagtgatataaaggcattaactaaaatgattgaagatgcgattcatcatgatggtttttcttttgttaatgttttctcaccttgtgttacttacaataaagtgaatacttatgactggtttaaagaacatttaacaagtatcgatgatattgagggctatgacatcacagataaacaacttgctatgaaaactgtgctggatcatgagtcactggttaaaggtatcgtttatcaagatacaacaacaccttcttatgaatcgcaaatttcagaactagaacatgaggcgttagctaaaagagatattcatattacagaagaaactttcaacgatttaactgcacaatttttataaaggatactcattcatagtaactagaattgcgtcaaaataagtaggtaaaataaaaacgaaggtgtacttgatacatcatgactatctaattttactgtaatttcttatctaataacgttaatgattactatagaaaatcaagaagtacgtttcaatttaaaagtattagagaacatgcatataagtaaataacatatttaaagagtgggtcagaataacattttaattctgctcactcttattttatctctatgttgcttgtcaaaagcactacgattcaataatgtaattctcatttaacgttttttacatgattaatcacccatctcatctaaaagtaaataatataagaatgacataatttattccaaattattttaaaaatatagataaagtatttaacaaatgaaattttactcagagttattattaaatacataaataatgtgaacagttaaacgcacagtcctaatcaatgcaataagtttgtttttttaataaatatgtaaaagattttgtaaaaagattttaagaatatgaattttgggaataataaaaatataagatgatttttcggaggttaatatggacaaatttaaatctatgacagaattaaaagaattgactaaagaaggaaaagattgggaaatagagtgtgaaaatcgttctagcatagtcactatattagcattacatggcggtggaattgaacctgccacaactgaattagcctatacaattgcacattgtggcgactataactatttttcctttaaaggtatgagaagtaaggggaataatgagttacatgtgacttccacacattatgatgaccaaattgcattagatttagtgagaggtagccaaagaactgtagccatccatggttgtgaaggtaatgaaagtgtggcttatataggaggtagtgatgacagactaattgagttaatcaccgaatctcttgaagatataggaattagcgtgcgagaagcaccacatcatatttctggaactcaagaaaataatattgttaatatgactcaaacccaaggaggagtgcaattagaactgacagctcagttaagaaaggagctatttaaaaatagaaaaagttcacgcaaaaaccgtgaaaataaagataattgggatgatttaatgtacgactttgctgatgcaatgaaaaaagctatagaacgtgcataattaaattctaacgcatgttaaaataata

SEQ ID NO: 4104 - DNA, 4017 bp, Artificial Sequence
  Description of Artificial Sequence: synthetic nucleic acid sequence
tatatatctttcacagcaatatcgacgatttggaaaactgtaccaccatccccaatcactcgccccataccaatcaacatatcattctcataaagggtcacattaaaacatgcatgaggaagcccctttattgccgcttcaatcgatttactactcattccagcattagctcttaaattacagtaatcttcgggactaggtgcttcaaagtgaatcttagtcattatctatcacctgtctagttattgaaaatctaaatccactctaccaaacattttttagtatttcgactttattttttgggttctgtaagaatagcctgtcttaataagaaaaacagtaacagtaaacctgcaagcatacctgtatgacctatgcctgcaaatcccgcaaacatttcgggtgaaaattttttaccaataacttggaatgtacctttaactgtcatcattgaaatcgtgattaacacacctaaatgatacacgaaaaagaaccaattaaataagtaataactacttaatttaaatactttttcaagtggtaataagagtaaaaacataaacatgcctaagataagtgtatgtgtatgcactaaagacaattgcgtgtcacccacaaagtcatgcgctttagttaattctctgtagtaaaagccacttaataaacctatgaccatataaaataaaaaagagtataataatctacgcataaaaaatcctccttaagattatattataaaacatattcatttttattaaagtgacaaaatcacgactataaaataaaacgctagccagaaatttaggtaaattcttagcctcactcttatttgtttttgtaaattaatagaaatgtatattgaattattatctaaagacgtagaacctttacatcagaaaatactattcatattcaaaacgattcaattaaatttttttggatgcgcttgtttaaaaagagcaatcaacgaaatcacaattgccacgatagcaactatccataaagcgattgaatcaccttgactcgagtcagaatgagtgtcatttggatttgcacctttttttacagttgtagttggtgcagggtgcgcactatcttccttcccagtccacttaacaacatctccattatcataagtttgagtagtgttccatttgaatgtgccttcctttttaggattagccactacaataggaaattcaataaactcatggggaccaatacctttatctgtagcagtccatgttattttagtaatgttccctttttatctttaaaaaatgatgtttaaaaccttcaatagttttaacactctcaacgtttaatccctttggcacatctaattctactttcattgtatgatcattttgctcaacaggcacccttacatcatacttatcatatgattcaggttcactttcattaggattaagtgtgacatgtgcatcagcatactaaaaaaatccgatctcccaaaatactataaaagttaacaacagtaatttgcgtaacgtcatttccctcctcaactaggtatatttatttgactcatcatgatacctgcaaaattaatatcataccaattaacaattcagtcatcagtgcaaaacgatggacctgttgtcgttgtctcaaagcacgcatcgtttgatagaaacctaatagcatcatagcaataattcctgcgatttttatgacaagataaatagaccaagcgctcacattattccaaagtgttaaagtattcgtttcatcaatagccattaaaatccctgtaaaaacgagcataatcacagcaatgatattaacttttaaaagcatacgtcttacactcgtcaactgattaattttcactttaatagcataacaaatgagataaacgagtgaacctaaccataacgttagccctataagatgaattgttcttatgataattgaccataatggcacttgttgtgaccacacgtgtccagacatacttatcacagcaatcataactattgaaatgagccagtaccatattttttccatatcttttaaaatgaaaagtataaacaaaatgattagtgaaatagagcttaatatatacggaaattgcattatcacttctaatttaaatgatagaatatcttctaatatatcagatgtgagtgtcatcatataaaccacaagactcacgagtaatgacatagccataatccatgcaattcctgattgtttgggtaacacattaaattgtcttaatcctcgtttcctagcaataccatttaaccaaaacaagccaataagtagaaagtttgcaccttcagtaacatatcttaataatccaaaccaaaatttagacttttcataaaaaggtgaagatgtatctacatctttagcctcacttttccaactgaaaattcaaacgtatctccgacttcatgtccatccgcagataccgtatgccattcaatagtattcgtgccattaacaatttgctcagatgaaaatacaactgtctgagaccatccagttgttattggtttaaggtctttaatctttttacctttatcatcaaataaggtcacactcgagtatttggtgttcacaggttcattaaactctaacttgattgcttctggtttgtctttaataaccccttgctgttgtggtgttgatttttctaaagtcgcatgtgcagaagcttgatattgaaaaataggcaataaagttattaaaaacataataactaacgtagcactatgtttagacattatttttaaaaccaacacccctcctttcatataaaaattttgctccgtttttcatattagacattatcactcatcttaacaataactattctaattttttcgaattagacacaaatataaaaatagaaattttatctagtaaattaaatacaagtatatataaatcataaagttaataaatcaattaagtatgtagcaaaatggcaatttgtaatataaaataaagtttattcattttagaatcaccttactaagtgatcaacaaaatttcgaagattgaataagttgtataaagtttattataattaaccatactattaaatcataagtaatctgcatatgccttaaagataaattatatatttaatgattaatgtacaatctaaagttattagtagctggattgataatatagcaaaattcatctactttttcttatacctaactatacaataggaatgtgattcaactttatatatcatatttaggccaagagagtatgatatttaaaaattatgtccgaagtttaagaagcttgatgccacaaatttagaagtttaaaatttatttaattaactttagtatcatccttattctagtggacgctgaaaggaactttcctaatgttaaatttgaaattcgcattataattcaccactatggtctagatgtttttgtactgattttaatttatcattcatttttcttgatttatctcgacgatcatcaattctaatatttgtacaaaccctatctaaccctttacaacatccgttatgggcaatcttttacattatttgtgtcattgctgttgttttccattttgctaatggtttatggtcattttgtgtaacatggggctttttacaatctaaaaaatcacaacgtgtttttacttggatttcactcatagtatttttagtgatttcttatattggtgttgcagccgttattgcgtttatataagtatacgaattttcattttgaaacaagcgagtatagataaatttactacttagaaattatgaaacgttaaaaattaactgtttcgtatttagtttatatctgaaattaaaagtagggctttagatttaaatattcaggggagtgacatttctatggcagagaaaaaaattattgttgtcggtggaggactagctggtctgatgtcaacaattaaagcggcagaacaaggtgcacatgtagatttattttccattgtaccggtaaagcgttcgcactctgtttgtgcacaaggtgg

SEQ ID NO: 4105 - DNA, 2410 bp, Artificial Sequence
  Description of Artificial Sequence: synthetic nucleic acid sequence
tatttaatttgtattaatcctaccatcgtactaatgtttcgtcaataattattttaaattttctaacaaataagtaactgactgaaatgcgtagattctttttatctcttcctctctacgcataagcaacaaaacaggaacagacataatttgtttctctttactccattcaggataaaaattaagatctattttttttattggcaattgtaagatttcattagcaatatccaacatcctttcagaaatcttacatgttccacacattggtgtataaccaaatatgagatgtttttctttattaaaattaacagttatgtcttcaatatccttcaatttattcatttactaaaactagcctttcagtttttaaattattcataagtttcttttctttttttacattaaaaccatatctacttaatacatgtgctaaataatttttaggacacttagcaacctcacaaaacgttttatcaacataaatatgttcactttcgcttaaataacgtttaaaccattttctaattttttcaccctcatcatcagaatcggcaagaacataaacttgtttgtcataaagtgtttctatcatgttgtctatcttatctatactcatagtgccatgtgtacaaatgatatttgcaggttcagcgattacttgttgtactcttttcttatccgatttaccttcaacaataataaccttatttacaatagccatgtcaatccaccttctaagcgtcaaagtaactatcactatcatcattcacaaaatccccaaaacctaaacatttagtgacactgcaatttttaattgcttgtgtcacttatgcttgagctttgctcaggcgttcctctttttcactgcaatttttaattgctagtgtcacttatgtatgggctttggcttacgttccagattaaagttgttccttataaaaaaactccttgattaaatctaatcgaggagtttgcaatcattattcaccaatcatttctgagtattgatctgctgataataattcttctaattgactatcgtcactaatttcaattttaaccatccatgctttttcgtatggcgattcatttacaaattctgggctatcttccaattcttcattaacttcaacaattttcccagaaattggcgcatacaactctgatactgtttttactgattccacaaagtatcatgtaattgtggagcgggtgggtcacaaggacttgcttatgattctcggatataattcttttcagccgttattgtagctagtggagaacaaattagatttaatatgcgaaaattcgttggcgttgacatagtaaattcaactaaaggattaggtacgagttaaaaaattgactgggttggtcatcaaattgacaaaggaattgataaatacattgattttaaaactaaggaaattaccttagaagtgaaaggtgcattacatatgaaaaataaattataggatagttctcaggaggttgtagaaagcgttgaaaatgatgccaactattttagtaataaagcaaaaaagtcgaaaaaaatgttggagaagctgtcaataatgtcaaaaaagttgtaaatccaatgaaatggagttggtgaaacaagatggattatgtatacacaatttataaaaatcctagatataacatcattcaaaaagataatcgctatttaatggtcgatttagaacaaaattggtattcatatttatgtccaatgctgaattggtttatacctattaaattcacagaattaacttatcaagaattcaataatataaacatatttcataatggaggacaaaagagtcatggtatgatggctgctggcgttggcgtcactatcagtgtgctattaagaagtcttgtgggttatatagatattaatattagtcgaatttggatagtttttatgtttttaattggatttgttgctgtgatcacacttcgtttatctataagaaagaagttaaatcatccagcatttaataaaaagagtaaacaaaaagtaatattgataccatcatttaaaaatatgatattggtggtgttttgctattttatgatgctgtttttctcaattgcaccttttcaaatgatttttgaggaaaagaaaaacatcttaggatatatactttgggtaggtgtattatttatatttactactttgaatatggcttcaatttctgatagaaaagtacatgccaaaattaaaaatataagaagataggtgagataaagtggaaacaataggagtatcatatatttaaaagaaggttcccaaaagttaatgattatcaatcgaggacctattgtagatatagataatcaaaaatatatatttgattattcagcatgtaattatcctgtcggtgtcgtagaagatcaaata

SEQ ID NO: 4106 - DNA, 3769 bp, Artificial Sequence
  Description of Artificial Sequence: synthetic nucleic acid sequence
tatttattcaaaaacatcatgtaaaatataacttaactgaaatcttagtaaattgatactaatttcaaatcttgaacgacattattgccctagagaacatactgggcagtgagattaaacaagtataaaaataacgtttagattgagctggtatgtttctaacaaattaaatttagaacacaaaaattattgaagaataatactctaatggatatgtaaaaaatctttaataacccgagtattcacaactagggtcgtaaaaaataacaattataatttataggaggacaatacaacaatggcagtatttaaagtattttatcaacataataaagatgaagtcatcgttcgtgaaaatactcaaacaatttatgttgagggacaaactgaggaacaagtgagacgttatttgaaagaccgaaattttaatattgaatttattactaaattagagggcgcacacttagaatatgaaaaagaacattcaacacactttaatgtggagaacgccgaataatgaaacaactacattcaaatgaagtaggtgtatatgcacttggtggtttaggtgaagttggaaaaaatacctatgctgttgagtacaaagatgaaattgtaatcattgatgctggaatcaaattccctgacgataatctgttaggaattgattatgtaattcctgattacacttacttagaacagaaccaagataaaattgtcggtctgtttattactcatggacacgaagaccatataggtggtgtgcccttcctattaaaacaaattaatgtacctatttacggtggtccattagcattaggtctcattcgcaataaactagaagaacatcatttgcttagaacgactgaattacatgaaatagatgaaagtagcgtaattaagtctaaacattttgaaatttctttctatctaaccacacatagtattccagaagcatatggcgttatagtcgatacacctgaaggtaaaattgttcatacgggagacttcaaatttgactttactcctgtaggtgagcctgctaacatagctaaaatggctcaattaggtcatgaaggtgtgttgtgcttactatcagactcaacaaacgcactagttccagattttactttaagtgaacgtgaagttggacagaatgtcgataaaattttcagaaattgtaaggggcgtattatctttgcaacttttgcttctaatatttatcgtgttcagcaagcagttgaagcagcaattaaatataatcgtaaaatcgttacatttggacgttcaatggaaaacaatatcaaaattggtatggaactaggatatatcaaagcgccaccagaaacgtttatagaacctaataaaataaatagtgtacctaaacacgagttactcattctttgtactggttctcaaggtgaacctatggctgcattatcaagaattgcaaatggtacacataagcaaataaaaattataccggaagacactgtagtatttagttcttcgcctattccaggtaacactaagagtatcaatcgtacaattaatgcgttgtacaaagctggtgcagatgtgattcatagtaaaatttcaaacattcacacttctggacacggttctcaaggtgatcaacaattaatgttacgtctgattcaacctaaatacttcctgccaattcacggtgaatatcgtatgcttaaagctcatggtgagactggtgttcaatgcggtgttgatgaagataatgtatttattttcgatatcggtgatgtacttgctttaacacatgattctgcacgaaaagcaggaagaattccttccggcaatgtacttgttgatggcagtggtataggtgatattggcaatgttgtcatcagagatcgtaaattactttcagaagaagggttagttattgttgttgtgagcattgactttaatactaacaaattactatctggccctgatattatttcacgcggttttgtttatatgcgggaatctggtcaattaatttatgatgctcaacgtaaaattaaaggcgatgtcatttctaaacttaacagcaataaagatattcaatggcatcaaattaaatcttcaattatcgaaacattacatccttatctttatgaaaaaacagctcgaaaacctatgattttacctgtgataatgaaagtaaatgaagataaataaacacttaaatatatttaatcaagttacaatgaatttatactactttaaatgtttccattactctaatagtattatatatttttagtagtaattaattattttgaattatttatttaatacgatttgagattatatcttttatctttgaatttcttacaaaaaggagtttagagctaaaagttcttaaactagtaaaaagagacaatttctatattatttcatatagaaattgtctcttttataattttcaaactataataagcttgttgatatactatcttacttatataagttcctttaatacaaatcatattccttctataactagccaattgtttttggtttaggttcagaaagtttcttaaagtaatatttctatattccaatcaaaaaatacagattatgtgtagacatatagaactacttttaacaatattttacgatgatataatagattgcatcacaatgatattcaatttcattaaattcagtatctataattgtttcaattttatcattcacatatctagacatatcatttatgaagatgagtattgaagtttctattagtatagtaaattaagtcatattataacctttattcacaaggcatgtctttcaatactaagtattgtataaatagagaaaagcagtaaggtaattttcaattagaaaatatcttactgcttttttaggaattaatgtcccagttttctttttataattttgaaatatttttattcacttatcaagttttaggaataacatttacatagaagttcaaataattaagtgtactttgttatgtctaagcttaaaataatacaattttattaatctatttaaatactaaaaaagattcaacattataaactagttttcaattacaatgttttaaaaataaaaagaaacaaatttcactttttaacaattcgcttataatgtacacatacatcaatttgaaattggatatgcaaacatttacttgcttatatttttttcaaagcgacctaagtcattatcatgaccaatcataattaaaatgtcccctatttcaatattgatgttagggtctggagagactataaattctttagctcttttaattgctataatgttaataccatattgagctcgaatatctaattcaataattgtttgtcctgccattttttctgtagattttaattcaacgattgaatgctcatcagcaagttccaagtagtcaaggacactagcactagcaacattatgagcaatacgtcttcccatatctctttcagggtgcacaacagtatcggcacctattttatttaaaatcttagcatgataatcattttgggctttagcagtaacctttttaacacctaattctttaagaattaacgtcgttagtgtactagattgtatattctcaccaatagcgacaataacatgatcgaaattacgtattcctaaactcttcattactgcctcatcagttgtatcagcaacaactgcatgtgttgctatatcactatattcgttaacacgattttcgtctctatcaatagccataacatccatgtcc

SEQ ID NO: 4107 - DNA, 4104 bp, Artificial Sequence
  Description of Artificial Sequence: synthetic nucleic acid sequence
gacttgtatattatagactataatattgccgaagttgaattaagaattcttatcagtttattgaataaggtaataatgattaatagaatcagggttactaatacacatatgtattcttagtttgcttgactacaaaatagaacttaataaacataggctggggcattgttttgatatgttcacttcaaagtagatatgacattaatcaagctttggagttcgtattcttaataagtgtctcagcttattttgtttgcttaaattttgaattaaccaattaaatgagtatttaatagacagtatgcttacaaatatgctagtgtgatttgacgatttatatttaaactttgattttaaatttctatattagttaaaggtatcgcgttgcgttattttttaaaaacgtgtttgattgcgagaaaaaaatgattgcaacgtgttaaaataaaattattgttaattgaaatgtttatatacattttataatataaatgattgtctatagaaaaaggctgttgccagtcgaatcaaagtgaagtgttgtgaaaaattgagttaacacgcattacttcatgagtatataagtataaatttagcgatataaatgataagataaattgttgtaagccaaacagtttttagttaaaggagcgacgcgtgcaatgggatttttatcgaaaattgttgacggcaataaaaaagaaattaaaagattaggtaagttagcagataaagtacttgctttagaggaagatactgcgatattaaccgatgaagaaatacgtgaaaaaacaaaatcttttcaaaaagagttagcagaaattgaagatgtaaaaaaacaaaatgattatttagataaaattttacctgaagcttatgcacttgtacgtgaggggtcaaagagagtatttaatatgattccttataaagtacaagtaatgggtggtattgctatacataaaggtgatattgcagaaatgagaacaggtgaagggaaaacattgactgcaaccatgccgacgtatttgaatgctttagctggtagaggtgtacatgttattacagtcaatgaatatctatcaagttcacaaagtgaagaaatggctgaactatataactatcttggcttaactgtaggtttgaacttaaatagtaagtcaactgaagaaaaacgtgaggcttacgcacaagatatcacttatagtacgaataatgaacttgggtttgattatcttagagataatatggtgaactatgctgaagagagagtaatgcgtcctctacattttgcaattattgatgaggtcgattccatattgatcgacgaagcaagaacacctttaattatttctggtgaagcggaaaaatctacttctttatatactcaagcaaatgtttttgcaaaaatgcttaaagcggaagatgattataattatgatgaaaaaaccaaagctgtacatcttacagaacaaggtgcagataaagctgaacgtatgttcaaagtagataatctttatgatgttcaaaatgtggaagtgattagtcatattaatacagctttaagagctcatgttactttgcaacgcgatgttgattacatggtcgttgacggtgaagtattaattgttgaccaatttactggacgtacaatgcctggacgtcgtttttctgaaggtttacaccaagcaattgaggctaaagaaggtgtagcaattcaaaatgagtctaaaacgatggcatccattactttccaaaactatttcagaatgtataataagttagcggggatgactggtacagcgaaaaccgaagaggaagaatttcgtaatatctataatatgacagttacccaaattccaacaaacaaacctgttcaacgtaaagataattcagacttaatttatattagtcaaaaaggaaagtttgatgcggtagttgaagatgttgtagaaaaacataaaaaaggacaacccgtcttactaggtactgttgctgttgagacttctgaatatatttcaaatttactaaaaaaacgtggtgtcagacatgacgtattaaacgctaaaaatcatgaacgcgaagctgaaatcgtttcaaacgcggggcaaaaaggtgcagttacaattgccacaaatatggctggacgtggaacagatattaaacttggtgatggtgttgaagagttaggtggacttgctgttattggtactgagcgtcatgaatcaagacgtattgatgatcaattacgtggacgttcaggacgccaaggtgatagaggagatagtcgtttttacctatctttacaagatgaattaatggtacgttttggttcagaacgcttacagaaaatgatgaaccgtttaggaatggatgattcaacgccaatcgagtcgaaaatggtatctcgagctgtagaatcagctcaaaaacgagtagaaggtaataactttgacgcgcgtaaacgtattctagaatacgatgaagttttacgtaagcaacgtgaaattatttataatgagcgtaatgaaatcattgatagtgaagaaagttctcaagtcgttaacgcgatgttacgttctacattgcaacgtgcgattaatcattttattaatgaagaagacgataatcctgactacacgccatttatcaattacgttaatgatgtgttcttgcaagaaggagatcttcaagatacagaaattaaaggtaaagattcagaagatatttttgaaattgtatggtctaaaattgaaaaagcatatgcacagcaacaagaaacattaggagaccaaatgagtgaatttgagcggatgattttattacgttcaattgatacacattggactgatcatattgatacgatggatcaattgcgtcaaggtattcatttacgttcatatgcacaacaaaatccacttcgtgattatcaaaatgaaggtcatgaattatttgatatcatgatgcaaaatatcgaggaagatacatgtaagtatatcttgaaatcagtggttcagtttgaagatgatgtagaacgtgaaaaatctaaaagctttggtgaagcaaaacatgtaactgctgaagatggcaaagaaaaagcaaagccccaaccgattgtaaaaggtgatcaggtaggtagaaatgatccatgcccatgtggtagtggtaaaaaatataaaaattgtcatgggaaagcgtaatcaataaaatagtttaaatataaaggctgaggcatatcaaattatgaatgactcagcctttatttacatcgcttgtaagttaaatgcttagtaatatgatatagcgatggaatggccgtttatttttaaaaaataggcatatactgtatgatataaatattatgacatagaatgattaaataggagagaagatgaatggaactatctgagattaaaagaaatttagaagaatatcaaaatcacttaaatcaaattagggggtctctttgacttagaaaataaagagacgaacatacaagagtatgaagaaatgatgactgatcctgatttttggaatgatcaaactaaagcacaagatatcattgataagaacaatgcactaaaatctatagtaaatgggtattatcaactgacaaatgctgtcgatgatatgagtgcgacgagagagttattacaagaagaatatgatgaggatatgaagatagaattagaagaggaagttcagcaatttgaagaacaaattgatcaatatgagttacaattactcctcgacggaccacatgatgcaaataatgctatattagagcttcatcccggtgctggcggtacagaatcacaagattgggtaagtatgcttcttaggatgtatcaacgttactgtgaacaaaatggctttaaagttgaaacggttgattatcttccaggagatgaagcaggcgttaaaagtgtcacattacttattaaaggacataatgcttatggttatttaaaggcagaaaaaggtgttcatcgtttagttagaatttcacctttcgattcatctggtagacgccatacttcttttgcatcatgtgatgttattcctgattttaataatgatgaaattgaaatcgagattaacccagat

SEQ ID NO: 4108 - DNA, 4062 bp, Artificial Sequence
  Description of Artificial Sequence: synthetic nucleic acid sequence
gaacaagagcagatattcaatctaaaaatgctataacacaagcacaggttgagaaaactgtaaaatcagttggattggaaccagatcaaatacagattaatggtagtggaaataaaaatgccacagttcagtttaaaaaagatttatcacgtgaggaagacaataaattaagtgctaaggtgaaatctgaatttggagataatccacaaattaataccgtttcacctctcataggccaagagctagctaaaaatgctgtaactgcattaatacttgcttctataggcattattatctatgtttcactaagatttgaatggcgtatgggtctatcttctgtacttgcattattacatgacgtatttatcatcattgcaatctttagtttgtttagattagaagtagatttaacatttattgcagcagtattaactatcgttggttattcaatcaatgatacaatcgtaactttcgaccgtgttcgagaaaatctgcataaagttaaagtaattacgcatactgatcaaattgatgatatagtcaaccgctctattagacaaactatgacacgttctattaatacagtgttgactgtagttgtagttgtagttgcaatattaatattaggtgcaccaacaatatttaatttctctttagcattactaattggattattatctggtgtattctcgtcaattttcattgctgtaccattatggggcatgcttaagaaacgacagtttaaaaagacaaaaaataataaattagtagtacacaaagagaagaaatctaacgatgaaaaaatcttagtttaacttcttcacattttaataattttaaaaatttacaagaggctggaacaaaaaggtccaagataagtaattaaagacaatttctattgaaataatatagaaattgtcttttttataattttttgattattttcagctcgttgagctattattttttatattaagccacgatgatgtctgaattcatcgaattctgtatctggaattatttctacaatatcatttacatgtcgtgaaatatcatgtgtggggataagaactgaaatttccattggtagagtaagttaagtcatattataatctttatacataaggcacctcgttaatttagtttattgctatttattaaattatacgaaagaccttattttttaaagtatttcaatgtgaaattacatataaacacaaagtattttggcgagactattgagggagcaggacaagttgaagactacaggctgaagctgtcccctaagaaagcgagccaacaatacgaggtattgtaaataaagaagccagtaaatgaatttataaaaactcatttactgtctattttgctaggaattatgcccctgcctcttgattttatatattagcgtttaatcataaagatagcagttaatgaacaaattgaatgataaaagttttgtgaagaattgaaatgatatattcttttaaaaaatgcaagtactttttatttcaataaaatttcggtataatgacctgtggaaatgaggacgattataatgattaaatcaaaatataattgggatataactcaaccgaatacctttataagtgagagtagcagtgatcaatttaaactttcacctatagtaaaaaaggtattagagagtaaaaatattgtggataatcaggagattcaaaatctatttgaaggcactaacattagtcatgattatatgttattaagtgatatgcaaaaagccattgatcgtattaaattagctatcgatcaaaatgaacgaatactagtatatggtgactatgatgcagatggtgttacatctactacaattctagtgtctactttacgtctacttggcgctcaggtggggtggtatattcccaatagatttacagaaggatatggacctaatgaattagcatttaaaaatgcttatgacgaagggatttccttaataataactgtagataatggtatacagggacatcatgaaataagtaccatacaagaattaggtgtagatgttatagtgacagatcatcatgaaataggagaaactttacctgatgcttttgcaattgtacatccgatgcatcctaattttgaatatccttttaaatatttatgtggtgcgggtgttgcttataaattggcccaaggattgatagagcatccacctcaacatttcatagcattagctgccataggtacaattgcagatttagtatcattgacagatgagaatagatatattgtaaagcaaggagtaaagatattaaacaatcatacaccatcgtccataaaggctatcttaaatcaagcgggttttaatgatgaaataacagaagaaacaattggttttattattggacctcgattaaatgcggttggtagactagaagatgcatcattagctgctgaacttttattgtccgatgaatttgaagaggcggaatttttagctgaacaagttgaacattttaatcatgaacgtaaagatatagtatctaaaattactaatgaagcattgttattagcagaggaacaaatcaagcaaggccatttgtttcttttacttgccaaagaggggtggcatgagggtgtattaggtattgttgcatctaaaattgtagaaacatatgcactacctacattaattttaaatattgatgaaaatcaaaatcatgccaagggttctgcgaggtcgattgaacaagtttccatgtttgatattttaaatgatcatcaacagttaattgataagtttggtggtcatcacatggctgcaggaatgacaatgtctatcgataatattgaacatttacataaagagctagatatgtggatgaaagaactaactgttaccacttcattagagccttcaataaaggtggatgcacaacttgaagaaaaagaaattaacattaaaaatattaaagatatatttcaattaaggccttttggtacggactttaatagtcctctttttatggttagagatctaattgtcaagtcaacaaagggaattggacaggataataagcatcttaagttaacgcttggtcattcaggtttaactgctttattttggaatcatggacatttggcaagtgaacttgaaccaggtcaaccgattcatataataggaacattgcaaattaatgaatggaatggtaatcaaacacctcaatttatcatcaaagacattgctatagaccaattacaaattttagattatcgtagtaaacgtaaaaatatacaatttaaagaaactgaatcaaatgttgcctatgtcattcatccgaaacttaaaaaaagcaattcacattactatcattatggtgaggttattgatagaccttatgataaaatagtgtttagagatttacctaatactatggttgaaattgaacaaaccttagaacattcacaaatttctcaactatatttagttctgcagcatgaaaagtcaatatattttgaaggtatccctagcaagtcgctttttaaaaagtgttacaaagctttaataaacaaaaaagaaactgacttaattaaagaaggtatgctgctttgtgagtacttaaatattaagccagaaatattaacattcatgcttaaagtctttaaagaattggagtttatttacgacgaaaagggattgattaagataaatccagcgccaaataaacaagatatagaaaatagtcgtatttaccaaatgagacgagcacgtatggaagtagaagaacgtcttctctatgatgattttttaaatataaaagaatggataatatcaaagttaacatagctttcaggaggaaaaacaatggatttaaaacaatatgtttcagaagtaaaagattggccttcagcaggtgtaagctttaaggatataacaactataatggataatggtgaagcttatggatatgctacggatcaaattgttgaatacgcaaaggaaaaaaatatagatatagtagttggtcctgaagccagaggattcataatagggtgtccagttgcttactcaatggg

SEQ ID NO: 4109 - DNA, 3923 bp, Artificial Sequence
  Description of Artificial Sequence: synthetic nucleic acid sequence
gtatgacatactttgcttaaccaacaatcaaattgaagatataaatttttgatttggaaaagcttaatgttatgctatcaatactttagttatggtctctcatttagtattattttattgattcgttgttgataatttaataaaatgaacatcaatagttaatcattaaatctgatatttcacatttatttgtgagtaaagtaaaaataaagagaggtgagatgatgaataatataagagcaaaagtgatatttcgggtaatcgctatagcaatatagaggaaagtccatgctcacacaatctgagatgattgtagtgttcgtgcttgatgaaacaataaatcaaggcattaatttgacggcaatgaaataacctaagtcattggatatggttagaatagtttgaaagtgccacagtgacgtagcttttatagaaatataaaaggtggaacgcggtaaacccctcgagtgagcaatccaaattgggtaggagcacttgtttagcggaattcaacgtatagacgagacgatttttacgcgaaagtaaaaatatgtagacagatggttaccaccgacgtaccagtgtaactagtacacattatgagtacaacggaacagaacatggcttacagaaatatcatcactagtttagctctcccaattatggagagcttttttaattgaaatcataattgatttagaataatttattacaatatacactttacatttatggttttccgcttcaaaatcaaattaattaatacttataaatattaaaattatacatatattgattcaataaattaaaaggagactcggtcatgtttcaattattagcagtatgtccaatgggattagaagcagttgtagctaaagaaatacaagaattaggttacgatacacaagtagaaaacggtcgtatcttttttgaaggtgatgaaagtgctattgttagatgtaacttatggttacgtaccgcagaccgaataaaaattgtaatgggtcgattcaatgctactactttcgacgaattatttgagcaaacaaagtcattaccatgggagaccgtaattgacaaagaaggtaatttcccggttcaagggcggagtgtaaaatcaacattatatagtgtacctgactgccaagcaattactaaaaaggctatagtagaacgacttaagcatgctcatcaagaaaaaggatggctaagtgaaacaggcgccaaatatcctgtagaagtagcaatattaaaagataatgtattattgaccattgatactgctggttctggactcaacaagcgaggttatcgcattgctcaaggtgaagcacccattaaagaaacattggcagcaagcctcattcgtttagcaaattggaatggtaacacacctttaattgatcctttctgtggttcaggcaccattgctattgaagcatgtcttattgcacaaaatattgcacctggttttaatagggattttgtatctgaacaatggaatatgatgccacctaatatttatgacaaatttcgtgatgaagctgatcaattggctgactatgataaagacatacaagtatatgcttctgatattgatccagaaatgattgaaattgcaaaacgtaatgcagaagaagttggtctcggagatatcatacagttcaatgttaaagatgtgaatactttgtctattgataccgacaagcctgtagcacttgttggcaatccaccgtatggtgaaagaattggagatcgtgaagaagttgaagaaatgtatcgttatataggtacacttttgaaacaacatcctcatttatcggcctacatattaacaagtaacaaagaatttgaatacttagttaatcgaaaagcgactaaaagacgtaagttgttcaacgggtatattgaatgtacgtactatcagtattggggtaaaaagcaaagtaataaaaattaaattttacattttataatacttgtgtaattatagtaattattcaagtactatttattcgcactcttatcttgactgtagtacagttaaataggagtgtttaattttattaaaaaataagtcatatactaaaaatgtatcatattttaattagaaaggggcttttaaatatgaagactgttttgattgtaggcgcaaatggtagagtatctatcgaagcgacaaaaattttcctagagaactcaagatttaatgttgatttatttttgagaaatgcgcatcgtatacctgattacgcctctaatagaattaaagtttatgagggagacgctaaaaatattgaggatttagaaagtgctttaaacaatgttgatgttgtttttgcaagtttatcgggatcacttgataaacaagctgaaactatcgtaaaagccatggataacaaaaatgttaagagactgatttttgtagcagctcctggtatttatgatgaactaccagaaccattcaatcaatggaataaagaacaatttggcgaaaaattgaatcgctaccgcaaagcatctgatattatagaaaattcagatttagattacacaataatacgtccaggctggcttacagataaaaatgaaaatgtatatgagatcacagcaaagaacgaaacatttaaaggtactgaagtatcacgtaaaagtgtagcatctttagcagtacaaattgccaaaaacccagaactacactctaaagaaaatattggtgtgaataaacctaatacagaaggtaataaacctgcttggttcaattagtataaagtttgtatctacatgcatgggttttcaatcaatattatgatagaatttgaaatagataaataagcttaaatttagggcaagtcatcatggctgccttatttttttgaatttattgctaattatcataaaataaattgtacaatattacttaaattcaaacaggggattatctttcattcaattataaaaacaagatagaattcatttattatacttctaatatctttgatgaaagtcacaataatcatttagctacagatacttttcatttaaatttaatttacctttcaaataattttgaattctgattttgttactttaatcgagtaaaaatactgtgatttatcactgaactaaaggggtaatacttatggcaataaatgaacaattagatactttatataaattaaaaaaagaattggaaaaatctaataacagacctttaattaataccattaatcaagtaataaaaaaagtttatttaaatcaatacaccgcaacatttgtaggacatttctcagctggaaaatcaacgttaattaatttgttattagaacaagatatactaccaagttctccagtaccaacaacgagcaatacagctatcgtttcagtagccaaggaagacgaaatcattgccaatcttacgcaacaacaatatacaaaattaaaaacgtacaacgatgttaaacaaatgaatcgacaaaatgtcgatgtagaatcgatagaaattaattttccatcaaacaaatttaatctagggtttacatttcaagatacaccgggtgttgactctaacgttgcaacgcatcagtcgagtacagagcaatttatgtatacaagtaacttgttgttttatacagtagactataatcatgtccaatcagcgttgaactttaaatttatgaaacgtattaatgaagttggtataccaattatttttgtgattaatcagattgataaacataatgaagaagaaattacatttgaaacttttaaatcaagagtcgaaaaatcaatcaaagactgggatatcaaacttcaagatacttattacgtttcaaagtttgatcatccacagaatgaaattgacaaactttcaaattttctagtatttatggatcaacatcgtgaatcaacagaagactatg

SEQ ID NO: 4110 - DNA, 3645 bp, Artificial Sequence
  Description of Artificial Sequence: synthetic nucleic acid sequence
gttatctcgggtgttgtaatagagtctattacacttttaccaatattttttcctaaggaggattaacaaatatgaatttattaggtggcttacttttaaaaattttttcaaactttatggcagtaattggtaacgcatcaaaatacaacccttgtagtaattatctcgatgagccacaagtgccagaagaattaactaaactagatgagtagaattttgtagaaagagtgtattcaatgggtaaacttgactttttaccatttgcagctatacaagtgtttcttttggtttgggttacaaaaactattgctaatattaaatttgtaagaaaggattatattttcattactggaattataatcctttctgcaatattatataatgtttatgcaagccaagcacttgtacttgtagtaataatgattataattttcttctattcaaaagtaagatggtattctattgttatagtgttaatgagcactttgttgtcatatttaacaaattttattacagtagctatcagtttatatactgaaaatataatacataatatttatttttataatatctttcatttttcaatttttatcattttatctttaattttggcacatttatttaaacacttattaattaggtttaggtattcttatttatatttaagcaaaaggtattacattattatttcttttgtattagctattgcttttatatacttctatataatttcacaaactaatttacaagaaagtaatagcttgaacttttatgctattatttttgtttctattaccgtacttttgagtttggttatattattgttatcggctttcgcactacgtgaaatgaaatataaacgtaagctacaagaaatcgaagcatattatgagtacacgttacgtatagaaagcattaacaatgaaatgcgtaagttccggcatgattatgtgaatatcctcaccactctttcagattacattagagaagatgatatgcctggattacgtaaatattttaatgaaaatatcgttccaatgaaagataaattaaaaactcgctctattaaaatgaatggtattgaaaagttgaaagtgagagaaattaaagggctgattactactaaaattattcaagctcaagaaaaacgtattccaattagtattgaggttcctgatgaaattgatcgtatctctatgaatactgttgagcttagtcgtattatcggtattatagttgataatgctattgaagcttcagaaaatcttgaggaaccactcatcaatatcgcattcatcgataatgaggaatctgtcacttttatcgttatgaataaatgtagtgatgatatccctaaaattcatgagttgtttgaacaaggtttttctactaaaggtgataatcgcggtttaggtttatcaactttaaaagaactgacagactcaaacgagaatgttttattagatactgtcatcgaaaatggttactttgtacaaaaagtagaaataaataataaggaatcataaggatgtgtagaattaaatgaaaatttttgtttgtgaagatgaccaaagacaaagagaacatatggtatcaatcattaaaaactacataatgattgaagaaaagccaatggagttagctttagcaacaaatgatccttatgaggtcttagagcaatcaaaagaacttaatgacattggttgttacttccttgatattcaattagaagctgatatgaacggtattaaattagccagtgaaattcgtaaacatgatcctgttggtaatattatatttgtaaccagtcacagtgagctgacttatttgacgtttgtttataaagtggctgctatggattttatttttaaagatgatccatctgaattaaaaatgagaatcatagattgtctcgaaacagcacatacacgactcaaattattatcaaaagaaagtaatgtagatacgattgagttaaagcggggaagtaattcagtatacgttcaatatgatgatattatgttttttgaatcatctacgaaatctcataggctcattgcacatcttgataatcgacaaattgaattttatggaaatttaaaggaattagcacagcttgatgaacgtttctttagatgtcataacagttttgtgataaacaggcataatattgaatctattgactcaaaagaacgtattgtttactttaagaatggcgaaaattgtttcgcttcagtacgtaatgttaaaaaaatataatgaaacacccatctttacgatatgaaattgtaaagatgggtgtttgacttatttcttatattttaaatcaattatagtcttttatatcttcttttgttggcaaactttcaatagcaccatgtttcgttgttgtaagtgctgcgacacgattactaaacgctagtatatccttgcccttttccttaaataaatctttacattcagaatgccgagactcgagtatgcaataaataatagcacctataaatgcgtcaccagcaccagttgtatcaattgcttgtacttgatacccctcatgatgaatacgataatcatctttggtataaatagttgcaccttgcgctccttgtgtataaatcactacattaacttgacctctaaataaagattgaatcgcttcatcttcattcctcttaccagtaataaataataattcttcatcagatattttaacaatatgtgctttaggtatgaacgcatttattgtacgttgacattcgagtttatcttcccataaaggtaagcgtacattagggtcaaaaacaatagtaccatctactgactcgaatttttcaatcattttctcatgggcatatttcatgtcactctctattaaatctacagaacaaaaatgtaaaatatcgtcttggaatacttgaatatcatcaatattttcaggttgatataacatatctgcagaaggtttacgataaaatgagaaatctctttgaccatcatcttgaaggctgacaaatgccaatgcagtatttgctttattagttcgcttaatatattgcgtacctacgccaagttgttcaattgtttctacaatgatatcaccaaacgcgtcatttcctagttgtgttatcatttctgattttccacctaatttacttactgtagccgctacgttacacggtgcgccaccaacttgtcgactaaattgttcaacatcttttaattttgaatgcgttacatttggtatgaaatcaattaatgcctctccaatagcaaatagacgtctcattataaatcacccttttaattcatatttagtgaattttaaatatacttgaccagattcagtcgaagcttttatacctgtagcatcctcatttgggaaaatacgtgaggttaaaacacgctcaccatcattacagaatatttcgatactagatgtatccacaaaaatttgtaactgttttaatggtgaatctaaaatggtagaacgcgttgttccatcgacatttgatggtagtgtcccactatcggtacgttctaaagtgagtttattttcgtgtttattataagtaatcagtgtagattcagatcgagagctacgcaattcaaaatatatttctgaagcatcattttctaatatatcta

SEQ ID NO: 4111 - DNA, 3227 bp, Artificial Sequence
  Description of Artificial Sequence: synthetic nucleic acid sequence
tataaagaaaataatgtttcaaaagcagataaaccaaatgctaatacaagtgttaatatgactggagtaataaatactttccaattaattttagtgaataattcaggttgatattggtggaatccatctgtagttgctttttgaggattatgaattaataaaactgacataatgaatgcaacaacacctaatgttccagcaacacgtaaagctggtattattactggtttgccagatgcttacggacgtggacgtattatcggagactatcgtcgtgttgctttatacggtgtagatttcttaatggaacaaaaacttaaagactttaacacaatgtctactgaaatgtctgaagatgtaattcgtttacgtgaagaattatcagagcaatatcgttcacttcaagatttaaaagaattaggtcaaaaatatggatttgatattagccgtcctgctactaacttcaaagaagctgtgcaatggttatacttagcatatttagctgctatcaaagaacaaaatggtgcagcaatgagtttaggacgtacttcaacattcttagatatttatgctgaacgtgatttacaaaatggtgacatcactgaacaagaagttcaagaaatcattgaccacttcattatgaaattgcgtatcgttaaattcgcgcgtacgcctgaatataatgaattattctctggagatccaacttgggtaactgaatctatcggtggtgtaggtattgacggacgtccaatggtaactaaaaactcattccgtttcttacactcattagataatttaggtccagcaccagaaccaaacttaacagtgttatggtctactcgcttacctgaaaacttcaaaatctattgtgctaaaatgagtattaaaacgagctcaatccaatatgaaaatgatgacttaatgcgtgaaagctatggcgatgattatggtatcgcttgctgtgtatctgccatgaagattggtaaacaaatgcaattcttcggtgcacgtgctaacttagctaaagcattactttacgctatcaatggtggtaaagatgaaaaatctggtaaacaagttgggccaagttatgaaggtattaaatcagacgtactagattatgatgaagtcttcgaaagatatgaaaaaatgatggactggttagctggcgtatatatcaactcattaaatatcattcactatatgcatgataaatatagctatgaacgtcttgaaatggctttacatgatacagaaattattcgcacaatggcaactggtattgccggattgtctgtagcagctgactctttatcagcgattaaatatgcacaagttaaacctatccgtaacgaagaaggtcttgtaactgactttaaaatcgaaggcgacttccctaaatatggtaataatgacagtcgtgttgatgaaattgcagtagatttagttgaacgtttcatgactaaattacgtagccataaaacataccgtaattctgaacacacaatgagtgtattaacaattacttcaaacgttgtttatggtaagaaaactggtaacacaccagatggacgtaaagctggcgaaccatttgcacctggcgcaaacccaatgcatggtcgtgaccaaaaaggtgcattatcttcactaagttcagtagctaaaataccttacgattgctgtaaagatggtatctcaaatacatttagtatcgtaccgaaatcactaggtaaagaagaagcagatcaaaataaaaacttaactagtatgttagatggttatgcaatgcaacatggtcatcacctcaacattaacgtatttaatagagaaacattaattgatgcaatggaacatccagaagagtatccacaattaacgattcgtgtatctggatacgctgtaaacttcattaaattaacacgtgaacaacaattagatgttatttcacgtacattccacgaatctatgtaataaatttaaggtgggagcaaaatgcttaaaggacacttacactccgttgaaagtatgggcactgtcgacgggccaggacttagatatatattatttactcaaggttgtttgttaagatgtttatattgtcataatccagacacttggaagattaacgaaccatcaagagaagtgacggttgatgaaatggtaaatgaaatcttaccgtacaaaccttactttgaagcttcaggtggtggggtaacagtcagtggtggcgaaccattactacaaatgcctttcttggagcaattattcaaagaattaaaagcgaatggtgttcacacatgcattgatacttctgcgggatgaaggcgctgttgcaatgagttcaataccaaattctctttcaattctttcttgaataatctccatatgtaacattcctaaaaatccagttctgtatccaaaaccaagtgcttgtgaagactctggttcaaactctaaggatgcgtcattaagttgtaatttttctaaagcttctcttaggtcattatagtctttattgtcaatagggaatagaccacaaaataccattggattcatctttttatatccttgtaacggtttgtcagcaggtctttcagctaaagtaattgtgtcacctactctagaatcatcaacatttttgatacttgcgataatataacccacatcaccaactgttaattcttctaccggtagttgcttaggggtattgattccgacttctgtaacttcaaattctttaccggtagccatcattttaatcctatctccagctttaacaacaccatcaataattcgaattgaagatattactcctctgtatggatcatattctgaatcaaagataagtgctttaagtggggcttctggatcaccgtccggtgctggtacaacatcaactattttctctaaaatttcttcaatacctatatttgacttagcacttgcaagtactacatcttcttgatctatacctataacatcttctaattcttgcttaactctatcgggctcagctgcaggcaagtctattttattaacaactggcaaaagttccaaatcgttatctaatgctaaataaacgtttgctaaggtttgtgcttctataccttgggcagcatcaactacaagaattgcaccttcacatgcagctaatgagcgagaaacctcatatgtaaagtcgacatgtcctggtgtatctatcaaatgaaatgtgtaagtttctc

SEQ ID NO: 4112 - DNA, 3159 bp, Artificial Sequence
  Description of Artificial Sequence: synthetic nucleic acid sequence
tttttatttttatgtttttgtatgatagatgatgaatattggtgatcgattgtataattcattgcgtcaatagctgtattaccagtgatagctatatgtttggctaatttaccctcttttactaaattctgtgcagcattataggttggggcaaagtgcaaatctgccattaccccaaccatttgtctatttatttcttcaggataaggtgaatatttattataactccttaatccagcttcaacatgtcctataggtgtttgactataaaatgcggctaatgctccagaaaaggttgtcactgtatcaccatgaacaagtaccatatcaggcacttccttttgtatgatatcttctaactttttcattgcttcagatgttacttcagacaatgtttgaccagctttcataatattcaaatcataatctgcacttatgttaaaagtattcaacactgaatcaagcatctctctatgttgggcggtgactacaacaacgggttccaggtcagaatctttctctaacgttttaatcaacggagccatttttatagcttcaggcctagttccaaatatggtcataacttttttcatcaaaaatatctatctccgaatctattatttagtaccgaataatctatcccctgcatcacctaaacctggtgtaatatacgctttgtcatttaatttttcatctaatgccgcaatatatatatctacatctgggtgtgcttcttgcattttttcaacgccttcaggggcagctattaaacacataaaacgtatacttttagctccacgtttttttaatgaagaaattgcttcaatagctgaagcaccagtagcaagcataggatcaaccacaataatttgacgttcatcgatgtcttgaggcattttcgcaaagtactctaccgcttcaagagtctctggatctctatatagtcctatatgtcctaccctagcagcaggaacaagacttaacacaccatctgtcatgcctagaccagctcttaaaataggtacaattgctaactttttacccgccaaacgtttagctgtcattttagtcacaggtgtttgtatttcaacatcttgcagttctaagtctctagttacttcataagccattaacataccgacttcatctacaagttccctaaactcttttgttccagtgcgagcatctctaatataacttagtttgtgttgtattaatgggtgatcaaaaacatgtactttactcataatcattttcctccaatgtgtatgtctattaattatataatggatatttagatgtgagtgcgtgaactctctctttagcttcatttagtttagtatcattatcatagttatttaatgctaaactaataatttttgctacttccacaaatgcagattcatcaaaaccacgagttgtagctgctggtgttcctagtctaacaccacttgttacaaacggtttttctttatcaaatggaatagtattcttattacatgtaattcctactttatcaagtgtctcttcagctaatttaccagtcatattgatagaacctttaacatcaactgcaactaaatgattgtctgttccgccagatacaactctgaagccttcttcaattaatgtttgagctaaagcttgtgcatttttaatgacttgattttgataatctttaaaatcgtcgttcaatatggccattttctatttcaattcctgtaaaatttgaaatcatagagaatataccaaaaataatgattagttggaattttgaacgccatttgtcacgttcgctcatcattgttttaaaatgattaatattcatgagtatatatgcgagtaaaataattaatcccacgcgttcaagtaataaaataaataaattaagcataacgtcaatcctcatttaatttttaatatcataaaaagaaatatattttttattaaaaataaaagcacttacattggcttgtttcatatatttatagtttatattaaaacacgattaaatcaattatagtatggaaaattgaaactagatagtgtagaatatgtttctatatttacaaattttctaaaaattacaagaaattaaaaaagaaacatatctaggatgaatgaatattaaaatgataaacgatttagtcatatttttatttcagttaaaaaattgttctaaatatgataaagtttcttaatgtaaaaatgatattagaagaaagcaaataaaagatttgtaaaataagaaatggatatcgtaattaaataagtcttattagagatttctaattaattgtgaaggagtaagtgatagatgaatacatcacaaaagtttaggggagataatcgcttattattagggattattttaggggttattacattttggttatttgcacaatcacttgtaaatctagtcgtgccattacaatcatcatacaatagtgatattggtactattaatatagcagttagcttatcggcactattttctggtctgtttattgtaggtgcaggagatattgcagataaaattggtagagtaaaagtgacgtacataggcttagcacttaatattgttgggtcgattttaatcattattacgccattaccaagtctattgattattggacgtgctattcaaggattgtcagcggcatgtataatgccagcgacactcgcaatcattaatgaatattatatcgggacagcacgacaacgtgcattaagctactggtccatcggttcatggggaggtagtggtgtttgtactttgtttggtggtttaatggcaactaaccttggatggcgctcaatctttattgtttcaattattctgacaatattatccatgtttctcattaaacatacacccgaaacaaaagcagagcctataggagatcaaccgacagagacaaagaaatttgatgttgttggtttaatcatcttagtggttagtatgttaagtattaatgtgataataactcaaacctctcaatttggtttgttctcaccatttattttgggacttattgcaatttttgttatatcgttaattatattcgtgatttacgaaaataaaatcaaacaaccacttgtcgattttgatatctttaaaaacaaaggttatacaggtgcaacgatttcaaactttat

SEQ ID NO: 4113 - DNA, 3047 bp, Artificial Sequence
  Description of Artificial Sequence: synthetic nucleic acid sequence
atttcacgacatgtaaatgatattgcagaaataattcccgatattgaattcgatgaattcagacatcatcgtggcttaatataagaaaagtaacagctcaacgaactgaaaatcatcaaaaaaattataaaaaagacaatttctatattatttcaatagaaattgtctttattatttatcttggacctttttgtctcaggctccatttctataatattactattctatttttcattaatcacatttaaaaatcgctgaagctcttctgttttgggatgattaaatatatcttcaggcgtaccttgttctgcaataacaccctcatgaataaaagcaatttgattggaaacttctttggcaaaacgcatctcgtgagtcacaatgaccattgtcataccttcgtcagccaattcttttatgacttttaatacatcattgaccaattcaggatcaagcgcagatgttggctcatcaaataacatcactttaggattcatggctaatgcacgtgcaattgcgacacgttgttgttgccctcctgataaagcatgtggccgttgatctttaacatgtaccaatccaaccttagacaataaattcattgcttcttcattagccgttgctttattcatctttttaactgttataagaccttccataacgttttctaatgcagatttatgtggaaataaattataattttgaaaaaccattcctgattgttgtcttactttaatttgagatttcttatctttagcattatatgtcatgccattgacatacactgtaccttcagtaggtatctctaaagcattaatcattctaagtaaagtcgttttacctgaacctgaacgtccaattagtgtcacaacttcaccttgattaatattcaaatcaatacctttaatcacttcagtttcattaaaagacttatggatatgagacaattcaatcatgagcgataccctctttcaatgcgtgattcataccatccttggataattgagatgacaaaacatacgacccaatacattaaagctactaacaaataaatagttagatactcatacgttgtcgaagcaacttcttgtgcctttctaaacatctctgcaacaagaataaatccaagtaatgatgtatctttaattaaacttaaaaatgtgtttcctagtgctggtatagatacacgaatagcttgtggtaagataatacgttgcacagtttgtctatagttcatacctatagagtaagccgcttctgtttgtcctttaggaatagacaatataccacctcgtataatttcagaagcataagcaccaacatttaaagataaaccaatgactgcagcaataacaggtgcaagtgtccattgattatcagcattgttagttaccaatcttccaagctccggtataccgtaaaaaataataaataactgtacaatcataggtgtaccacgaataattgatacatagacacgcgcaatacctctaagcaatttactggttgatatacgcataagtgcagtaaacaatgcaatgattaaacctagaatgaaagtgaccaaagtaatagggattgagtatttcaccaatccctctaacattggaccaaatgcttgtttggctgcatctaatgcatgttgttgttcattattcaggtttagaaacatcttgaccaaaccatttcttaccaattttagctaattcaccattatctctaattttttctaggcctttattaaatttctcaatcgttttttcatcaaccttcttagagaatgcaaatgctgatttattttgctctgcatgtcctttgattgctttaattttagcattaggcttttgttttctgtaatctaagtaagataaactgtcgttaaatgtaccatctacacgtttagataatagtaagtccattgattgattaaatccatctaccttagtaacgtccgcacccttatctttagccaattgaccataattagacgtaaacgtttgtgctaactttttaccttttacatcattgaatgatgtaatatctttttcattttcacgaacaacaagtacagcacttgaatatgtgtaaggttcagagaatttatattttttctctctatctttattcacacccacttgatttgcaataacatcaaaacgaccagcatctaatcctgcaaacattgaatcccatgacgtttcattaaacttaagtttaagattttcttcttttgcaactgctttaatcacatcaatatcataacctgttaattgatcttttttattatggtaagtaaagggcgcatatgtaccttccgtaccaactcttaacgtatccttgtctttactgcttgattgattatctttattgttagatgaattgttgccacaggctgctaaaacaaaaacaagtgcaacaatgcaaagtaaaagtcttttcatttaatcaaaccccttattcttattattctaatcggaataaaaatattttatcccattattacataatagtcaataaagagttacttgctaacaagtgttcagaaagttcaaactctattaactattattttaaactatttacaaatcgtaataattactatttacaaataacttaatttctttcataatagtgttatacaaggaggaagataaaatgaaacagaatttacaaacagcaagacgcaacctcaatagtcctaacatcaaaacacgaaaacgtgctttaaaaataataaaacagcatcaacgttcgaaataaatgtaacattcgtcaattattttaatttaattcgctcaataacttaggtttcataaatttatctataatttaattgttttaaatatcacttcacgcaaaaaacaagccattcaatgaaatcaatactgaccattgaatggtttatttattatgatatgaaaatgttttaaactatatacatcttgttataaataatatttatccttaacaactaaatcatctgtgagttcatatactagcggtgcacccgttttaatttcatatccgacgatatcttcttctgataa

SEQ ID NO: 4114 - DNA, 3518 bp, Artificial Sequence
  Description of Artificial Sequence: synthetic nucleic acid sequence
ctctttacctatcttcgttaataaaatacttaactggtcgccttgatgtacattaggtttgattgcttccgataaatcattaacgttgagtgctgtaattccttgaacgtgacatactttatttaaattaaaatcagtcgtaatcacatgtgcatgatactgttgtgctaatttaattaataatgtatctatatcactatgggattgagttggatgtataacgcgtgtaggataatctaaatcataaagttgattcaaaatatctaatcctctttgacctttttcacgtttcacgctatctttagcatccgctataacctgtaattcatttataacgccttgtggtatcaatatatcaccatcgataaatccgcaacgtataatatctaatatccttccatcgataatggcacttgtatctacaatcttaggtgtcgctcttcgtatattattagacatggaacgtgccatattctctggtaaaaacataagcatttcatctctttttttcagaccaaattgaaaccctaaataacataaaataatagtgattatcataggtacaaagtgatttaatatggaattacctatcatttctaagataaaagaaaccatcactgaaataaataaaccaataattaaaccaattgtagcaaataatatttctaccgcactacgtctcatgattaattgttcaaattgtttaaaagcatatgttactttattaatgaacaatccaaatattataaaaaatataatgatccctatgaaaccatctacataataattagtgataaccgcatggtgatgaatgccaagatctgtaacaacttcgggtataattataacaccaagtgctgcaccaacaatgatatagattgctacaacaattgcttttgttatattcaatttatagcctccttccattgatgttatatcctagtatggcttaacaatatggcttatcgctgttttgaatgtaatgcatatttcaaagcttcatgtactgatgaaacaccaacgacttggatgccttctgggaatgtccaacctccaatatttgtctgtggaataatagctcttttaaaccctagtttggtcgcttcttgaacacgttgctctatgcgagatactctgcgtacttcacctgttaatccaacttcacccacaaaacaatctaatccatcaacagcttgatctttaaaacttgaagctgtcgcaacaataatgcttaaatcaacagcaggttctgttaatttgacgccacctgctactttaatataggcatcttgttgttggagtaaatagttttcctttttttctagaaccgccataagtaaacttaatcgattatgatctatacctgtagccattcgtctaggattattaaatgttgttggtgtaacaagcgcttggacttcaatgagtagtggtcttgttccttccatagtggggacgattgtagagcccggaacatttgtagaacgttcttctaaaaacatttcagaaggattaagtacaccttttaatccactttgcttcatttcgaaaatccccatctcatttgtagaaccaaatctattttttactgctctaaggatacgatatgcgtgatgctcatctccttcaaaataaagaactgtatcaaccatatgttccaataatcttggtccggcgatttgtccttcttttgttacgtgtcccacaataaatgtggcaatattcatttgtttagcaatgttcattaaactctgcgtactctctcttacttgtgataccgatccaggtgcggaactaatttccggatgatagattgtttgaatcgaatcaacaacaagtaagtcaggtctctcttcttttacagtttgatgtatcacttctaaatcagtttcagctaaaacattaagatgactagaatcttcttctaaacgatcagcgcgcaacttagtttgattaatagattcctcaccagtaatatataaaacattcttattttgtgacagcgcagcacaaatttgtagcaataaagtcgacttaccaatacctgggtctccacctattagtactaacgaaccacttacaatacctccacctaaaacacggttaaattcctttgattctgtaagtaatctaggggtagcttcatgcttaacactatttaacttttgtaccttacctgctgtttcttttgtttttacaccatgtttaggatgagcaaccttttctactatttcttccatttgattccacgcaccgcagttagggcacttgcccatccacttaggagattgatagccacatgccatacattcgaatattacttttttcttggccattgagacacctccgatttaatatgaacaaatctattttaaactgacaagttgaatctgacaaattaaaattaaataatgatgttgataacacttataagtctataaccctttcataatatttctataatgaacctataacattcatcatatgcttatctgtttaaacattctggcaattatactaatgatgattcagcaaaaatataagtaaaattttaaattgatttacctcattcattgtttattattatatatttaagtgattatcttagtatagaaaatgcctgagacaatgattgtcccaggcattttatttattggcaattgacaaccgagttgaacttgggctaatctcaattttcaactctagtcctcattaccaagtgagacagcgaattacttacgctttctatctcactcttcttaatttaatatttaacgttataattgtagtaactcaatatgcgaaattaaagttataataatttaattatgattctgttgtttcttttttagctgtaatttcataaatatcatacttaaattctttaccatcatgatcaattgttacttctttaccttcaattttatttccatctaaaatcaattcgcttaaattatcttcaaccgttttttgaattgctctaatgagtggtctagcaccatattcaggatcatatccttcttctgcaattttttctttcgctttatcagtaacaacaatattaatattttgctctgaaagacggtgagtaagtttatttaccatcattgtaacaatttcttttaattcatcttttgtaagtttgtggaagacaataatgtcatcaacacggtttaagaattctggtcggaatgaattttttaattctttcatcattgtttttctgacagtttcgtagtcactaccttctgaagcacctccaaaaccagcaaagcgttggtcctgtaattcttgagctcccacattagaagtcataataatcacagtattacggaagtccacagtacgacctttagtatctgttaaatgaccatcatctaaaacttgtagaagaatattaaatacgtcaggatgtgctttctcaatttcatcaaataaaatcacagagtatggtttacgtctaactttttcagtcaattgaccgccgtcatcatgtcctacatatcctggaggtgcac

SEQ ID NO: 4115 - DNA, 4231 bp, Artificial Sequence
  Description of Artificial Sequence: synthetic nucleic acid sequence
ggattatctaaaaaattcaacaaaggtgacctgaatgcaccagttattctaaatcaacaatatggtttaggtatggattattttgatgtaaataaagatatggcttttccttcacttgcctctgtggcatatagagcaataaatgaaaaagaacttatatcagaagagatgcgtttaatctatgttgcgttgacacgagcaaaagagcaacttattttagttggaagagtcaaagatgaaaagtcgttaattaaatatgaacaattagctgtttcagacacacatatagcagttaatgaacgccttactgctaccaatccatttgttctaatttatggtgttttggctaagcatcaatcgccttcattgccaaatgatcaaagatttgaaagagatattgatcaattaaattctgaagtgaagccacgtgtatcaatagtgattgatcattatgaggatgtttcaactgaagaagtagtcaatgataatgaaataagaacaatcgaagaattaaaggccataaatactggtaatgaagatgtgaaaattaaaattcatcaacagctttcttatgactatccttttaaagttaacacgatgaaaccatctaaacagtcggtatcagagttaaaacgtcaattagaaactgaagaaagtaatacaaattatgatagagtacgtcaatatcgtattggtgttgcatcatatgaaagacccaagtttcttacccaaacaaaaaaaagaaaagcaaatgaaatagggactttaatgcatacagtcatgcaacacttaccttttagagaacaacgtttaacaaaagacgaattatttcaatatatcgatcgattgattgacaaacaacttattgatgaagatgcaaaagaggatattagaatagatgagattatgcatttcattgatggccctctctatatggaaatagctcaagctgacaatgtttatactgaattaccttttgtggtaaatcaaattaaagttgatggacttacaagtgaagatgaagatgtatccattattcaaggtatgattgatttaatatatgaaagtgacggacaattttactttgttgattacaaaacagatgcttttaatagaagaaaaggtatgagtgatgaagaaatagggaatcagctcaaagaaaaatatcagatacaaatgacgtattatcgaaatactttagaaaccatacttaaacgacccgtaaagggttacttatattttttcaaatttggtacattagaaatagatgattaaaattcaaagttactttgataaagtgagaaacaataagccgtgttttcatcctaaccaagaaaacacggcttcactgtatatatgtctgttattaagcttacaaataaactttcttaattttcttacttatatatttgttatttgaacttagatatagttataatatgtaataagatatagatgaggagttgattatgaatgaaatttctatcattcaaacataatgacagaacttcatatggtgttaaagtaaaacgtgaagatgctgtttgggatttaccaatggtttttgctgagtttggggacaaagactttaatcctaaaactttaattgcaggtttacagcaaaatcaaactttagactttcaagagcaagttcgaaaagcagttgtcgcagcagaagaaagtggaagagatgaggaatttaaacttttattcactgatattgattttctaccaccagtgacacctccaaataatgtgattgcatttggtagaaattatgaagatcatgctagtgaattaaatcatgaagttgatagtttatacgtatttactaaagcggcttcatctttaactggtgatgaagcaacaattcctaatcataaagatattacagaacaattggactatgaaggcgaacttggaattgtaattggaaaatcaggcgaaaagattcctagaggattagctttagattatatttatggatacacaattatcaatgatattacagatcgtactgcgcaaagttcacatgatcaagcattcttatcaaaaagtttaactggggcatgtccaatgggcccttatatagtaaccaaagacgaattacctgcgccagagaatgtaaatatcgtaacaaaagtgaataacgaaattcgacaagatggcaacactggtgagatgattttaaaaatagatgaactcatcgaaaagatttcaaaatatgtggctttacatccaggcgatatcattgcaactggtacacccgctggtgtgggtgctggtttacaaccaccacaatttttacaaccaggtgatgaagtcaaagtaactatagataatattggcactttaacaacatatatatctaaaaattaagagttatacaattttttaaaaagttaaaggggggagtgtagtaaatatgttactccctaagccctaacttgctttgtctgtagaatttttagtgtaattctatgtgttgagcgttggaatttaatttgcttattttaaaatttctgttcaaaaacttgatattaatacatttttaattcagtcatcgaatgactattcgttaaaaaagtctgggatattatttgtattctagacttttttgaatacttatcaaaatatttattattttaattattgataaaaattgaagtaatggcatcatcaaatatttagaaatatgttatgatgatttagaaataaaaagatggggggacaaacatgttacatgtccatattttaagttgggtattagcaattattttatttatcgcaacttatttaaattattcaaaaacgcaaggtgcatcaccttattataaacctttgcatatggcattaagattattcatgctattaacattaatttctggtttttgggaattaatcgaagagtttatggctgcctctaatggtgaaggtggaaatcatatgctacttactttaaaaatgttatgtggtttagctgttatcgcttttatggaaatttccattgctaaaagaaaaaaacaacagactagccataaattcttttggattactattattttaatcataataacaatggctattggtgttattttaccttggggtccaatttccaaaatatttggaataagttaaaaatgcttggatacaataacgtatgatttatatttattgaagtatgaacatcatattattcctaaataaaacatactaagattagctatgaagaaatctatgacgatagattttttcatagctattttttatagttatagagagaagtagactgtccagactcttggattttaaatccgtataaaaaacaagtcagctttactctcgccttttgaaattcgtttgtagtatgttgggttcttgaaaccgtgtataggaaaatgaaatgagaaaggttaagtaaagtttttagcttctcaattattcaaaggaggtttttttatcgattacttaggtgttgatattagtaaaagaagtagtgtagttgcacattataaaaatggaaaattctaaaaagagtttttcatccaaaataataaaaatggttacaattatttactcaagtatttgaatgacttagaccacccacaactcatttttgaatctacaggtatctattcaagaggtatggaacgattttgttgtgtaaatcaaattaactatattcaaatgaatccgttagaagccaaatttaaaacgagcgctctaagatcatggaaaactgatcaggcagatgctcataagcttgcttgtttaggaccgacgcttaaacaaacagacaacttacctatacatgagttaatattctttgaattaagagaacgcgtccgttttcatctagaaatcgagaatgaacaaaatcgacttaaatttcagatccttgaattactccatcaaacattccctggtttagaaagattgtttagtagtcgatattcaatcattgcactcaacatcgcagaaatctttactcatccagacatggttcttgatatcgacaaggaggtactgattacacatatattcaattctacagataagggaatgtcaatggataaagctacaaaatatgcacttcaattaagggtgattgctcaagaaagctatcctaatgtcgatagacattcctttctagtcgaaaaattacgcttacttattcaacaattaaaacaatctattcatcatctcaaacaattagatgatgccatgattc

SEQ ID NO: 4116 - DNA, 3660 bp, Artificial Sequence
  Description of Artificial Sequence: synthetic nucleic acid sequence
gaaatctgcatttttaacatgtaaatcagtatgacatacaccacaatattcagtctttactaatgcttctccaggtcttaattctcttaaacgtttttcttcaatacttactctatgatctttggttactacagctgctttcataaaaagccctccctagtattaaagtgtaattctattacttccacccttattttacactcttttgaaatcgttttccaaaagtcctttcatttatactgaattttttgtaaattgtatatagagcgacataatatcgtcacttttatagcatattttatgatttattcatatattttattttttaactatatatatatatcatgtcagtgaaaagtcatcgctcttaatcacaccttataattttggggatgaaggtgtttattttaaaaatcttaattggaggggataaaagtgaagacgcaagttttgtacggaaaatctgaaattgaaatcaatgtgcctgatgatagcacaatcatagagcctcaaaacatcgacgctattcaagattatgaatcaacaattaaaaatgtattaagaaaccccacaaattctaaacctttaaaagaaatggtaaacagtaatgatattgtttctattgttattagtgatattacacgtccaacgcccaaccatattcttgtacctttactaattgaggaattaaatcatgttcctcgtgagaatttcgtaattattaatggtacagggactcatcgagatcaaacgcgagatgaattgattcaaatgttaggtgaagatattgtaaattcagtaaaaatcgttcacaatcattgctcagaaaaagaaagtctagctaaagtgggacacagtcaatatggatgtgatgtttatttaaacaaagcatatgtagaatccgattttaaaattgtaacaggttttattgaaccacactttttcgccggattttcaggtggacctaaagggataatgcctggaattgcaggtttagaaacaattcaaacatttcataatgcaaaaatgattggcgatccgagatcaacgtggggaaatttagaagacaatccagttcaagatatggcacgggaagttaaccgtatgtgtaaacctgactttttacttaatgttgcattgaataaaagtaaagaaattactgcagcatttgctggtgaaatcttagatacacacaaagaaggatgcgcatatgtaaaagatcatgcaatgtttaaatgtgagcaacgctttgatattgttatcgcatcaaattctggctatcctttagatcaaaatttatatcaaacagttaaagggatgagtgcagcgagtaaagttgttaaaaaagacggtcatattattatggtatctgagtgtgcagatggctttcctgatcatggtaagtttgccgaaattttcaaaatggcagacacacctcaaggtattttagaacttattcacaatccaaactttaaggaagttgaccaatggcaagtacaaaaacaagcaagtattcaaacttttgccaatgtgcatgtttattcagaacttactgaccaacaacttaaagactcgatgttaatcccaacctctaacattgaacatacaatacaagaattagaacatcgatatggccgtaaattaaccattggtgttatgccacaaggtcctttaacaataccgtacgtagaagataaagaataataaatggaggatggaaactatgactgaattaaatactaaagaaatgaaattagacgcactattgaaagacatgcagagtgtagtaattgccttctcaggtggagtagatagtagcttgttactgaaaaaagcgattgatattttaggtgttaactatgttaaacctgttgtagtaaaatcagaattatttagaaatgaagagtttgaactagcgcttaaacttggacaaagtctaggtgttgaagtattagaaactgaaatgtctgaacttcaagatgcgaatatcgttaaaaatacgcctgaaagttggtactatagcaagcgcttgatgtatagtcaacttgagaatattaagaataaactaggatttaattatgtgctagatggtatgattatggatgacttagatgattttcgtcccggattaaaagcaagagacgactttggtgttcgtagcgttttacaagaagcaaaactatataaatctgaagttagagaattaagtcatcaacatgacttgcctgtatggaataaaccagccttatgtagtctagcatcaagaataccttatggtgaggaattaagttttacaaaagttaacaaggtcaacgaagcagaaaaattcattttaagcctaggtattaaccacgtacgagtacgctatcatcacaacatagcacgcattgaagtaacagaagatcaattaaataatcttcttaaattgaaagacagtatcatattacatttgaaagaattaggatttgactatgtaacaatggatttagaaggctatcgtacaggtagtatgaatgaaatcattgataccaaatctacaagttttaaataaggatgtgagtacctatgagccatagttataattctatagaagaggtgctcaaagctgtaaaatcaaatcaactatctattaatgatgctaaagcccaactcagtcattatgacgaattgggctttgctaaaattgacttacatagagcacagcgtcaaggatttcccgaagttatctttgggcaaggaaaaacaaaagaacaaatcactaaaatcatctctagtttgatatttcataatgaagttattctagtgacacgtgttgatgaaatgaaagcaaaatacattttacaacattatccaaacttggaatatcatcaaactgcacagttaattagcactccactaaaagatataccacaatctaaatactatgtttctgtactttgtgctggaacttctgatttacctattgcagaagaagctgcattaaccgctgaaatcatgggagtaagtgtaaaacgattttatgatgtcggggtttcaggtattcatcgcttattatccaacattcatgatatacgcagagggaaagtttctatcgttatagctggaatggaaggcgctttagcaagtgttgttggaggattagtcaaccaccctgtatatgcagtaccaacgagtgtaggttatggagcaaacttgaatggggttaccaccctattatcaatgataaatagttgcgcacccggaaccagcgtattaaatatcaataatggatttggtggcggttacaacgctgcacagattattcatatgctagaaaataaagagagtgaggtatctttatgacaaaagcattatatttagattgccacgcaggtattgccggagatatgctactttctgctttagttgatttaggagcaaaccctgaagacattgaatcagaactaaaaaaattacctttagatcaatttaagctacattttcaaaaaagagtaaaacaaggtattcatgcaatgacattaaacattgatgttaaagaagcaaatcatcatcgtcacgttaatgatatatttaaaatgatagatgacagtacacttccggaaagggttaaatatcgcagtaagaaaatttttgaaatcattggtcaagcagaagctaaaa

SEQ ID NO: 4117 - DNA, 3167 bp, Artificial Sequence
  Description of Artificial Sequence: synthetic nucleic acid sequence
catgtcagtgttcgcttaacttgctagcatgatgctaatttcgtggcatggcgaaaatccgtagatctgaagagacctgcggttctttttatatagagcgtaaatacactcaataccttttaaagtattctttgctgtattgatactttgataccttgtctttcttactttaatatgacggtgatcttgctcaatgaggttattcagatatttcgatgtacaatggcagtcaggtttaagtttaaaagctttaattactttaaccattgctaccttcgttgaaggtgcctgatctgtaattaccttttgaggtttaccaaattgtttaatgagacgtttgataaacgcatatgctgaatgattatctcgttgcttacgcaaccaaatatctaatgtatgtccctctgcatcaatggcacgatataaatagctccattttccttttattttgatgtacgtctcatcaatacgccatttgtaataagcttttttatgctttttcttccaaatttgatataaaattggggcatattcttgaacccaacggtagaccgttgaatgatgaacgtttacaccacgtccccttaatatttcagatatatcacgataactcaatgcatatcttagatagtagccaacggctacagtgataacatccttgttaaattgtttatatctgaaatagttcatacagaagactcctttttgttaaaattatactataaattcaactttgcaacagaaccagaagaactaatcgaagataaaggaaaaaataaaagacgaaataaaacaataaaaaacggtattttaatctttaaagttactaaaaaaactctgactcttatgaaattagaggaaattaatacaatagataaaaatgatttttctaaaaaaccaacttatggggctgaaaaaaattattttaaaattgctgttatggattttcaaaaagagagtacaaagagactagacattgatatatatgatactggaactaagatagcaaaatattggagcgaaggatttttatcaatttatccgttgagagataatgaattaaatactaatgatattattaactctttaaaagaaaatactctgttcaatgaattacctaatataacagaaaaagatcttaatcaatctactaatgactttctaagtgataatagagaattttcatttgtaaaattaagagatcatattaatcagcgctttgaaacagacttcaaaaatgatgaactatttaaagatgacaaattaaatcatatagacgcagaatttaatttagaaccaaggattgtaggtaaatatttacagaaaaaaataaaaattaatgatgtaatcagtttagatattaataatattagtaaagcaacaaaaggaggcctaatgaaagtgtctaatgataaaagatacttaaaaatacgtctcgaaacaaatattaaagaagaccttcccgatattcaggaaggagattgataaatgagttattattggtattatgaaattttaaaatttgataatgatttaaataattatttctctaatgaagacttaaaagttttttcttctaaatgtctttcaaatgaagaagaagatgaattatatttacaaggatcaaaaatatttattgatgacgactctaaaattaaacattcagaaagtattaaagatgtgtatgagtactattatgaaaaattcaggaaattagaaaattctaaatctgatttttttatatttaaggacagtaaaaagttatttgaaaaaattgaagtacctattaaacataatacgatacgaggagaatatattgaagatattactgtcagaaatataaatagcaatattttgcaaattaatccttattttttcaatgaaatgctggaagtatataaagaatatgaaaaagaatgcagtaatataaggaagttgcgtaatttacaatctgcaatcattttatctgataaaatttcatttgataacgatatcatgacattatactttcatgattcagataatgaagaagataagttccaaaagaacaagtttgatttttcaaacgctaatgtatcttcattatatttttatgtttttgattgggtagatattgaaaacgacaatctagaaatagtggatttaaaatataaagtagcaaaaatttatttatctaaattcgaaaaggtttctgatgacgaaaaaataaagaaaaaagaaatacatcatgacttaaatgttatgtataatttaatacttcaaaaaaaatctcaaaagtattatgaatataacaaagtaataaggaatcataaaatagaaatcattcaacgaaaaatagaattaaaaaatgaacttaataaaaaattaatgagcatgatggtattcattcccgtaactatttatggtttatatataacaatccaaaagagcaaagaatcactaaacattttcaataatgactttaatattatttatttcagttctctagttgcacttatatttataatattatctttaataaatgatgtgaaatctattaatagtgactatgaaacaattattttagaaatcataaatacatataaaataaacaaaagtatggacgattttggaaataatataagtttaagtgattttaaattttctttattttggatttttataatgattataactcttataatttttattttaattaagtgagaatccatttattttttaaaatttggaaaggttaatttaaggtttccatttataaagaaatcaaatgaaaaagattctgatctacatgtttaacaaagttttgttgcaaaattagaaaaaatatggttaattatcattttaatatgttagtatttctgaactgctcaacgtatgactgacttcatgacacgacgagaatccttaaatctaaaggtacctacggtgctttttgtatagtccataattatattcaatccctttgggtgtattccttgctatattgatactttatttcgataaatatctcatcaatacgccatttataatagacttttttattctttttccaaagagttgaatattcttaaacccaactatagatcgttaaatgatgaacgttaataccatgttctcttactatgtaagatacatcatgataactcagtacgtatcttacatagtag

SEQ ID NO: 4118 - DNA, 3181 bp, Artificial Sequence
  Description of Artificial Sequence: synthetic nucleic acid sequence
tagtaaacaccgcccaaaggttgtgtagaataccctctaaaatcagtgaaataaaatccgcctttactgtcaaaaaccatgtcatcaatacaatattctgtatttaaatcagaaataatttcttctatttgttcacctttttctgttgtcgcaaatatgcctccagttgtcttaaaatcacctagataacagataaataaacgaccatctttatgtactttaatcgctgccggattatctttaacagactgaaattttgttgtaacctcttttgttgcgggattaactttaaaaatattcccttcaaacacgtctaataagaataactgaccttcgcgattaaaattaagtccttctagttgtaaccctttatctgaaattttcacccacggctctgctgttaccgtttgcaattcactttctgacacaattggcactgcactttctgatttaccagtatattttaatgttggtaatttttgatttgccatcgattgaatccctctctttattcagtgactttattctcattttataaaaatttatattaaatgtcattatagctacacgactacacttttattcatatatgaaaaccaccacatcttatatcggtcaaatgacggatttataggctatcttattgaaagcaattctcattttgatacaatattaaaatgtctaatttttaaacttcaatcactatcatttttttatataacttcaaatacttttaaattaactaaaattgactaaagaggagcacagatttatggattatagagtactactttattataaatatgtaactatagatgaccctgaaacttttgcagccgaacatttgaaattttgtaaggaacatcatttaaaaggaagaatactagtttcaacggaaggcattaatggaacattatctggaacaaaagaagatactgataaatatatagagcatatgcatgcagatagtcgttttgctgatttaacttttaaaattgatgaagctgaaagtcatgcgtttaaaaagatgcacgtgcgtccaagacgtgaaattgttgcacttgacttagaagaagatattaatccacgtgaaattaccggtaaatactattctcctaaagaatttaaagccgcactagaagatgaaaatactgttatattagatgctcgaaatgattatgaatacgatttaggacatttccgtggagctattcgtcctgatataacacgattccgtgacttacctgaatgggtgcgtaataataaagaacaactcgacggaaaaaatattgtcacatattgtacaggtggcattcgttgtgaaaaattttctggttggttagtaaaagaaggatttgaaaacgtaggtcagttgcatggtggtattgctacatacggtaaagaccctgaaactaaagggctatattgggatggtaagatgtatgtatttgatgaacgtattagtgtcgatgtgaatcaaattgataaaacagtcatcggcaaagagcattttgatggtacaccttgtgaacgttatattaattgtgcaaaccctgaatgtaataaacaaattcttgtttctgaagaaaatgaagaaaaatatttaggtgcatgttcgtatgattgtgcaaaacatgagcgcaatcgctacgttgcccgtcatcatattagcaatgaagaatggcaacgtcgtttaaataatttcaaagatgtgcctgaacacacacatgcataattcaaacacgcctttattgtgagtttaacatttcacatataaaggcgtattttatatgatttaaatatctataataacttttaaccctgttttttgacataaagaatacgcaaaatggcatatgttgatatcatttatatcactgatagttttaaaataaataatataataagtctacttaaggagtgtttgcatggaaatattagtcacagcatttgaaccatttggagatgaaaaaattaattctgcatgatacaaggggttataagaaatccacttgcttcacctgatgttattggaataacaaaaggggcaagtttagcagcagtaatgatcataatgatatttccatcagcacctctatttgttcttcctttaggttcatttatcggtgctttgacaataagtattattctttcagttcttatttcaaaatttgatgtaaagggatcaaaattagcattgataggtttagcgataggtgcaatttgtacggccattgtccaattcttgcttatacgtaatcctcttgatgcaaataatgcgttattatggttgactggtagtttatacggtcataatatagtcaatttttatagtttattaccatggtttattatcactgtacctatagtattgttattagggtatcaacttgatattttaaatttaggtgatcatgtagccattgcactaggagcacgtgtaaaaatcttaaaaatgattttacttgtattagcagtaatgttagcaggtgcttccattgcggtagtagggggtattagttttttaggtcttatagcacctcatattgcacgtcaacttgtcggccataaaaatatacatgttataatcatgtcaggtttggtaggagcaatattattaacttttggtgatggtttagcaagaggtatacaacctcctcttgatattcctgtatgaataagtgctagtaaggtcgcacttatgataacaagtggtgctatcatgataattgtaaattgccaccgatgaaaacaagtctgagagaactgtacaataattttgtttttatcatattttaaagatggtttttcacctttagaaaatataatgaacaaaatacgatgaataaactcgtgcaaaataactagtactgcgaaacctacaaatccaaaaataagattcatgacaagattttgttcaatgatatgcgttgtttgataagcccatttataagtaaatagtattgtaaatagcgccaatacaatttgcaacagaacaaatcgttggatttgaaatttgttgcctgataaatctattttatgcacattcacccctccagttctctattttcaaaaacagtatacaatttttattatagctaaaaaagacctttttcaataaagtaagttgcttgtaatacaatcttaacaatcacttcaaaataacaatgaattgacttct

SEQ ID NO: 4119 - DNA, 3221 bp, Artificial Sequence
  Description of Artificial Sequence: synthetic nucleic acid sequence
tatttatcaattatatcatcggcttcatacagataagcttgaacgactgtacccacatttttaaattcacctttcaatctatcaattatatgttgaattttagaaagactatcgtacttctctgtatcaatattaatatgcatcttcccattcttatcagctttaagtaaaatttctctcatgttttcataagcaagatttaaatcaaactcacttccaagttgacttatcttgactgacatatgtgccttaacattattgctatatattgcatcgataatttctaaaatctcttctttagctttaatgctttcttctctagtattaacaaattcacccaatgagtcgacagtaactgaaatattataatcatttaaatattgtatagtctcaattaattgatgaatcgtatttcctgcgactacacgatttgctcccatttgaggtcccatctttttagctattttattaagatatgtatgattagataacgcaatgaaaaaatctttaaataaggacatatgcaatacctccgttatactagactatgatattttttaaatagtgtatcatgaaaattaagtttaagaaagcgtttacataaagagcatgaacacttaaagtgtatttttacttttagatgtatttgaagagttaaagaaaatatttaaatatctatcaaatttcacttaaaatagcattcattatgtttggtttgctataattatattaataaagaacatataaaaaggggcaattagaaaatgtggaagtgggaaacagaaaatgacgcaaaaggcgttgttgtcattgctcataatattttagaacatacaggtagatatgcatatgttatcacgatgttaagacgaaatggttatcacgttatcatgggcgatttaccgggacaagggcaaacttcacgagctcaaaagggacaaatagatgattttaatacgtatcatgaaaatatattagagtggataaaaatagctaatgaatataaaattccaacatttgttttaggtgtgggactaggtggtctcatcattttaaatctgcttgagaaaacagaattacctattgagggtatcttgttattttcacctatgttagaactaaagagagactataaagggcgcaaaaataaattgatttctaatgttggtaaaatttctaaagatactagatttaaagttggtataactcctcaagatttaacacgtaatgatgaaattattgaagaaacagcaaatgatggactaatgcttaaaaaggtaacatatagttggtataaccttataaatgaaaagatgaaagaaacaatggatcatatcagagatattaaacctatttcagcattgataatgtatggtaccaatgataaaatttttcaacaattcattttgtatgattagggtgtaccctaaatatataattgagtttaaaataaaaaacagtaaattaagatggaaatttcatatccttgctttccttatcactataaatatttgtaaaaaaggtgatttttttatatacgatattttattattgaattataaaaaaatatatgcgataggtgttactataattaaactcaatacagttctctcaaaccatataaccactaaatctcttatgcggatgggtatatcagtagagagaatactaggcacactagctgaaaagaatataattgtagaaacagaagtaacagcaattataaatttagtgattaatggtgcttcgactacaattaatgaaggcaaaaacatttctgttataccaatagctgcgccttttgcagttaaaaaggaatctggtatttgaagtatccaagttaatggataaaaaacatatgctaaataatcgaaaatcactgtatattctgcgagtaacaagcaaattaaacctattgataatatggtgggtaagatattcatagtcataatcagactttctttgaaattcaaccaaatatttttcatcacgttaggtgatgattcaacagtttccattgctttttcccatgcaaaaagtagctttttttaaccttttaattcgcttgtatcttcttctataaatggctgatcataatatgtgttgctaattttactgataggccaaatcctaactgtacaagctgttactgcagcagtaacaaacaaggtagaccaaaaatataaattccatatatccattaagtgtaaggttttagcaataactatcataaaagctacagtaactgtagaaaagccggttgctatgataacagcttgtttttccgtgaatttaccttctttatactctttattcgttataagtaaacccacagcaaaactagcaacaaaagatgctaaagcattaactgctgaacgtccaggcgttttccatatcgggtacataattttttgcgcataaacacctacaaattctaataagccatatcctactaataaagctaataccgcgcctcctgcaggtactgttaatcctaccggaattaccaaatagttaaaaacatacattcccgtttgttcattaagtaaccaacttggcccaatgttaaaaattaacaaaacgcctataatgactcccaaaactttaaataaactaaaaattgtttcaacggtattccgattccatgtccctttaataaatggataaatagcacctagtataatgataatcattatgaatatcttagttaaaagaggtaatgcgctacttatccatgtgacaaaatgatctaataaaattgaagagttattattaatcgttaccggcacaaaaaatatagcaattcctataagactatatacaaaaaacggttctgttgcaaagtaaaaaatatagctaaccactaatttatcatgtcagtgttcgcttaacttgctagcatgatgctaatttcgtggcatggcgaaaatccgtagatctgaagagacctgcggttctttttatatagagcgtaaatacattcaataccttttaaagtattctttgctgtattgatactttgataccttgtctttcttactttaatatgacggtgatcttgctcaatgaggttattcagatatttcgatgtacaatggcagtcaggtttaagtttaaaagctttaattactttagccattgctaccttcgttgaaggtgcctgatctgtaattaccttttgaggtttaccaaattgtttaatgagacgtttaataaacgca

SEQ ID NO: 4120 - DNA, 2929 bp, Artificial Sequence
  Description of Artificial Sequence: synthetic nucleic acid sequence
acatcgagtctttaagttgttggtcagtaagttctgaataaacatgcacattggcaaaagtttgaatacttgcttgtttttgtacttgccattggtcaacttccttaaagtttggattgtgaataagttctaaaataccttgaggtgtgtctgccattttgaaaatttcggcaaacttaccatgatcaggaaagccatctgcacactcagataccataataatatgaccgtcttttttaacaactttactcgctgcactcatccctttaactgtttgatataaattttgatctaaaggatagccagaatttgatgcgataacaatatcaaagcgttgctcacatttaaacattgcatgatcttttacatatgcgcatccttctttgtgtgtatctaagatttcaccagcaaatgctgcagtaatttctttacttttattcaatgcaacattaagtaaaaagtcaggtttacacatacggttaacttcccgtgccatatcttgaactggattgtcttctaaatttccccacgttgatctcggatcgccaatcatttttgcattatgaaatgtttgaattgtttctaaacctgcaattccaggcattatccctttaggtccacctgaaaatccggcgaaaaagtgtggttcaataaaacctgttacaattttaaaatcggattctacatatgctttgtttaaataaacatcacatccatattgactgtgtcccactttagctagactttctttttctgagcaatgattgtgaacgatttttactgaatttacaatatcttcacctaacatttgaatcaattcatctcgcgtttgatctcgatgagtccctgtaccattaataattacgaaattctcacgaggaacatgatttaattcctcaattagtaaaggtacaagaatatggttgggcgttggacgtgtaatatcactaataacaatagaaacaatatcattactgtttaccatttcttttaaaggtttagaatttgtggggtttcttaatacatttttaattgttgattcataatcttgaatagcgtcgatgttttgaggctctatgattgtgctatcatcaggcacattgatttcaatttcagattttccgtacaaaacttgcgtcttcacttttatcccctccaattaagatttttaaaataaacaccttcatccccaaaattataaggtgtgattaagagcgatgacttttcactgacatgatatatatatatagttaaaaaataaaatatatgaataaatcataaaatatgctataaaagtgacgatattatgtcgctctatatacaatttacaaaaaattcagtataaatgaaaggacttttggaaaacgatttcaaaagagtgtaaaataagggtggaagtaatagaattacactttaatactagggagggctttttatgaaagcagctgtagtaaccaaagatcatagagtaagtattgaagaaaaacgtttaagagaattaagacctggagaagcattagtaaagactgaatattgtggtgtatgtcatactgatttacatgttaaaaatgcagatttcggtgacgtaacaggtgtaacattaggacatgaaggaattggacgtgtcattaaaattgctgataacgtagattcattaaaggtaggggatcgtgtatctatagcatggatgtatgcagcatgtggtaattgtgagtattgcacaactggtagagaaacattatgcagggatgtccttaatgccggatatactgttgatggggcaatggctgaagaagtcattgttgatgcgaattatgcagttaaagttcccgaaaatcttgatccagcggctgcttcatctattacctgtgcaggtgtgacaacatataaagcagtaaaagtgagtggtatcgaaccaggacaatggttaggcgtatttggtgtgggaggattaggtaatttagcattgcaatacgccaaaaacgtaatgggcgcgaaagtcgttgcatttgacattaatgatgataaattaaattttgctaaagagcttggtgctgatgcaatcataaattcaactaatgttgatcctattgaggaagttaatcgtctaacgaataataaaggattagatgcaacggtgattactgctgtagctaaaacaccttttaatcaagcagttgatgttgttaaggcgggtgcacgtgtggtagcagtaggacttccagtagataaaatggatttagatattccacgtttagtgcttgatggaattgaagtcgttggttcattagttggtaccagacaagatttaagagaagcatttcaatttgctgccgaaaataaagttattcctaaaatccaattaagacaattatctgaaattaacgatatttttgatgaaatggaaaaaggaacaattacgggtcgaatggtaattgatatgaaaagcacgcactgaaagtgaacataaaagataatataatatttagaaattaaactatcttttgatttgtgaatgtaaaaaaggaagggctaattatgcgatttaaattaaaagaagatgaaattttagaatttttagatttaaattttccacaacaaacatttgaaaaaggtcgtctccttattgggcaaaataagagacaaccattacacgtttattattttggaaaaaaattcttggctcttttaaatgtaaattttaacacttttgaatatattaaagtagatgaagtcgattataatgatataaaaaaatcactttaaaagacggactgctttttaaaaaaatgtttattgagacagaggattttatgtttaactatagtacatctaaagctcttttaagtgattttcaaaataataattttaattactttattcaaaataaaaaagagcgtgttatatttgaagatgggcatttcctcta

SEQ ID NO: 4121 - DNA, 3266 bp, Artificial Sequence
  Description of Artificial Sequence: synthetic nucleic acid sequence
tatcgtatgctataccagcttggtctcttgaattggcgctcaaaccaatcaaccgttcattcaacggatctttacccatcaataaatcgtacaatgccattccagagatcaataatgttttaccattttttctgctcattgatatataggcttttgtaaatcttttgtacccatgtctgtcgtaccaaccatttaagctaccagcaatgaatttttgaaaaccgcctaacgataattgtttaccagttttaggatctggcaacatttcaagaaacttaataatgtgattagctttctttacatcaaaatgataagggagttccgaatcgttcaagtcatctaaatggcgttgacaggctttcacgttttttttactagctataatatcgccattaactactttttttgcatattctgtaacataatccctaatctttgccattcattaagtcctcaaattcatctttcttttctttctttgtatctggcgacaatatttttaaacgtgactcaactgtcaatcctaatttaggacaaatggagttcatagcatttacgctatctctttgtactgtgtaataactagataatttcgttcctctttcggtttcgacgatcataccctctttttctaattggatcgtggcgttcttgtaattgctatatgtttgacaataggtggctaataaccccatatctaaagctgctattggtagttcttgaatcaaaggtaatatgcgatgccattcttttattgcatctttatcaagccattcaggaggtttttcatctatctcagtgagttgcgccatcgctttttctgcattttctttattttcttgttgttcgactgttaaattacctttttgttgagataataattttcttggcggcattttcgtcctcctttctaagtcatttaatgtaaagtaaaaaggctttacgaatatttaagatttcatttagaaatttattgaaagttaagtgcggctcgtttaatcgttaaataaataaagtatggggattatcgaagccccgcaaaaaaataatttaaaaaaataaaactctaaaaaaattatccaccgtgaattttattatggcagctaaaacacactgcctctaaattatccatatccagtcttttcgaccagtcccgttttaattcaatcttatggtgaacaatcaaatctttgtcattcactattcctttacttaaacaatgttgacacaagtagttatcacgtaataatacttgtttacgcaacttacgccactgtgtactgttgtagaacgctgtatactctctattgtgcctattgtgtctaacctcttggttatacctttgtgtattggctttcctatagtcttgtagctcgctttgactataagttctatttcctaatctaacttttggaactttgaaattactcaaattcatttcaacttctttcaattaacttttgttctttcatttcttaaaaaagaaactcaaatcaatttaagaataaaagaaaagacaaaatgaaataagaaattataatctcaaatcattttgtctttaactttagaaattgttaaacaacaaataatattaacaacaaacaaactttaatttttatttattatttaatgtttctattaatctcttaaactaatgaaaccttttgatatataaatgaatgtttattgttatgtatttcacacactaaagtgatgacctaaaagtatgtgaccttaaatagtaacaccttcaaaccccaccttaaataagtagtgtcctttaatatgtgcgtccttattctgtgggtagttaagataggtgcatacaaaaagacacgctacaaaagtaacgtgcctcaagaatatagtgttggatcacatacctactgaataacaactccactcttaaagatgttatacagttttcctatgcgtatattatataatgtattagcgttaaactcataatatagttcgatacgttcgattggttcgattagttcgatgtgtatcctaatcgtaatatcctttctgtgcatccatatatacgtttactatttcatttaaacaaccatagaatgttgatttactttttatttccattaagtccataacagttttaagtttcgtacctaacttaatcatctgcaatatatgaaagttcatctcgttagttatgtactcctcatacttgtcaataaactcaatcttctctatgagttttaaattacgtctccacgctttatttctattcataaccttcaaaaacactttatcgcctgcttgtcctttagccttaggcataacagattctataccatattgtgcaatagatgtactgtctgcatcgtaaatttgtgatgttataatattggtcatccacttatagttatatatcatttctttcacttcttctcgtgtatacaagtgattacctccgttagttattatattcagttacgtctatatcatcattaactaattcattcacagatatttctagtctcttagcagttagtaatgcagtattcacattcagacattttctactattctccatatctgacaaatatgattgacttatatccatcttatctgccatctcttgttgagtgagtttcattcttcttctaatagcttttaagttctcgccgaatgtcattgtttttacctccattacttattattgatcaaaaggtgtgcgttccactttgataatttctatggcttgttcttctgtaaaaccttgttgtcttaaacttgttaatctctcgtgctgatattcagatttcatcttagcaacttcaagtattaaaggtaacattgatttcaattcatacatttggttttgaatattaataccttcttttttactaccgtcaagattaaatatattatccattacattacctccattacttaaactgtttctttgctctttgtatttcaaactccacatcttctatatcgcaatctctcacgtacttagtaaacagatacacattcgtatatctctgtgcgtctaactcctgacgtaacactgtattgttacctattgctatgagtagaagtatgccgagtataatggttaatgctatccacatcacttatgttcccccttactctttatacatatacatactagatacataactggaataatcactatccaccaagtcatttaaatacctctttccataattcatttaaatgaacgtgatccttctcgtcgaagtccttaggtacttccacctcatcgtttgcag

SEQ ID NO: 4122 - DNA, 2579 bp, Artificial Sequence
  Description of Artificial Sequence: synthetic nucleic acid sequence
aatcactgcaaaatggtaaaccttatcgtgaaacatcaacaattgatgtaccacaagcagccaatcaatttaagtattttgctagtgttttaacaactgacgaaggttcagttaatgaaattgatcaaaatacaatgagtttagttgttaatgaacctgttggggttgttggtgcagtagtagcatggaatttcccaattttattagcttcatggaaattaggaccggctttagcagcaggtaacacagtagtaattcaaccatcatcatctacgcctttatcattaattgaacttgctaaaattttccaagaagttcttcctaaaggagtagttaatgtcttaactggtaaagggtctgaatcaggagacgctattttccatcatgaaggtgtagataagttatcatttacaggttctactgacgtgggttacggtgtagcacaagcaggtgctgaacgtatcgttcctacaacattagaactaggtggtaaaagtgctaatattatctttgatgatgctaatttagagcaagtgattgaaggtgttcaacttggtatattatttaaccaaggtgaagtatgtagtgcaggttcaagattattagtacaatcatctatttacgatgaattgttgccaaaattgaaagaagcatttgaaaatattaaagttggcgatccatttgatgaagatactaaaatgagtgcgcaaactggaccagaacaattagataaaattgaaagttatataaaaattgctgaagaagatgacaaagcgaacatcttaactggtggtcatcgaatcacagataacggcttagacaaaggttacttctttgagcctacaattattgagattaacgataacaagcatcaacttgctcaagaagaaatcttcggtccagttgtagtagttgaaaaattcgatgatgagcaagaagctatcgaaattgcaaatgattctgagtatggtttagctggaggtatcttcactacagatattcatcgtgcattaaatgtagctaaagctatgagaacaggtcgtatttggattaatacttataatcaaattcctgctggtgcgccattcggaggatataaaaaatcaggtattgggcgcgaagtatataaagatgctatcaaaaactatcaacaagttaaaaatatctttattgatacaagcaaccaaactaaaggtttatattaataaaacgagacactttacaggatgcatgcgtatgcgtgcgtcctgttttttgttgaaattttacttcaattaaaagccgaaaatatttttgattattacactaaaatttatttatctggtgaaaaataataaattaatattcgcatttatattttgtatggtacaatcattttaaatatgaaaatgttgtgagagattttatgaatctagaaaaaagttatattgaacaacaagtaacaaatcgtggaaaatctactgctgtatcttaagtactttggttctttttaggaggatttggagcacacagaatttaacatggtaaagtaggaagtggagttggattattagtcttaacattattaactgtttggtttacttttggaattcctactttaatttgggctattattgatgcttttttaattccaaactgggttaaagaagatgaagatagaatacgtcagcaagctttaagcgaaataaaattaatgaaaaataaataaaattataaaaacctgagacattgagtgcaacgcaaagttagattaaattctaacattgtgaggtatagtacacatcaatcttgtctcaggttttcttaatatatagacaaaccattagaaaatacacctgccatatatcaaacactttcaccccccataaagacgaagtacatgttgaaattcaacggacaaggcaagttggggttcggggccccgacaaagagaatttcaccgagaaattctacgggcaaggcaagttgtcggtaacttggataacttattcaaaataaggtgtgtattcaactacgataagttatcatccttattttgtttcgttaccatgaattgtaatgtcaaagccttcaggtgaggtaacatgagtagtatttgcattaggttgatatatgtcaaagtgacataaaccataagtttgttcattttgagttctaatcttatttgactgccaagtatttgtagctatatgatgatgatacttttgagtggacataaatagtgcttgtgggaaattagatatatgttcgaaccctaacttttcaacataaaattcataagcagattctaaattgtgtgttttgagatgtaaatgcccgatttttccttcttccggccaactttgccaaccttcatttgaccgttgagtcattaaatcattgacatcaacttccaatgtatccattttgacaaaaccgtctcgccacaaccagtcttctgaagggcgatcatgatagacttcaataccattgccttcaggatcagtgaaatatagcgcttcactgacaaggtgatctccaccacccattgcgatgttgagattgttagcatgataaaggaagtctgctaaatcgctacg

SEQ ID NO: 4123 - DNA, 2954 bp, Artificial Sequence
  Description of Artificial Sequence: synthetic nucleic acid sequence
gctttttaccaaagtcgagtaaaacgacgcttaaatcggaacctgttgatacatatggtgtttttgtagaaaccgtttgaacttcatctctaggtaattcagcagttttcaactgttcaacaagttcctgaatgttatctttattatctgtaaatccagctcttaaaacaccataatttctaattttacgagtaatacttctagtatctacccccgatataccaggaatatgatattgagcaagtgtttcgtgtaaagttttttggtgtctaaagttactagggtgtgtacttgcttcctttactactaccccatttaatttaggtgttaatgattcaaaatcatcgcgattaataccatagtttccaattagtgggtacgtaaaagttatgatttgacctgtgtaagacgggtcagagattgtttcttggtaccccgtcatagcagtgttgaatacaatttcgcctatagataagtcatctgaccctaagcgatatccttcgtaataagagccatcttccagtacaagataacgtttttcaagcatctacttttcctcctcgaatactacttcacctttaagcattgttagtgttggatttccataaactttttcaccaataaatggagtgttatcagctttagataagaaatcttcacttttgatttctttttcagtattaagatcaattattgttaaatcagcgtaactatctttgtgtaattttccataatttaagttgaaaatagtagctggtttaatagtgaaataatcaactaattgttgcagtgaccaattacctcgtcttacaaagtgtgtataaagtaatgggaatgctgtttcactacctacgatgccgaaaggtgcttttgtcataggttgtgctttttcttctttagcgtgaggtgcatgatccgttgcaatacaatcaattgttccatctaataagccttctaaaagtgcttctctatcttcattacttcttaatggtggattcattttgtagtttgaatcatcgccaggaacatcattttcagttaataataaatgatgtggtgtaacttctgctgttacatggataccagcttttttagcgtctctgattactcgaacactttccttagttgaaacatgacacacatgatagtgacaaccagttgcttcagccaataatacatctctagcaatttgtacagattcagcaatatttggaataccaggtatgcctaattcttcactacgtttacctttatgcattgcaccaccatagattaagctattatcttcacagtgtgcgacaatcggttttttaacttttgcagcttgcttcatagcagcatacatcatacttgctgtttgaactcccacaccatcgtcagtaaatgcaaacacaccttctagtgctaatttttcaaaatcaacaagttcagtacctgcttgtctcttagtaatagcagcataaggcaacaccctaacttgtgctgtttcagaaattcgttgtcttaattctctaacatgttcaactgtatctggtacaggtcttgtattaggcataggacatactgtagtaaaaccacctcttgcagcggcttttgtaccactttcaattgtttctttatgttcaccacctggttcacgtaggtgcacatgaacatctacaaaaccgggagcaattaaatttccttttgcatcaataacttcaatatttgaagatgaagcattaattttactactaatttgtttaatacgtttaccgtcgattaaaatttctgtgtcttttaggataccgttttttaagatttttccgtttttaattaatttcatgtagaattaacccctttctattgtaaaagcgcacttattactgccattcttaaatacattccattttccatctgcttaaatattcgagacttaggtgcttcaactagctcgcttttaatttcaacacctctatttacaggagctggatgcattacaatggcttcctcttttaatttatcatatctagcctgtgttaaaccaaattgttgatgatattcttcagcagcaaagttagcttcacctgaaattccatgtctttcatgttgaactctaagcaacataacaatatctactttatcaatgacttcatcaatttcaacataaggcgcctctaatgtattatctacccattcttttggacttgagaacattacgttggcacctaatgatgttaaactatgataattacttcttgcgacacgagaatttttaatgtccccacatattagaatattcaaaccttcaaacgaaccatattcttcatatattgtcattatgtctaataaactctgagtaggatgttgtccacttccatcacctgcattagcaattggaatatttaattgatccagttcttcgtaataagaattttgggagtgacgtatgacaagtaaatcaacacctatactttcaagtgttttacatgtgtcataaagtgactcacccttttttacagatgatgtacttgtttcaaaattaataagttttaatcctaatttttgttctgccatctcaaagctacactttgttcgcgttgaattttcgaagaataagtttgatacgtattgaccgttaaattgaggtaatggtcgctcaccagatttgaattggcaagcgatagtaattaaatcataaatttctgaattagataaatgctccattgataataagtgttccataaagcgcctcctatagaaataaagcttaatttatttggtttttatcttttggcaaaattaaatttaatattattcctgaaagtgctgataatgccattccttcaatttgtaaattgatacctatgccttttaaattgataagaagattaccaatcccgacaacaagcacaactgatgctataaccaagttgcgattgcttgcgaaatctacttgactttcaacaagcatt

SEQ ID NO: 4124 - DNA, 3861 bp, Artificial Sequence
  Description of Artificial Sequence: synthetic nucleic acid sequence
ccaatgtgctctaaatcttatcgtatcaaaggatttaaaaaattataaaaaggaagacagattatgcaagattttagcaatttagttgaagaagttgaaaacacacttattccttactttagaaaaattgaaaagcgtgcattatttaatcaggaaaaggtcttaaatgcttttcaccatgttaaagctagcgaaagtgatttacaggggtctacgggttatggatatgatgattttgggagagaccatttagaacaaatttatgcgcacacatttaaagcagatgacgcacttgtaagacctcaaattatttcaggtactcatgctattactttagctttacaaagtacgttaaaaaacaatgatgaactactttatattacaggtagtccatatgatacacttctagaagtcattggtataaatggcaatggtgttgaaagtcttaaagaatatggtgttcgctataatgaagtcgaattacgtgacggtcgaattgatattcctaaagtcatcactgcaattaatgacaatacaaaagttgtagcaattcaacgatcaaaaggatatgatcaacgtccatcaattacaattaatgaaattgaacaagcaataacatctattaaagaggtttatcccaatatcattatttttgttgataattgttatggagaatttgtagaagataaagaaccgattgaagtaggtgctgatttaatcgccggatcattaattaaaaatccaggtggaggtttagctaaaattggaggatatattgctggtagacaagacttaattgaacgctgtggttatcgtttaacagcaccaggcattggtaaggaagcaggagcctcacttaattctttacaagaaatgtatcaaggattctttctagcgccacatgtggttagccaaagtttaaaaggtgcactgtttactagtttgttattagaaaaaataaacatgaagacctcccctaaatataatgtttatcgtacagacttaattcaaacggttcaatttgagaccaaagagcaaatgatttcattttgccaaagtatacaacacgcttcaccaattaacgcacattttagtccagaacctagctatatgcctggatacgaagatgatgtcatcatggctgcaggtacatttattcagggctcgtctattgaattatccgcagacggacctatacgtccgccttatgaagcatatgttcaaggtggtttaacttatgaacatgtcaaattagctgttacacgtgcggtgcaacatatgcaagaaaacaatttactataatttttaagagattgagatcaaagtataaaaggttgggctcaatataagaatatagaataaaagcattctcgtataattcattaaaacatcaaggaaatatgatataaatgataacgatgttataaggagtttgttttagataagattttcgactccccaaaagtaataggtatagagagaatggaccatgttctagccttattcttagagttgttacgcctaagataaaagtttttaagcttagttatactttgaaaagcaatctctttttatttcaaacattataaaatgtctgaaaattataaaaaattttgtgtcataagccattttcatttctaattttaattaattactaataactaaacattgatataataaggtttagagggtttatgtcagaaaaccttacataattttgtaattaaagtaaaactatgctaaattaataacaagttcaaaagtagaggagaggttcaagtaatgtctaatgattcaatcagacgaaacatggccgttttctctatgagtgtggttagtaaattgacagatttatcaccaagacaaattcgttactatgaaacacatgaacttgtgatgcctgaaagaacagatggaaataagagattattttctatgaacgatttagagaggttgttagaaataaagtctcttatcgaaaagggatttaatattagaggtattaaacaaattatattcgatgagcaagggcatttaactactgatgaacaagagacaagaaagagaatgattgttgacgcaacgcagaaaccacgtagtgaaacattaccaataaatcgcggcgatttatctcgatttattaaatgaaattggaggatttataccatgccaaaacgtagttttacaaaagatgatattcgtaaatttgctgaagaagaaaacgtaagatatttaagattacaattcactgatattttagggactattaaaaatgttgaagttccagtaagtcaattagaaaaagtattagataatgaaatgatgtttgatggttcatctattgaaggtttcgttcgtatcgaagaatcagatatgtatttacatcctgatttagatacttgggttatcttcccttggactgctggacaaggaaaagttgcacgactaatctgtgatgtatttaaaacagatggtacaccatttgaaggtgatccacgagctaacttgaagcgtgtattaagaagaatggaagatatgggctttactgattttaatctagggcctgaaccagaatttttcttatttaaattagacgaaaaaggcgaacctacattagaattaaacgatgatggtggttatttcgatttagctcctacagatttaggtgaaaattgtcgccgtgacatcgttttagaattagaagatatgggctttgacattgaagcaagccaccatgaagtagcgccaggtcaacatgaaattgactttaaatatgcagatgccgttacagcatgtgataatatccaaacatttaaactagttgttaaaacaattgcacgtaagcataatttacatgcaacatttatgccaaaaccattatttggtgtaaacggtagtggtatgcacttcaacgtatcactatttaaaggaaaagagaatgcgttctttgatcctgaaggtgatttacaattgactgatactgcatatcaatttacagctggtgtccttaaaaacgctagaggattcactgcagtatgtaatccaattgtcaactcatataaacgtcttgtaccaggttacgaagcaccatgttatattgcatggagtggtaaaaaccgttcacctttagtacgtgttccaacatctagaggtctatcaactcgtattgaagtacgctcagttgaccctgcagctaacccgtacatggcattagcagcaatcttagaagcagggttagatggaattgagaataaacttgaggttccagaacctgtaaaccaaaatatctacgaaatgaatcgtgaagaacgagaagcggttggtatccaagacttaccttcaactttaatgagttacgctggtgaaattgttccattatcagaaatgttcttccatgaaatgccggaacttggaaaagatgaacaagaggtattacaaggagaacaagtgccagaactaatgaaccatttatatggtaaattagaatctttagaatcgtttgaggcaactgaaattaagaaaatgattaaagaagttcaaaaagaaactggtattaaaggtaaacaattatttatgcctattcgtgttgctgttactggacaaatgcatggtcctgaattacctaacacaattgaagtattaggcaaagataaagtattgtcacgcttaaaaaaccttgtttaaataaatattaagtcataaagtgtttacgacttgaaattttacaagtgacaacatatgattataaatataaagtgattcaaaggattagtagttaaatgtttatgtgtcagagagtgtgcggtagctgtgagcacatcataaatattaatgaatgcacctttgttaataaaaataaat

SEQ ID NO: 4125 - DNA, 3361 bp, Artificial Sequence
  Description of Artificial Sequence: synthetic nucleic acid sequence
ccaacatactaaatttgcctaactgtatatttttcatactcaagtgtcaaataaatggtgtgatattatttggttcaaccacatttctcctaatatttaagagttgcacgcatacatattaacaaaaatattttctccaactttgaatagaaaatattctgttcattttatgtattcacataatcgtgaaatcatttatgactttgatcaattttcaaatcgcctagtcctagcgctcatcattgtatactcagttatgtcgttgtgtcccgttctaacatttgctttttagtaataatggggtactttttgaaaacaatagaccctacaataccagcaatagttcctataatcgccataaccacaccatagataatcactttcgttaaactattaaaaccaaacatcactaaaaaacctgcaataggtgtagcagtgccagttgcattattaatcatacctgaccaagcaattataataccggcaattgccccaccaaagaaattagtgacataaataggaataggattagcggaaacaatatcagcttgagaaagcggttcgattccgactgaaatggttgatttacggtctcccaatttcaaacgatggaacaatgcactattcataaacgcggaactaaatgcggccatggcacctatggccataggcgcacccgttaaaccaagcaatgcagtgagagccattgaacttaatggagcagtacctactactgtaataatacctcccaatacaattcccataatcaacggattagtgtcagtactactttgtataatatccccaattttaattaacgtgttattaaccactggcgtcaatccagtagcaattaacctagctataggtgcgagaagaatgattgaaccaattaaatcaataccatctggcacatatttctcggtatacttcatcatgtagcctacaatatacccagcgaaaaatcctggcaacaagtccatacctccacaagctgcaccaataactagtgcataaactggagatactccaatcgctaatgcagttaatccagccgcagccacaccacctaaacctccagcagcatctcctaattcttctaagaatttaataccaaatacttgtccacccacatatttattgaaagcttcaactaaaaacgaagcaattgccgcattcgctaaagcacccatcgctttcatcccactaggtgccttatatgtaaatagagtaaaaacaactaaaactaaaattaaaaataatgtacctataagcaaatccatatcaaacactccccataacacttataattttctgattttttagaaaacaactataaaatacatagtaccaaaaaaatatacctttgaggagaattttttaaaaaatagaaaatatttattaaattaaataaagttaaatagtaaaacattgtaacaagcttcaacttactctaccaatggagacttttattagaattcctcaaattaatcctccacgacatattaatgaaatgattgaaacgatacacaatcgtgattttgatgaattcagttctctaaaaagaacaatttaaatttttaataaatcaatcataaatatcaccttttttcaaagcaagatttgtatttgcgagttcttccataaattgtgagtcatttaaaacatcgaatggtttattaccttcgcctattaaaaatctaaaatgagtaatattcataaattcaaatattaatttaaattggtggactaaaggttgtgctttaatacgtggactgtcaccgcctatgattaaaattaagtactttttttgtgacataatttctttgaagttatctatttgcgtatctcgcaatgattcagtccatctatcaataaagagttttaaagacgcactcatggaataccaatagagaggcgttgagaaaattataatatctgattttaaaactttatttaaaatttttttataatcatcattatgaatgctagtttcattgctatgacgattatcattaaccttttcaatgttactttggtataaatttataaactttccatcaattagaacattttattattatcaataggttttaaaaatccaaagttaagtagttgaactagacctaaaaagacataaataaaaaatcaagatcatgctaagtgagtttatatctgttgaagatagtaaaatctatattaaagaattaaaaaatatataattattcaatactagttatgacaatttaaacaaaaaaattttaaatggtgtattattataagggtaagttaaaattatgataacagaaattatcacttcaattttcaatagtatattaaagcaagaagaaatttatttaaataataatattgaacaattaagtgagttcagaaaagacattatcctaaaatgaaaaccaattaaaattatttgccaatcataacagtatccaatctcttaaagatataagataaataaaagagatttacacatgataactattcattaatgaaagttaattcatcaattaaggtggtggttctatcgaacaatatctaatacaccatagaaaaatgaatataaaaggtaatatatattaaggagaaagctaatggaagaaaaatttaataatagccaagaagaaagacagtttcaacaatttcaagaataccaaaaacgtcaagaagaagagaaaaagaaaaaacgcaaaaagggttggcttttcggttgtggtggttgtttagttttattaatattaattattgttggtgtaactgcgtgtactggaacttttgtgaatgaagttgataaagaaataaatgaagaaggtaaacttgacaaagacaaagatacaaaaatcaaatctataggtgagactactgaaatagatggagtgtcattcacattagataatgcttcttatactgaagaaagaaacgaatttgcagatgttcaagccgataaagtcataaaggtagatatgactgttaaaaacaattctaaagaagaaattccagtaggtggagatataaaagtatacgtagatggaaaacaagctaaatcttatcctattgataatcaattaatagattcattatcaccaaacagagaaattagtggatctgaaggttttgcaataaatggtaatccaaaaaaaatcgaattagaatttcaacctttaacatcattctctaacaaacgttatatttataatattaaaccagaataatataggtattcacctgccctattttttcctttctctaggttgagagattaaaaagtttgaaatatgaaataatttattagttatacgatcttttatgaggagaatatatatgaaaagattattaggtactt

SEQ ID NO: 4126 - DNA, 4130 bp, Artificial Sequence
  Description of Artificial Sequence: synthetic nucleic acid sequence
catgacaccgaccgattgaatacctggaagtactgtaaagtattgccagatatctctttcaagaccttcctcacgaatcacttcacgtaaaatcgcatctgattcacgaacaatttcaagcttatcttcagtaatttctccaagtacacggatacctaatccaggtcctgggaacggctgtctccaaactaagtgttcaggtatacctaattctattcctaatgcgcgcacttcatctttgaataatgtattgattggttcaataagttcaaattccatgtcttcaggtaatccacctacattatggtgagatttaattgtttgagctgtcttagtacctgattcaatcacatccgtatataacgtaccttgagctaagaaatctacatctgttaatttcgcagcttcgtcatcaaagacatatacaaactcattaccaatgattttacgtttacgttctggatcagacacaccttttagtttactcatgaagcgttcttgagcattaacacgaataatattcatagatagtgcatctacatcaaagagtgtaagtgagtcaaacagcgccagtacatcggtaagtggctcaacaagtacaagcatttcagattcatcaagcacgtccacatcaatgagtacatctgaaactttcacttctcaatctcctataaatagtgaaagtcaatttattggtgatagcttgtctgaagatacaatcgtgactcaatcaaaaaatacgaatatgcttaataaaactggaaaagattatgatttacaagaacaaagaggttatactgattcagaacaacacaatgaaacacaaagtaatcaagctgataatcactcaaacaacctcgatttacttcatcaaaatcgtttacaagataaagtcgttaaacaaccgactaaaggagaagatggagttgtaagcaacggttttatagtagcagtagcaatagtattggctatcttcggtttggcaaaaaaatctagaaaagacgatgatgatcaagatggtagtaaataacagatagttttaatcatattaagaggctagggaacaataattgattggataagtacatgacaactaaatccaactttagattatccttagcctctttagatatgattcaagtgattaattatttaataattagggtgaaaaaatgtttaagaaattcgaatataaaatcttatataaaagaatattttttacatgcttaattttagttatatatattataggaagtaatatttcaatcgtaagtaatgaaaatttaagaactcataaagactccttttttaagttagctattactaatgtaggtggggatttacatacattaaatatattttcactaggacttgggccgtggttaagttcgatgattattttgacactaataaaccacaaaagtaatgataaggttaaaacacaaactcgtagggaacgacatttcaaagagcgagcgttaacacttatcattagtgctgctcaaggattttacattattcattcatatattaataaacatgcgattaaagatagtaatatgctcattttattattagtcttaattacaggaacgttgttaatggtgtggttagcagatcaaaatacaacgtatggcatttcgggacctatgccaattgttttaatgagtcttgttaaatctatatttaatacacattttcccaaattaaattcaagcgcatctttaattactatgattattgtcttattagtgctggccttatttatactcttcttcattgagttaacagaatatcggatagaatataatgatattatgaatatttctgctaaagatataccatcatatttatcatggaaacttaatcctgctggtagtatctctatcatggtcagtttgtcattatttatgttaacgaataatatcgttaatttcataggacgctttatcgtgaatcataattttgaaacacatgtctttaattttacaaatccagttggaattactatatatcttctgttacaaatgattttgggttactttttatcaagattattaattaatacgaaacgtaaatcaaaggaatttcttaaaaatgggaattacttcgagggtatacaacctggacagcagacagaaaaatttctagggagtaaagcacgtcgtatttgttggttcggttcaatagtagtagcgattgtacttgctataccaatgtattcagcgctgcttgtcccccacttacttaaagaagtttactttacaactcaaatgattgtatttgtctatattggaattaatatcgctgaaacaattagagcgtacttatactttgacagctataagcaaattttaaataaatattggtagggaggaggttttggaatatgaaacgatttataccagcttggtatagccgtaacagatggtgggaaagtacctcaagaccattctatctaaaaaaacagtatacagattttgacgatatgattagtttaatgacaatgcatagttcgaataatgtggattatcaattgatagttttaaattttagtccatatcttagaacattcctccatcgatatgatttgtatgaaagtcattattggtctgtatttgatgagatacagggcgttggacatcaaacgcctcaagctattgattatcgcgatctttcatggccagaaggcactgaatttatttttactccctttcaaattcaagcgattacaggtgataacacgttttctaaaattcacttcagccaagaggggtacctgatgtgggtagaggattacaagtatagtacaattcaaagacgatttgtattcgatgacagaggatttatatcggcagtgcgtacttatacacctgatggtgataacaataaaaaacactatttttcaaaagatggggaagaaatatttgttgaagacttaaatgttaatacagtaacgattaataaaaatttccaatcaaaatttaaaagggttacgtattcatctatggctgagttgatagaagagaaattccaatcatatgtagaaagagaattgaatgaagatgattctgttatagtggcatctgatgaacgtcataattcaatgatggcacgcactattgatgcatcgtctttatgtttttctatttttactgagagaaataaagtggtgacacaagatttatatgactctatttctagagcatattattgtctcgttgatacacaagctaatcaaaatatgattgaacactacgcaggattgaacatgaatgatattaatcttttaagggtaacgccttttgatgcgaagtcattacctaaccaaagtagtcaattgtatgacacttatattggattatggatagatggtttggacgagattgaaatacgagagattgtaaacagcttatttcaatatattcaacataaagatggctataagttgaaaattttaactaagagtagagataatcttacggaaaatcttatagatgaagtttagtaaccttgaacagtttgacgtaatacaataggctgtaatataccatgttgttgaattgatgaagctaaatcattgagtcgttcttcttcaaacgtcttacgtggctgataaggattaggtctaattaattctagtgcaataaattgcacactatcatcattattcattttcaatctctgatcatctgtatatgccatctcttttccacatctttctatcttaatttaagtatctctaatgaataatcaatcctcattgattcattacttattttaaaaaagttcaatccaataatacaagactttcaaattaatactaatggcttaatatgaagcttattacgtcacatattttcagatgtatttctgataataaattaattgttaaatcaaaatcttcagaaaaatcattgacaaataaattcaaactatgtaatctatgtattaacaatttaaaaaacattttacacactgtaaaaaggaaagtaaaacttacactgcttatacagagagtcttcacacgctgagagaaggcattgaaagaaagtttgaaaatggccttggagtgttgatgccaatatgaggtatcaacgggttcgcccgttatagcgatacagtattaa

SEQ ID NO: 4127 - DNA, 4116 bp, Artificial Sequence
  Description of Artificial Sequence: synthetic nucleic acid sequence
attactagtcatacaccttactattcaacgctgtctctctctaatactggttttaagtattgaccagtgtaagaccctttattttgagcaatctcttcaggtgtaccagttgcgatgattgttcctccaccttcaccgccttctggacctaaatcaataatatgatcagccgttttaataacatcaagattgtgttcgataataacgaccgtatcaccattttccactatacgattcaatacctttaataaacgacttatatcgtcgacatgtaatcctgtagttggttcatcaagaatataaatagaacgccccgttgaacgtttgtgcaattctgatgcgagttttacacgttgcgcttcgccaccagataatgtagtagcttgttgacctaaagtaatgtaccccaacccaacatctacaagtgtttgtaatttacgtttaatcttaggaatattttcaaagaaatgcgtagcttcttcaacagtcatttctaatacatccgcaatatttttacctttgtatgttacctctaaagtctcacgattatagcgtttaccatcacatacttcacaaggtacatagacatctggtaaaaaatgcatttcaatttttataattccatcacctttacaagcttcacatcgtccacctttgacattaaaactaaatctacctttttgataacctcgtattttagcttcattcgtttgtgcaaagacatctcttatgtcatcaaagacaccagtgtatgtggctgggttagaacgtggtgttctacctattggcgattgatcaatatcaatgattttatctaattgatcaattcctttaatttcatcaaaattcccaggtttcactttagatttattaattttttgagctaatgctttatataaaatttcattgacgagtgaacttttaccagaacctgacacacctgtaacaacagttaagacagatagtgggaagtctacatttacatttttcaaattattacttttagcacctttaatttgaatctttctatcggtgatttctcgtctgtattcagggacttcaattcgtttttttccacttaaatattgaccagttaaggattttttatctttcattactttattaggggtaccacttgagacaacctctccaccgtggttaccagctcccggacccacatcaactaaataatcagctgctctcatagtatcatcgtcatgttcaacgacaataagtgtattacctaaatcacgcatttcttttaaagtattaattaatctataattcaatgttagctttaataaataaatctactttttgtggcgtttccttttggttttggtttggatgaatatagtcaatgtcgtcctgcttttcaaattgattttcaaagaggaattgacgacgatgttctagtgcatttctgagcttgtcatcgatgttagcagtcgagggttcttttggaacttctaacatgatgaaattaatatctctattatgaacttcttgtgataaaaggtttaattgtttttctattgcctctaaagttaaggacattctttcatcatgattggggctttcttttgcgattaagtaaattaaaaatgcagaattggttgttgcttcgtaatgtgcagttgctaagctaactacagtctggttttcaattccaacgataaaggcgtaatcattttctgttttattattttcaagtgagcgtttaaaaattttactatcttcatctaaaccaatatccaatttatcatcatataatttgagtgcctcgttaaataatggatctttagctgattctatcactttaaattccatgttatatcctctccctaatattattcattcgtagcgaattagctttatttaatgataaaaaaaaccataatgtctgctcgacgacacaaacattatggtgcaatgcttttataatttagaaataaaattatgctttaggcccttcagactctgcggcataatgagtaatatccacttctttatatgcagcattattatcttcaacttcatcatgagaagaacggtcactgttagcaacaacgagcattttatcgtttaaaatatcttgtttatatccttctagttcattgtcagttaaatcataacgagataatactgtttcttctccatcttcacctgtaagtaaacgagacatacggtcactaaatgagccacttgtagccattaacgagatttgagagttgtgtaaatcatctaagtgcaacttacttttactgataacagctaattctgtctctaaataaccttcagattttttttgattgatgactttatataattcatcttggttattcactacagtaatttttgccatgattatcgccccttttaaaaatgttgtcttacatggttataccctagtctaatttaataaaactattacacagataattatataattttgtattaaaacatttcaatgataattcatcctttaatataacgcttacactgaattttgatgctttttgaatcgtgaacatctctttaattatattgaaaatacaacaaaaatttgctattatcataaaataatttatatgactcatataatctagagaatatggctttagaagtttctaccgtgtcgccataaacgacacgactatgagtaacaatccaatacattaagagcagtttaaatcgctaaagcaacataaaagtgaaacgcatttggtataactggtaacaaatgaggatacacataagcctgtataaattgagtgcaattgtttaagttttatcaaatttaataagcgtttttaggattacgtatgcgtatcttcttcttaatttgctttaaggcaaagtattgcacgttcactcatagatcctgaaactattaatggtagtttgaggtttttttgtatctaggaatcgaatttgaatttacttgaggaggttttttgagtggagtcgttaggacgaaaagtcaaagaagatggcgttgtcatcgatgagaaaattttgaaggtagatggatttttaaatcatcaaattgatgcaaagttgatgaatgatgtaggtaaaacattttatgagtctttcaaagacgctggtattactaaaattttaactattgaagcttctggtattgcgcctgctattatggcttcttttcattttgatgttccttgtctatttgctaaaaaagctaaacctagtactttgaaagatggcttttatagcacggatattcattcatttacaaaaaataaaacgagtacagtcattgtatctgaagaatttttaggtgcagacgataaagtacttatcattgatgactttttagctaatggtgatgcttcgctaggtcttaatgacattgtaaaacaagcaaatgcgacgacagttggcgtgggtattgtggttgaaaaaagtttccaaaatggtcgccaacgtttagaagatgcaggcttatatgtatcttcactttgtaaggtagcttcattaaaaggcaataaggtaactcttttaggtgaagcgtaatgaaaaatttcatattaagtgtgcaacatttgttagcgatgtatgcaggggctattcttgttcctattattgtggggacaagcttaaaattttcagctgaagaaattgcttatctagttactgttgatatatttatgtgcggggtagcgacatttcttcaagcaaataaagtcacagggactggattaccgattgtactaggatgtacgtttactgccgttgcacctatgatactcatcggtcaaacgaaaggacttgatgttttatatggttcgcttttaatatccggtatcttagttgttttaattgcaccttttttctcttatttagttaaattctttccacctgttgtaacaggaagtgttgtgacaattattggaatcaatttaatgccagttgcaatgaattacttggcaggtggtgaaggagcgaaaaactatggcgatactaagaatttaatattaggtggtgttacactactcattattcttattttgcaaagatttacaaagggcttcttgaaatcaattgcgatacttataggattagcaataggtactgctttagctggtatat

SEQ ID NO: 4128 - DNA, 3124 bp, Artificial Sequence
  Description of Artificial Sequence: synthetic nucleic acid sequence
gatttgacatgttcaaatatttgttatttggattgtagttaggttgttattgcgaattgttgaagttgtatttgaattttgattatattgagtatctttagaattattactttcatcaatagcttgttcttgagtttgaattgtattttgagagttttcagaatcataagtcactgtattaatgttcaatgaacttattcattgcaattcttctagttgagatgccttgtttttaatttgactcctcttttcaatattttttgtgttttatttagagtttagaccacatgccgttaagaatagtgatattgataagaaaaacaactaatgctttaactttcattagtaatttttcccaatattaaatttatataactattaatttgaacatcgaaccgacaatagcaaacgtattccatttattaattcttatataaatacagtatacaatttaaatttataaccgacaatattagtactaattgctactatattatagagaatataaaatgttgtcattaacatatgatttatcaaagtaatttaaaaaatagtttgattgtttattggtgtatgtaataagggaaatttaaaatcataaaagtatctatactatattgtttataacgttaggaaataaaatagttccaaatgaatgcaaaaatgcaattcttttggaactttgtttctcattgattatttatttaattgaatattatagaaataccttctgaccatttctataaccatcatccaaacaatgtgtccaaaaaattctgataggtgttctgaaaatggttgatcaaaagcattcggtacgacatgcataattggcattaagattaaatgaaaaacaatccaaataactataccaaataaagcaccataacctagtgtgatttttgtatatttctttgcgatataaatatagattattgcaatagcgatagaaaaactatagtgtacgataaaacttatccaaggtaatgcatgctcagaaaaattgtatgtgagatgggtaatatttgacggtattcctagtaattgtaagagttgttgaggtgggttagtggcatctctactaggtgttcggggtgggaacattacctcccaacctagtttgactacaccagataaaagtcctgctattatgccagctattagtagtttaaacctgctctgatttttttgatgcttcattctgcatgtctccttatgttcctcctatatatttaaacaccattagcgttgttaaaaagagaaactttaatataattcaacctaattatattacttttatgttctttaaatgtttaaataatatgagctttaatttacaggatatgttagttttatgacatattaaaaaaattgagttataaaaagttagagaagttacaaacgaatactcatttaagttatttaaatgggattaagggtataataactttaaaattaaacagacgtaaaaagatggaggaaagacatggaaaataaacctgattatacctacttgaagtactctaaatttacgtgccacttgaaacatcacctttaaataactgattaatttgatgaataatattaattgaactaaaatcatccgttaatctcatggaatatgcataagaataattccattttttaaatgtgccaaaaaataatctaaagattctacagtttgcgatatgtcatcaataatatatccattatgcatatgtttaacataatctgttctctttttattaatttgtggtatacccgcgccaatacaacagatttgtaaaaaaagtttcggctctaaagataaatctactacaactcttaattttgaaataacgcttacaagatcttcttcaaacggtactgtttcaatatcaatgattgtttcttttttattctgtatcacgtcttcaattacatcacttatttcctttttctcttggtgatataaatcattgagatgagcaacttcatctataagattttccgtaagattatctctactcttagttaaaattttcaacttatagccatctttatgttgaatatattgaaataagctgtttacaatctctcgtatttcaatctcgtccaaaccatctatccataatccaatataagtgtcatacaattgactactttggttaggtaatgacttcgcatcaaaaggcgttacccttaaaagattaatatcattcatgttcaatcctgcgtagtgttcaatcatattttgattagcttgtgtatcaacgagacaataatatgctctagaaatagagtcatataaatcttgtgtcaccactttatttctctcagtaaaaatagaaaaacataaagaaaatttaagtcgattttgttcattctcgatttctagatgaaaacgggcacgttctcttaattcaaagaatattaactcatgtataggtaagctgcctgtttgtttgagcgtcggtcctaaacaagcaagcttatgagcatctgcctgatcagttttccatgatcttagagcgctcgttttaaatttggcttctaacggattcatttgaatatagttaatttgatttacacaacaaaatcgttccatacctcttgaatagatacctgtagattcaaaaatgagttgtgggtggtctaagtcattcaaatacttgagtaaataattgtagccatttttattattttggatgaaaaactctttttggaattttccatttttataatgtgcaactacactactccttttactaatatcaacacctaagtaatcgataaaaaaacctcctttgaatagttgagaagctaaaaactttacttaacctttctcatttcattttcctatacacggtttcaggaacccaacatactacaaacgaatttcaaaaggtgagagtaaagctgacttgttttttttacggatttaaaatcctagagtctggacagtctactcctctctataactataaaaaatagctatgaaaaaatctatcgtcatagatttcttcatagctaatcttagtatgtttaatatcctcataatttcttataatcaaatacacggaactatactgttttagttataagttaattccgtttcaagccattcaataacttcgttaaaaat

SEQ ID NO: 4129 - DNA, 2965 bp, Artificial Sequence
  Description of Artificial Sequence: synthetic nucleic acid sequence
tatgagaatctctggttctaatattaaagctttagctatccagacgcgttgaaattggccaccacttaatgtcgaaactttatgattaagtatatcgtgtggtaaattacactgatcaagcactgcttcaatgcttgatgtataacgctgtttatttaccttataattcttaagtggttctaataatgtagctaataccgttttacgctgatttaaagtatcacgttgatattgaggtacatattggatgtgcttcatccactctttagacgtataagattcacgtaagcgcccattaagatataattcgccctgataatccgtatctaagccagcgataatcttggctaatgtggatttaccacaaccactctccccacttatgagtaagtgctggtcgttaattgtacatgatatctctttaaatatcagttgcgtgtctatatatttggttaatctctctattttaagcataaggttgtctccgatgtgcaatcgtaattaattttttcgtgtaattatgtgtcggcttagttaagatcgacgcggcctcaccattttctatcaatttaccttgctgcataatactaatatgtgtggcacaatctttcactaagttaatatcatgtgtgataaaaacaatggtcatttggtagcgctcctgtgccctaagaaggtaatgcataaactttttaatattttcttgatcaagtgcactcgttggttcatctaaaaataagtagttcggacgtctaattaatgacattataaaggcgacacgttgtgccatacctccactaagttcgaagggataacgctcaagcaattgttccccttgtcttaaaccaagtaattgcatcatctgtaagacatcttccttaatacgctgtttagtgagatgtgtgcgattggcttcataaatgtattggaaatgcttagctaatgttatattttgaaacatattactttgaacatcttgaaacactgcatctgtttgagttaaatcgatgtcaatatctccttgataacataattgtgattgtttcattccaagtattgttcttgttaacagtgatttcccactgccactttcacctataatgcaatgaaatgcacctttagttactgtcaaatcaacatcctttaacaatactttctcttgatctaaaatcgataattgattgacgttgactaccgtatttactgcgttatttttttgttgataatttgacataataaggcgaaacctcctaacaatacaccagggaagaagaagagccacggtgcgccgttgaaataacttttcccatcaaaaagaattgttcctaactcaggcgtcggcggtttaatacctagtcctagaaaagcaagtccagatatgctgagcatcattttgccaaagtcagccgttaccaaagcgaatatactacttaataaatgtggaatcacatgtgttactgtcgttttgaatgttgagttcccactcaatcgtgcatattgaacaaatggacgtttttgaatatctcgcgttaaatttctgaagtaacgtaaataacgtcctatccatccaatcgttaaagcaagtatcaaacctatcatggagttacttactaaacttaagatgactaatgcgataataaatgacggaatagccagcaacatatcggcaacaaacatgatgatttgatctaaccatcgtctttctatgcctgcaattaagccaaagataagtcccatacaaacgcttaatagaatcactatgcctgttaaactcaatgtgacaagactaccgacaatcagtcttactaagaagtctctgcctaattgatcggtacccaaccaatgttgtccattaggtgactcaagtgggttcaaatgttgcgtgtcttgcattaaaccatacgtaattaatacaaccatcaaactcaatagtgaacctattgcgatgtacgtttgatattttttcatcacatcgtacctcttttctcattgcctgactgctgggtatgacgtcgtcgaagtctaggttcattcttcaaaataatcacatcgcctaaataattcattagcataataaagacaatgataaagatgacaatgccctgaatcagtggataatctcgttggttaatagcattaatcaacaatttacctataccagacatgctgaagatgacttctagtattacggcttttccaattaaatgaatgatactgttaattgaaatcgtcattagtggtgcaaatatctctttaatttgtacgatgatacgcgcttttaacgaaaaatgtcttaactgcgccagttgatacgcatcttgatctaacgtttgtgtaatcagatgtgctgtcatcaataagatatgacacccttctataacaacaattgtgaagattggcagcacaaagtgttgccatgaatcactacctacaaatggtaacaattgccaacgtacgcctaaataataaatgaataaaatagctaaccagtattctggcattgaggtcatcacttgggcgaatccacgaattccattagcgtaacgtgtatgcggacgcgtcccaacgaagtaaccaacaatatagccaaatggcaacatgatacaactagagacaatgattagcacaagcgtcggcacgatggcttccattatcatagcggtaactgcttcgttcgtactaaagccgtatcctaagttgcccgtgagtgcatgtccaacccaatcgatatatcttagtaacacatgttgtcctaagccaagttgatgttgtgccgcttcaatattgtcttgcgtaatcgacgtataaccatgacgttgtagatacagaatcgctggattaccagatgtcttctcaactaaaatgaagataataaacgaacttacgattaaataaagtatgaatttaattgtacgtttgagcattgctattcattaactttcaacgctttataatcaattggtgc

SEQ ID NO: 4130 - DNA, 3259 bp, Artificial Sequence
  Description of Artificial Sequence: synthetic nucleic acid sequence
agctaaaatagatattaatcagatacaagaacaggagaaaaaagggaaagtcgtattagtaactgctatgagcccaacaccagctggtgaaggaaaatccacagtaactgtaggtttagcagatgcatttaacaagttgaatcataatgttactgttgcattacgagaacctgccttaggaccaacttttggtattaaaggaggcgcaacaggtggtggttatgctcaagtacttcctatggaagatattaatttacattttaatggtgattttcatgcaattactactgcaaacaatgcactttccgcatttatcgacaaccacctacatcaaggaaatgaattgggaattgatcaacgaagaattgaatggaaacgtgttttagatatgaatgatcgtgcgttacgtcatgttaacgtaggattaggtggtacaactcacggagtacctagagaagatggttttaatataacagttgcgtcagagataatggctattttatgtctaagccgaaatatcaaagatttaaaagaaaaaataagtcgaattaccattggttatacacgtcatcataaacctataacagtttctgatttgaaagtagaaggtgcattaactttaatacttaaagatgcgattaaaccaaatttagttcaaacaattgagggaactccagctcttgttcacggaggcccttttgccaatattgctcatggttgtaactctatattagcaactgaaactgctagaaacttatctgatattgttgttacagaagcaggatttggttctgatttaggtgccgagaagtttatgaacattaaagctcgtgaagcaggtttcgatccatcagcagttgttgttgtagcaacgattcgtgctttgaaaatgcacggtggtgttgcaaaagaccaacttcaacatgagaacatagaggctgttgaagcgggacttgttaatcttgaaagacatgtgaataatattaaaaaatacggtgtcgaaccaatagtagctttaaatgcatttattcatgacacaccttctgaaacagcgtgtgtgaaacaatgggctaaagataatcaagtgcgtattgctttaacagaagtatgggaaaaaggtggagaaggtggaattgaacttgctaaccaagtgttcgatgtaatgcaggaacctcaaaactttaagcatttatatgagttaaaacaaccactcgaagctaaaattgaaacgattgttaaagaaatttatggaggttcaaaagtaaatttcagtagtaaagcacaaaaacaattaaagcaatttaaagagaatggctgggatgaatatccgatttgtatggctaaaactcaatattcatttagtgatgatcagacattgttaggtgccccgaatgattttgaaataacaattagagaacttgaagccaaaacaggcgctggattcatcgttgcattaactggtgctataatgactatgcctggtttaccgaagaaaccagctgcactaaatatggatgttactgatgatgggaaagcaataggtcttttctaagaaaataaaaaagagagtgagacagtgttattaataaatattgctcgctctcttttcatttcaaaaatttcgataaatatatctgatttttattcgtctttcgattgtttcagcaagtgctgtttaatattgtattttttagcgttttcgtattgttgtttagaaatttttccttcaacacgcatacgtttaagtacgtattgttgacgtttcatgctcaattttaaaagatggtaaggctttactttgccgtgttcgtcataaggcgtatagccgtatggactttgcagtaagccaatgagataagctgattgtgcaatattcaaatcttttgcaggtataccaaacagactatatgaagcagacgatataccagttatattggcaccgttgtagtcatgaccaaatgggacgatatttaaatacgtatatatgatttcatcttttgataataaattttcgacccgtgtagccaagataatttcatttgctttacgactataagtttttttatttgagagcacttgattttttactaattgttgcgtgatagtactaccaccagaagattggtttgaatttgtgatatcttgaagcatcgcccttaaaagtgctttaggcataataccgttatgtttataaaataatgtatcttcagaggctgtaagtgcatgtataatatttgaatttacatggttcggtccaactatgagtgtattttgtgaatgatcatattcttctaaaatttgattattatgatttattagctcatcgccaggtatatgaaggatttttgctttcaactctcgatcacttattgacgaagcatctttagttagttgttggaagtataatactaatgacaacagtataataaaaccaatcaaaaaaaccaccaaaaaaattacgacacatatatgtttgaccttcttatataaatgttcaaatttagtatatttatctgtagttagtatttgatacttgttgaaatgcattagatacctcctaaagttagatatagtataccatatcttgaaagttgacttttaaaataatgttaactataataatattcaattcaatatgttttgaatataaaggacaagtaacttttgagaaagcttaaagagaactagtggtggctgtgaactagtagtttcttattggtgaatacaccttgctatttttattattcaacgttttattaatgagcgtatcattaatagagatatttatgagtaacgaactctatctaagtatggtggtaccgtgcacaagcgcccttacattttgtaggggcgctttttaatatgtttgaataaatcacttatatcactatatttattaaatatctttaacttttttaaatttataaaataatttaggaggattttatcaatggctaatgctttaatagaagatttaaaatggagagggttaatttatcaacaaacagatgaagagggtatcgaagaattattaaataaggaacaggtcactttatattgcggcgcagatcctacagctgatagtttacatattggtcacttgttaccttttttaacattaagacgcttccaagaacatgggcatcgtcctatcgtcttaattggtggaggtactggtatgataggagatccttctggaaagtctgaagagcgcgtgttacaaacagaatcacaagttgaagctaacgtcaaaggcctg

SEQ ID NO: 4131 - DNA, 3564 bp, Artificial Sequence
  Description of Artificial Sequence: synthetic nucleic acid sequence
atgattgcacaaggtattggtcgtttaacaggaaaaccaggtgtggctattactacaagtggcccaggggtaagtaacttaactactggtttattaactgcaacttctgaaggtgaccctgtattagctatcggtggtcaagttaaaagaaatgacttattacgtttaacacatcaaagtattgataacgcatcattacttagatcctcaactaaatatagtgcagaagtacaagatccagaatcactatcagaggttattacgaatgcaatgcgtacagccacttcaggtaaaaatggagcgagctttatcagtattccacaagatgttatttcatcacctgtcaaagctgatgcaatttcattatgtcaaaaaccacatcttggtgtaccttcagaacaagaaattaatgaagtgattgaggctattaaaaattctaaattcccagtattattagctggaatgagaagttcaagccaagctgaaacagaagctattcgccgtttagttcaaaaaacaaatttacctgttgttgaaacattccaaggtgccggcgtaattagtcgcgaattagaaaatcacttcttcggtcgtgttggtttatttagaaaccaagtgggtgacgaattacttagaaaaagtgatttagttatcacaatcggttatgaccctattgaatatgaagcaagtaactggaataaagaattagatactaaaatcatcaatgtcgatgaagaacatgctgaaatcactaattacatgcaaccagttaaagagttaatcggaaacattgcaggtacaatagatatgatttctgaacatgtaaatgaaccatttattaatcaagatcatttagatgaacttgaaaaattaagaggcgaaatcacagaagcaactggaattaaagcaactcacaaagaaggtgtgatgcacccagttgaaatcattgaaacaatgcaaaaagttttaactgatgatactactgtaactgtagatgtgggaagccattacatttggatggctcgtaaatacagaagttacaatcctagacatttactatttagtaacggtatgcaaactctaggtgttgcacttccatgggctatttcagctgcacttgtacgtccaaatacacaagttgtttctgtagctggagacggtggtttcctattctcaggacaagaattagaaactgcagtacgtaaaaacttaaatatcattcaattaatttggaatgatggtcgttataacatggttgaattccaagaagaaatgaaatataaacgctcttcaggtgtagaatttggaccagttgattatgtaaaatatgcagaatcatttggcgctaaaggattacgtgtgactaatcaagaagaattagaggcagcacttaaagagggttacgaaactgatggaccagtattaattgatatcccagttaactatgcagataatgttaaattatctacaaatatgttaccaaatgctttaaattaataaattaaccaatgatactaaggtgaattttaataaaacgcactctaaggttgaaaggctaccttagaatgcgtttcttcaagtaatgaatattaataggagtgattatgaatgactaatgtattatatcaacacggaacattaggaactttaatggcaggtttattagaaggaactgcttcaattaatgacttattagaacatggtgatttaggtattgctacgcttacaggttctgatggagaagtaatttttgttgatggtaaagcttatcatgcaaatgaacataaagaatttatagaattgacaggcgacgaaatgacaccatatgcaactgttacaaaattcaaagcagactcaagttttaaaacatctaataaaaatcaagaagaagtattcgatgaagttaaaaaacaaatgaaaagtgaaaatatgttctcggcagttaaaatttcaggaacgtttaaaaaaatgcatgtacgtatgatgcctggtcaagaacctccatacacacgtttaattgattcagctcgtagacaacctgaagaaacacgtgaaaatatcaaaggttcaatcgtaggtttcttcactccagaattattccatggtattggttctgcaggtttccatattcactttgcaaatgatgatcgtgattttggtggtcatattttagactttgaagtggatgatgtgactgttgaaatacaaaactttgaaacatttgaacaacacttcccagtagatgctaaatcatttactgatgctgacattgactataaagatatagccgatgaaatcagagaagctgaataattgttagctagatgtaccttaactccaaacattatagactacaatgatttgtatactaaatagatgaggataagataaaatatgtattgaatatattgtcttatctcggtaacgaaccccgacatagagaatttctgaatgaaactctctatgttggggtttcttgtactactattgaaaaagtttgatataaacaacatcttcaattcaagtataaattatctatatggttaacaaagcctaggacatgaatttgtgttctaggctttgttatatgtttatggtgattagaatttataaagtaaatgcatttcaaatatggggttgtttatttgtagaataaatatattttttttgagaaaaggtcatattttataatgactaatttacctaagatatcaatctggttgtgtgtattcaaggtgataagcgtataaaaatgtataagccatatctagatagggtgtctctaaatgatgtttttttgcacatttatatatataaccctgtatggcctcgacttcaagaggatgcttgttaatgacatcgtaatacatacttgttcccatttcgtctggataacctttataaatatttaaaatatcatcaacgatatgatcttcaaagtcaatttgttcagctctagcaactttaagaccatcaactaatatacgacgacacaacgactcaatatgaggagattttaaaattttagctggttgttgtccaatagcagtgatggtatttatacctaaattcactaataatttataccaaatgcttttttcaatattttcttgtaaaaccacctctattttggaaggatgaaccatttgcttgaattgacgagttagtgtgctatcttgaatatatagttggtaatctctgaaatgttgaacattgttgttaactttttgtccgctaatatagacgactgcttgaaagacatgttgatatggaagtttattaagctgtccatagccattttgtgctaagataatgagcgaatcgtcatgagtgattttaggtaattgtttaatgacgtcatccaattgatgtgttttaactgctatgataatgacatcaaaagtttgattaatatgattaaatgaagtcactttaacattacttccattagaagtattttctgggaaataggtcattaatttatcttgccggccgatgagttccgtatctggtagaactttttttaattcaaaagctaacgttgtacccactgcacctgggcct

SEQ ID NO: 4132 - DNA, 2988 bp, Artificial Sequence
  Description of Artificial Sequence: synthetic nucleic acid sequence
gcacaactttaaagttagcgaactgtgcataattaaataacttctcccagttaatagctcctatgatgtatccgatgatgcctccaactaatcctcctaataaacatagaagtgcatacctttttattttcaaaagtcttcctcctccataataaagatatcttcaacaggttcaccaaagattcttgcaatttttattgcggttaatatagatggtgtaaaatcgttgcgttctattaaagacaccgtttgtcgtgatattccagcttttttagcaagctctgtttggttatatccatcacgggctcgtaattctttaagtctattgcgcaaattgtatcacttccttacatataaactatataatatatttgtcattatgacaagtatattagtcaaaatgacaaaaataatagactttttagggattgtataaaattgatttttagtaatacaagttttaataaaatttattagtttttaaaaaagaaatacttttaacatataaataagacctcaactattaattttttacttaaatttaaacaaatgtattttgtaaatgccttcattttggtaatatatacctattgttgcaaaatataggaggttagggtattgagcttttatcgttttatgaagaattttgaaggtgaaaaaagtcattttggagatttgtttgaaggtatgaaagatattaattttcctgaaaacattacgactccaaaggaaattatggaaaagttccaacattggttacaagaacctagtttacacgatacgatacaagatgcgattaagcagtatcaaaataaataactttcatctatattaaaaggttgttgaataaatcagggttttagtcaaaatcttttaatgtaatttttatacatatacgttgataggattcattttcggaaaaatagtgcaaataaatcaatgatttcgtgttttgaataaataatcaaaataatagatgatatgtctcaactgttttttaacaatggcgattgttttatacttattcataaaagtctatgggacatcaagacgattaaatatggcttcttaatctattatcaatgattttggtgattctaaaaaacactttaccagtgaattgataggaaaggtaagtttagattacttgcttctattatgaagcatgggtgacaaatataaaggaaagtaagtactgattgcataataaaatttagaaatgtaaatcatcgtagatataatagtagatgttaaggaaatcttataaagatgacttgtgttaagtgggacggttagactaccccgtttgtatagacatgagtatttcttttatggtttcctctttttttacaacaatggattaactatatttagtgaagtgagagtgattatgaaattaaaattgatcattgcttagaaagaaagtgatgcatttgatgatgatagatcataatggaatttttctatgtaaatttggtaatataatgtggaatgtgtttactgcaattaaagtatgtaatactcatttaaatacaatgaaggtaagagataaactcttaaataatagatttgaatatccaaatataatgacaataagaaaagaaggtttgcttcttccctcatttttagaaaagtataagttatattaaggagatgaatatgacatgtcacgcatagtattagctgaagcatatcgaacacctataggcgtgtttggtggtgtatttaaggatatacctgcctatgaactaggtgcaacagttattcgtcaaattttagaacatagtcaaatagatcctaatgaaatcaatgaagttattctaggaaacgtattacaggcaggtcaaggacaaaatcctgctcgtattgctgcgattcatggtggtgtgccagaagcggtaccttcttttactgtaaataaagtttgcggttctggattaaaagcgattcaacttgcctatcaatctattgtagcgggagataatgagattgttatcgctggaggcatggaaagtatgtctcaatctccaatgcttcttaaaaatagtcgtttcggttttaaaatgggaaatcaaactttagaagatagtatgatagctgatggtttaactgataagtttaatgattaccatatgggtatcacagccgaaaatctagttgaacagtatcagattagtcgtaaagaacaagatcaatttgcattcgattctcaacaaaaagcatcacgtgcacaacaagctggtgtatttgatgctgaaattgtacctgtagaggtaccacaacgtaaaggcgaccccctaattatttctcaagatgaaggcattagacctcaaacgacaattgataagttagcacaactccgtccagcatttaaaaaagatggatcagtaactgctggtaatgcatccggtatcaatgacggtgctgctgctatgctcgttatgacggaggacaaagcgaaagcattgggcttacaacctatagctgtattagatagttttggtgcgagtggtgtggcgccttcaattatgggtattggtccagttgaagcgatacataaagctttaaaacgttctaataaagtgataaatgatgttgatatttttgaattaaacgaagcttttgcagcgcaatcaattgctgtaaaccgtgagttgcaattaccgcaagataaagtcaatgttaatggtggtgcgattgcactaggacatccgataggggcttcgggtgcgcgtactttagtttcattattacatcaattaagtgatgctaagccaacaggtgtggcatctttatgtatcggtggcggtcaaggtatcgctacggttgtatctaaatatgaagtttaacatttagtggagcacggtttttatatcataaaagtgtgtattaaaaaagctataaacgaagtcgttttaaaaacttcgtttatagctttttacttagttagaaagagttcattgctattcaaatattatgatgatgaac

SEQ ID NO: 4133 - DNA, 4249 bp, Artificial Sequence
  Description of Artificial Sequence: synthetic nucleic acid sequence
aggtgaacctatggctgcattatcaagaattgcaaatggtacacataagcaaataaaaattataccggaagacactgtagtatttagttcttcgcctattccaggtaacactaagagtatcaatcgtacaattaatgcgttgtacaaagctggtgcagatgtgattcatagtaaaatttcaaacattcacacttctggacacggttctcaaggtgatcaacaattaatgttacgtctgattcaacctaaatacttcctgccaattcacggtgaatatcgtatgcttaaagctcatggtgagactggtgttcaatgcggtgttgatgaagataatgtatttattttcgatatcggtgatgtacttgctttaacacatgattctgcacgaaaagcaggaagaattccttccggcaatgtacttgttgatggcagtggtataggtgatattggcaatgttgtcatcagagatcgtaaattactttcagaagaagggttagttattgttgttgtgagcattgactttaatactaacaaattactatctggccctgatattatttcacgcggttttgtttatatgcgggaatctggtcaattaatttatgatgctcaacgtaaaattaaaggcgatgtcatttctaaacttaacagcaataaagatattcaatggcatcaaattaaatcttcaattatcgaaacattacatccttatctttatgaaaaaacagctcgaaaacctatgattttacctgtgataatgaaagtaaatgaagataaataaacacttaaatatatttaatcaagttacaatgaatttatactactttaaatgtttccattactctaatagtattatatatttttagtagtaattaattattttgaattatttatttaatacgatttgagattatatcttttatctttgaatttcttacaaaaaggagtttagagctaaaagttcttaaactagtaaaaagagacaatttctatattatttcatatagaaattgtctcttttataattttcaaactataataagcttgttgatatactatcttacttatataagttcctttaatacaaatcatattccttctataactagccaattgtttttggtttaggttcagaaagtttcttaaagtaatatttctatattccaatcaaaaaatacagattatgtgtagacatatagaactacttttaacaatattttacgatgatataatagattgcatcacaatgatattcaatttcattaaattcagtatctataattgtttcaattttatcattcacatatctagacatatcatttatgaagatgagtattgaagtttctattagtatagtaaattaagtcatattataacctttattcacaaggcatgtctttcaatactaagtattgtataaatagagaaaagcagtaaggtaattttcaattagaaaatatcttactgcttttttaggaattaatgtcccagttttctttttataattttgaaatatttttattcacttatcaagttttaggaataacatttacatagaagttcaaataattaagtgtactttgttatgtctaagcttaaaataatacaattttattaatctatttaaatactaaaaaagattcaacattataaactagttttcaattacaatgttttaaaaataaaaagaaacaaatttcactttttaacaattcgcttataatgtacacatacatcaatttgaaattggatatgcaaacatttacttgcttatatttttttcaaagcgacctaagtcattatcatgaccaatcataattaaaatgtcccctatttcaatattgatgttagggtctggagagactataaattctttagctcttttaattgctataatgttaataccatattgagctcgaatatctaattcaataattgtttgtcctgccattttttctgtagattttaattcaacgattgaatgctcatcagcaagttccaagtagtcaaggacactagcactagcaacattatgagcaatacgtcttcccatatctctttcagggtgcacaacagtatcggcacctattttatttaaaatcttagcatgataatcattttgggctttagcagtaacctttttaacacctaattctttaagaattaacgtcgttagtgtactagattgtatattctcaccaatagcgacaataacatgatcgaaattacgtattcctaaactcttcattactgcctcatcagttgtatcagcaacaactgcatgtgttgctatatcactatattcgttaacacgattttcgtctctatcaatagccataacatccatgtctaatgcgttaagttctctaacaatactaccaccaaaacgccctagtccaattacgacatactctttatccatattcgtcctccattatataaaagaggaatgattactaacattcctcagagtcttattatttctttccttccacatatgctttgtcgaaaacaaataatcttaataataatattaacgatggaattaataaaagtaaacctaaaacaaaaacaataactaatgataatcccatttccggattgacatgggagtctgtaattttaataaacggataaagtaaatatggaagtttactcattccgtagccaaagaatgcaaataacatttgcaatataaccatgataaaagctagaccgtgtttctttttaaatatagtcagtaatccagctattataaaaaatataaagctgattgcaaacatccaccaataattaaaaatagcagttctaaagtgatcagaattttgaattctaagagataagaaaacaaataatgaaatcacaatcataggtggcccccaaaaaatatgccattgtcgtgtcatatcataagcaggttgatcatttgctttatgagcataatatgttaaaaaacctgatgaaatataaagaactgaaacaatggctaagaatactacagaccatgcaaatggacttaataataattgtatccagtctaaatcaatatgtgtgccatgctcatagatataaccaccttctgaaattgttagagcagttgctagagaagctggaattaacagccctgttaaaccatataatacaatccagggcagtttagtatcttgaccataattttcaaaagcataaaaactacttcgtatagaaataagaattaaagctattgatccgggtactaataaaactgttcctaagtatttagcagaatcaggaaaaaaacctataaatcctacaaaaaagaaaacgaaaaagacatttgtaacttcccaaactggattgaggtatctatggattaaatgattaacctttttctcattacctgtcattttagaatgcaatgcgaaaaatcctgcaccaaaatcaatggaggcgataataatataacaaaataaaaatacccataatactgttataccgatataagcgtaaatcattttgtttcacctctctctttaatcactttttctacatctttataagcaggttgatttttaaacattctaattagtacataagccgaagtaactagtaataaaagatatagtaaaccgaatagcgtcgttactaatgtgattccccccgcctgggtagcagcttctgatacgcgcatatatcctcgtataatccacggttgacgacccatttcagttaagaaccaaccaaattctatcgctaacattgatgcaggaccagttaacaagatagcgtataacatcatattactagttacatatttacgtaactttttaacaattaaaaataacatatatagtcctgaaatgataaaacagaatattcccattgataccatcaaatcgaaaaagtaatgcactatcataggaggtaattcatttttaggaaattcatttaaacctttaacttttgtattaaagctattatctgctaaaaaactaagtaatccgggaatctctagtgctcctgaaacttcatgtgttttttcatttaatacaccgaaaagaactaaattcgcatgagattgcgtatcataatgccattcatatgctgcaagcttatctggttgaactttgtgtaaaaatttagcagataaatctcctgcaatcatcgaaagaacggtattgatgaatccaacaatcatgcttaaattaagagcttttgtatggtatgttctatcttctgtatgattatgacgtaataatttaaacgctgc

SEQ ID NO: 4134 - DNA, 3061 bp, Artificial Sequence
  Description of Artificial Sequence: synthetic nucleic acid sequence
ggtatctaatttaccatctttaatattttggtatatcttactttgttcgtgcatcttttctccctcatttctacacgattataacatgattattttaaatatgtattttcaggatatttaagttaatttttctttatttatatattttcatgaaaaaacaagtcataaaaaaaccgttaatacaagaatttctcatgaattaacggtataaacaatttatacaacgtaacttaattgaccttcgtttttataaacatcatcaattgtagcgccacctaaacatacttcttgattatagaagacaactgcttgaccaggtgtaatcgctctaactggttcagcaaaagttactctaatagaattctcgttttcgcgttgaacataaactttagtatctttttggcgataacggaatttagctgtacattcaaaacctttttccaaatcaatttcacttggattaacaaatgaataatcagaagctatgagataatcactataaagtgcatcatggtgaaatccctgttcaacatataatacgttatcatttaaatttttacctacaacaaaccatggatctccatctccaccgatgcctaagccgtgacgttgaccaattgtataatacatcaatccactatgctgtcccattttttttccatttaatgtcaacatttcaccagattgagctggtaggtaatgtgataaaaattctttaaagtttctttcaccaataaaacaaatacctgttgagtcttttttcttggcagtagctaaattttgctcttctgcaatacgtcttacttcacttttttcaatatctccaattgggaacatgactttggatagttgttcttgggataattgatttaaaaagtaggtttggtctttattattgtcaacacctcttagcatttcaacatgcccatcatcatgacgacgtatacgagcataatgacctgtagcgacataatcagcgcctaattttaaagcatgttctaaaaatgctttaaatttaatttctttattacacatcacatcagggttaggtgtacgaccttttttatattcatcaagaaaataagtaaatactttatcccaatactgttcttcaaaattaacagcgtagtatgggatgccaatttgattacatactgcaatcacgtcattataatcctcagtggctgtacacaccccattttcatcagtatcgtcccaatttttcataaatatacctattacatcataaccttgttcttttaacaagtatgcagtaacagagctatccactccaccagacatgcccacaactacgcgtatatctttgttagacactatgattcctccttaaatttatgatagattttatgaatttcagctacaatatatttaatttcttgcgttgttgtttgttcattaaagctaaaacgtactgaatgttttgctcgttcttcatcttcaaacatagctgcaagtacatgagatggagtcgttgaacctgctgtacaagcagaacctgaagatacatatacatgggctaaatccaataatgttaacattgtttcaacatctataaatggaaaataaatatttaaaatatgacccgttgaatctgtcattgaaccgtttaattcaaatggaattgccctttcctgtaactgaactaaaaataattcttttaaattcattaaatgaacattatttacatcttgattggttatagctaattcaagtgcctttgttaatccaacaatttgaggtaaattttctgtacctgctcgacgtttggtttcttgttcaccaccaagttgattatatgctattggtgtatgctcttttactaatagtagaccaacacctttaggaccaccaaatttgtgtgctgaaatactcattgtatcaattttaaaattatgaaaatctaaatctaaatgtccaattgcttgaacagcatcaacatggaataacgcatgagtgtctccaataatatcttcaatatcataaatattttgtactgttccaatctcattatttacaaacataattgatactaaaattgttctatcattaattgtttcttttaattggtctaaatcaactgcaccagtatcatctacatctagatacgtaacatcataaccttctttttcaagttgctcatatacgtgtaatactgaatggtgttcaattttggtagtaataatatgattacctaattgttcattcgctttcactaatcctttaatagcagtgttattcgattctgttgcaccacttgtaaatattacttcattcggattcgctcccaacaattgtgcaactgtacgacgtgactgatcaagatatttgcgtgcatctctaccaatagaatgtattgacgatggattaccaaaatgagattgatatatttccatcatagcatctattacttctggttttactggcgtagtcgcagcataatctgcgtatacttccatgtttggacactccttgtcaaattatcaatgttcctataatagcaccattatttgtttatttctacttttctgttttaccaatgaaaaaatttatgtcatttaaattttaacatctaacctaccaatttatcgaatatcatttttgtatataaaattaaaataatttgagcaattcaatattgaaaatcaaaaatgattgttatacttcaattattattaattatggaaaggaagcatcatgtatgaaaaatataaaattatctgcgttaaacttagtacctatacgtgaaggtcaagaagataaagatgcaattaacgatatggttacactcgctcaagcattagatgatttagattatgagcgctactggattgcagagcatcataatgctccaaatttagttagttcagctacttctctattaattcaacatacattagaacatactcattctatcaaagtaggttctggaggcataatgttaccgaatcatgcaccactagtcgtagcagaacaatttgggacattggaaacattattccctcaacgtgtggacttaggattaggacgtgctcctggtaca

SEQ ID NO: 4135 - DNA, 2957 bp, Artificial Sequence
  Description of Artificial Sequence: synthetic nucleic acid sequence
ctgcatgtgaaggtgcaattcttgtagttgatgctgcccaaggtatagaagcacaaaccttagcaaacgtttatttagcattagataacgatttggaacttttgccagttgttaataaaatagacttgcctgcagctgagcccgatagagttaagcaagaattagaagatgttataggtatagatcaagaagatgtagtacttgcaagtgctaagtcaaatataggtattgaagaaattttagagaaaatagttgatgttgtaccagcaccggacggtgatccagaagccccacttaaagcacttatctttgattcagaatatgatccatacagaggagtaatatcttcaattcgaattattgatggtgttgttaaagctggagataggattaaaatgatggctaccggtaaagaatttgaagttacagaagtcggaatcaaaagcaaataacgacagtacagacaatcagtcagcaccttctaaacaattagattcaaaaccatcagaacaaaaagtatataaaacaaaatttaatgatgaacctactcaagatgttgaacacacgacaactaaattaaaaacaccttctatttcaacagatagttcagtcaatgataagcaagattacacacgaagtgctgtagctagtttaggtgttgattctaatgaaacagaagcaattacaaatgcagttagagataatttagatttaaaagctgcatctagagaacaaatcaatgaagcaatcattgctgaagcactaaaaaaagacttttctaaccctgattatggtgtcgatacgccattagctctgaacacatctcaatcaaaaaattcaccacataagagtgcaagtccacgcatgaatttaatgagtttagctgctgagcctaatagtggtaaaaatgtgaatgataaagttaaaatcacaaaccctacgctttcacttaataagagtaataatcacgctaataacgtaatatggccaacaagtaacgaacaatttaatttaaaagcaaattatgaattagatgacagcataaaagagggagatacttttactattaagtatggtcagtatattagaccgggtggtttagaacttcctgcaataaaaactcaactacgtagtaaggatggctctattgtagctaatggtgtatatgataaaactacaaatacgacgacttatacatttactaactatgttgatcaatatcaaaatattacaggtagttttgatttaattgcgacgcctaagagggaaacagcaattaaggataatcagaattatcctatggaagtgacgattgctaacgaagtagtcaaaaaagacttcattgtggattatggtaataaaaaggacaatacaactacagcagcggtagcaaatgtggataatgtaaataataaacataacgaagttgtttatctaaaccaaaataaccaaaatcctaaatatgctaaatatttctcaacagtaaaaaatggtaaatttataccaggtgaagtgaaagtttacgaagtgacggataccaatgcgatggtagatagcttcaatcctgatttaaatagttctaatgtaaaagatgtgacaagtcaatttacacctaaagtaagtgcagatggtactagagttgatatcaattttgctagaagtatggcaaatggtaaaaagtatattgtaactcaagcagtgagaccaacgggaactggaaatgtttataccgaatattggttaacaagagatggtactaccaatacaaatgatttttatcgtggaacgaagtctacaacggtgacttatctcaatggttcttcaacagcacagggggataatcctacatatagtctaggtgactatgtatggttagataaaaataaaaacggtgttcaagatgatgatgagaaaggtttagcaggtgtttatgttactcttaaagacagtaacaatagagaattacaacgtgtaactactgatcaatctggacattatcaatttgataatttacaaaatggaacgtacacagtcgagtttgcgattcctgataattatacgccatctcccgcaaataattctacaaatgatgcaatagattcagatggtgaacgtgatggtacacgtaaagtagttgttgccaaaggaacaattaataatgctgataatatgactgtagatactggcttttatttaactcctaaatacaatgtcggagattatgtatgggaagatacaaataaagatggtatccaagatgacaatgaaaagggaatttcaaatgtcaaagtgacgttaaaaaataaaaatggagataccattgggacaacgacaacagattcaaatggtaaatatgaattcacaggtttagagaacggggattacacaatagaatttgagacgccggaaggctacacaccgactaaacaaaactcgggaagtgacgaaggtaaagattcaaatggtacgaaaacaacagtcacagtcaaagatgcagataataaaacaatagactcaggtttctacaagccaatatataacttaggtgactatgtatgggaagatacaaataaagatggtattcaagacgacagtgaaaaagggatttctggtgttaaagtgacgttaaaagataaaaatggaaatgccattgggacaacgacaacagacgcaagtggtcattatcaatttaaaggattagaaaatggaagctacacagttgagtttgagacaccatcaggttatacaccgacaaaagcgaattcaggtcaagatataactgtagattccaacggtataacaacaacaggtatcattaacggagctgataatctcacaattgatagtggtttctacaaaacaccaaaatatagtgtcggagattatgtatgggaagatacaaataaagatggtatccaagatgacaatgaaaaaggaatttctggtgttaaagtaac

SEQ ID NO: 4136 - DNA, 3194 bp, Artificial Sequence
  Description of Artificial Sequence: synthetic nucleic acid sequence
ctaaagcgcttcattgttgaaataatctaactcattcaatacgtacgctctcccacttctttattaatcttaacaaaagccgtatggatttaactatattctaacattcattttaaatatgtgatgatgtaaaacggtcaatgacatcttctattgctttatcccaaaatgcataatcgtgatgacctggcgcttttttaaattgatatgaaatacctttttcatctaaatagttcacaaaatcaatattaccttgatacaattcatcttcagttccacaagtaatatatagttgtggtaacgtttgtccattgtctattgcttgttcaactaaatagtatggatcaaaagatgtccccgcgacatgttgcgtattacctacaatcgcttctggagtaaaatcataccattgatattgaccaatcatagaaacatcatatggcgctgaaagcatagcggcttttgagaaacgataactttgcgttaatgcaaatttgattgcaccataacctcccatagagtgacctgctataaaattatcttctctctttttagacaatggaaatatttgatgaacataatcataaacttctagtatatagtcataataactatgtccataagccatatttgaatagaaactatgatcagcattaggcatcaccactgctagttggtgggtattcgcatagcgttctatactcgtatatctcatataagaggaagtatcacttgataaaccatgtagcaataacatagtttttaatggtttcgcattttcatttgtatcaaagtaacttttatcttctggaagaatgacattaatcgtttgatgcattcctaaagttttagataaataatttaatgtaatatgagccataatgttggatcactcctccctgtgtaaaaaattaaattacttacgtagctggatctagctttttctctaataaacgtaataaaacatctataagtatgacaatgataacgataggtatggcacctgctagaataaatagtgttccatcagttgcatttgtacctctaatcacaatatcacctaatgttggtgcaccaataaatgaacctacagctacgacaccaatagctacaacaagggcaatccgaataccacctataataactgaaagtgacagaggtaactcaatcatagttaatacttggttacgcgtcatacccatcccttttccagcatctttaatatttgggtcaacttcattaattcctgtatacgtatttttaataataggaagcaaggcatataagaacacagtaaaaatgactgtattcataccaagtcccatactaagcattaatatcgctaacatagcaataaccggaacagtttgaataatattcgcaatagtgataataacacctgataatttaccaaatcgtgcaatgatgataccaagaggtatgcccactaaacatgctagtaaaacaccgtaaacagacattaacaaatgattaacaaacaattcccataggtagccaaagttcatttgatagtagtgaacgagttgttgtattaaattcccttccatgtttattgaccacctttctgtttatcttttttattgtcatcgtcttcaaaataatgatgttttttcaagaagtcctctgcaactgttgcaggctctttccctttaccatcagcttgataatttaattcttgcatttgttctgttgatatcttaccttctaattttttaacaatcggtttgagctctggcttctcttttaacaattgatctgatgcaagtggactggcatcgtatggtgggaagaatcgacgatcatctttcaacacttttaaatcatatgctgaaatacgtccatctgtagaataacctacggcaacgtctaatttgccagaactcagtgcatcatagacaagaccaatttgcataggtcttaccgtaccgaaactatagccatattcttttttaaatgctggataaccgtcacctttacggtccatccatgaactatccatacctactcttaaatctttagcatgcttttctaagtctgaaacagtttctaaatgatatttcttagctgtataaaagttttctcgcttttttattaccacgcttgttgatggtatctctacagtgtgtatgacctgattgatatcgtttgatatcaatgcctacaaaagcgttgagttgtttatttgatttaaatcgcttaatatcaccaatctccccaataatcatagctgtgcttagcttaccaataccaggtatcgaatgaatattttcaaaataatcgagttgttgtgctaattgaatcatggcatcatctaattgtttgagatgatgaatagattgttttaattgttgaataagtaagcgtaatttttcgactagaaaggaatgtctatcgacattaggatagctttcttgagcaatcactcttaattgaagtgcatattttgtagctttatccattgacattcccttatctgtagaattgaatatatgtgtaataagtacatccttgtcgatatcaagaaccacgtctggatgagtaaaaatttctgcgatgttgagtgcaatgattgaatatcgactactaaataatctttctaaaccagggaatgtttgatggagtaattcaagaatctgaaatttaagtcgattttgttcattctcgatttctagatgaaaacgggcacgttctcttaattcaaagaatattaactcatgtataggtaagctgcctgtttgtttgagcgtcggtcctaaacaagcaagcttatgagcatctgcctgatcagttttccatgatcttagagcgctcgttttaaatttggcttctaacggattcatttgaatatagttaatttgatttacacaacaaaatcgttccatacctcttgaatagatacctgtagattcaaaaatgagttgtgggtggtctaagtcattcaaatacttgagtaaataattgtagccatttttattattttggatgaaaaactctttttggaattttccatttttataatgtgcaactacactactccttttactaatatcaacacctaagtaatcgataaaaaaacctcctttgaatagttgagaagctaaaaactttacttaacctttctcatttcattttcctatacacggtttcaggaacccaacatactacaaacgaat

SEQ ID NO: 4137 - DNA, 3131 bp, Artificial Sequence
  Description of Artificial Sequence: synthetic nucleic acid sequence
attgtagtaaacatctaagttatgtattgtctttaattttaaactatattgagagatataaaaagatataattgataaataaattgaaaaaattactattaaatataaactaatgaacgcttttcggctatataaacaggatttctttgtgttcatcgttcgtttctcctgttgttattaataattttactatattatcgttcgtttttaatatacgagtagacaagacgtgatttaacaatgtaatattacctttttgattaatgtttttgtaaattttacggtttttataaatatatctaataacatctttatctttcttaagtttaattgtatatgcattttctatctcataattgttttgagtcgtcattttctctttaagtaaatctcttctaaaaaattcaaattgaatatcttcgttattttgaacagtattaagataaaacgaagtcaatttaagtatagtaggtaataaagcgagaattaaagtagtcacaaataaagcaaataatgcttcgatgtaagtaaatgcttttatattaaattgaaatacatgttcgcgtattaaatgctttatcctccccacatattttattattgaataattgtatttcataattttctattacaaccccttgataaagttctttctttttatagtgttgaaggctagttatcatgatttgcttgatttttatattatttaaattgataagatactgattgtttaagtttgaaaacataggtattaaaatcattgttattgtactaactataaaaaaggctagcaatgcatcaataattaaagaccctttaaatttatattttgacaaatctcaaacgccccttttcaatatggaagattaatctataagcatgtgaattatattgtaaaatgagcgatccaaaatgatttatatttccatttttatcaaaatttaatgtttgaattttagctatattaatcactttgcctttattaagtttaaaactatatttatctccattttcttcaattacttgtactctatttgaattattaaaaaataataaagttattgattcgttgttgctaatagctttagatttataataattaaattttgttattaattgtttaatttcatattcttcatcaattagctgaatgtcgaacaggcttcgtgaccataaagttgttatcaacaagcaactgataataaataaagtaaaaatcatctcgactaaactaaatgctttaatgtttttaattggcaactgcttctccatttgcaatactaattgtctgaccggatttacatgttttttgtccttcttttataaaaccatctgaaaccaaatcatcaatattagaagggttgcgattatgttttaaagcgtaggcttctatttgactgtttaccattttaacttgagcatcacatccagttgactgaatatgagatgtttgttttgcaatatttggaattataagtattaacaataaacttattattagtaatactaaaagcatttctatcaaggtaaatgctcgtgtttttttcaataatttcaatgttttcattgatgtcactcctcaaattattttattgtttgcataagttcaaacataggaagcataatgactaagtataaagatacaataaaaattcccaagataaagaagatgataggttgtataaattttgtttgttttaacactttttcttcaaattgctgtaatagcatttgactgtataactttaattctatatctaatttcccatttttctctccttgttctatgaatttaatcaaatcattttgaaaacattttaaattcattaatataacaggtaacgggagccctttattagcttctttaaaaagataatcacccagaaatttaagaaaatcgttatcttgctcattacgatatatacggacaatttgttgaagacttgtaccatttctgtaaaataaagaaagttgattggaaagttgataagttctatatattttataatacgtattaatcattgggatttttaaaatagattttaactttttctcaattggtagataatagtagaatttataagtgataaaaaatgctataccactaataaagataaaaatgaaagttagtttgggaagacgggtaataataagagttagtagattttgaaatgttgataatttaacattcatagtctcataaagttgttgaaattgaggtatgacagttatatttaaaatggttaatatgaataagaagatagaaattaatgcaacaggatattgtaaggttttgatgagtcgttttttagctttcagatttcttttcatatattgaacagtatcaacgagagcctcctcaatgttgccgtagttttcagcaaattttatttgaagaagaactaattctggataccctattatttttaaaatatcataacatgtagcaccgttttgtagatgttggataatctttttatttattgttcgctctttatatttaaaataggagtttaaaaatttaaaactttgatataaagtgaatccgtgacttaaaagctgttgtaatctctgtagtaagtctattgattgtatttcagtaagatatttattcctcttatatttaaatgtatttatcgacaacttcttcacatataacaccttctttagacattttgtttaaatgtgtagctaattttgtgaaatttttaggtaaagaatgattatgttcaaaaaaataatttatttggctttgaaacattaattccgatactagttgacgataatttgtagtagtagtgattaatctttgattagaaattaaattgattgcctggcacaactcttggacagaaatacccatttctaataatcgtaatagtgctcccttgcaatcattcgcgtgcattgtcgacaaaactaaatgcccgcttaaactggcttgaatcacgtatttagctacggtagaatctctgatttcaccaattaaaattacatctggatcacaccttaaaatggctttgaaagagctttcataatttatacctgccttttcattgactgatatttgtgtgattccattaagtatttgctcaactggatcttcaactgatattacatttaaattcaat

SEQ ID NO: 4138 - DNA, 3379 bp, Artificial Sequence
  Description of Artificial Sequence: synthetic nucleic acid sequence
aatagctatatttggttttatcaaaccttatattattaatatttggaacgcaattaaaaactctacaattgccatttggaacgcgattaaaagaagtgctgtaataatatggaacgctattaaatttgctgttcaacatcctattcaagcattaaaaaatgtcttatcagctttatggaatggcatgaaaaatgctgctattaaaatctggaccgccttaaagaacggtgttatagcaattattaaagcatatgttgcgcaagtaaaatttaatatcaaccttattaagcgcatagtagttacgatatttaatgctattaagagtttctctattaaagtttggactgcattaaaaaatggtgtgttaggaatcgttcgagctttgcgcaaaggtgttctatctgtatttaacgcattaaaaaaaggtattgttgtaatatttaatgctgtaaagaatgccgcagttaaaatctggacggctataaaaaaatcagtagtgaataaagcaaaagcattatggtctggagttaaaaatacatggaatgcactcaaaaaaggtacaattggcatatttaaagcagttggcagtttcatgagttctaaatggaacagtattaaaaaaggtactgttaataaagcgaaagctctatggtcaggcgtcaaaggtgcttggggatcacttaaaaaaggtactcataacaccatgaatgctgtaggtggcttcatgagcaagaaatggaatggaattaaaagtactactgtatctatagtaaatggcatgaaatcgaaagttatgggcaccatgaataaaatgagagacggtatcaaaacagttaccggtaaaattgggaatctttttggtggaatggttaaaggcgttaaaaaaggccttaatggattaatcaaaggtgttaactgggtcgcagataaattaggtatggataaaatacctaagattaaattatctacaggtactcaatctacgcatacacaaagttatattaccaacggtaaaatcaataaaggtacaatggctactgtaggagatagaggtcgaggtaatggacctggtggctttagaaatgaaatgatccgttatcctaacggaagaatggcactaacacctaacaaagatacaacaacattcttacctaaaggctcaagtgtatatagtggcgcgcaaacacatgctattttatctaattcaggatatgacactaagaagaaaaaactacctaaatttagtaaaggtactaaaaagaaagacggtatattagatgttattagctctggtgtaaaaaatgatgttaataaagtaaaagacattggtggtaaagcaagagacataggtggtactacgtttgacaaagcaaaagacataggtacaaaagcacttgataaagctaaagatgtgtctagcactgttatcaagggtattggagatgtttttgattatgtaggtcatcctatgaaattggtaaataaagtctttgagaaagttggttttaacctagactttatgaaaaatgcaccattaccatttgatttaatgacagctatgattaagaaacttaaaaatggtattaaagacttctttaatgaaggtttagactctgcaggcggtggagatggttcttcgttcactaaattcccaattactacggggtattatcctaatggtggtgctcctggttatagttttaatggtggtgctcactttggtattgactatggcgctccatatggtacaactatcaatgctaccaatgatggaaatgtaaaagctatccacaacttaggtggaggacttgttgcacgacttttaacaggtcagttcacattgttctttatgcacttatctaaaatattaaaacaaggtaaaatcaaagctggagaaccaatggctaaaacaggtaattcaggtcaatggactactggtccacacgtacacttccaagttgaaagaggtcgccatgatgacatcacaaacagagggacagtaaaccctgctaaatggctcaaaggtcacggtggtggaaaagttggtggtagtggttctgtaaacgcacgtagagcaattcaaagagcacaatctattttaggtggacgttataaatcgtcttatattaccgaacaaatgatgagagttgccaaacgtgagtctaacttccaatcagatgcggttaataactgggacatcaacgcacaaaaaggaacgccttctaaaggtatgttccaaatgattgaaccatcttttagagcatatgctaaaccaggacacggaaacatcttaaatccaactgacgaagctatatctgctatgcgttacattgtaggtaagtgggttcctattatggggagttggagaagtgcatttaaacgtgctggagattatgcttatgctacaggcggggttattaacactgctggattatataatttggcagaagatggataccctgagatagtaatccctacagatccaagcagacaatcagatgcgatgaaattgttacatcttgctgcaagtaaaattagtggaaataacagaaataaacgacctaaccaattacgtacacctaatgttactagtaatacagttgataatgcagaattactactacaaatgatagaaaatcaacagaaacaaataaacgtgttaatggaaatagcacgaagtaataaaactattgaaaaacaaccgaaaggtttttcagaacgcgatgtaagtcaggcacaaggttcaaggttaagactcgctgcttatagccagggaggtttataaattggaaaataaaaaagtaaaaatatttaacgatcatttcgaagaaacactaacggatattcctcatcttaagtttctagaatttgaagaagaggatttagataggaagtccaatcagattgaagttaatggtagcgatggcgttttacaaggaccgatgaatttcggtcctttcaatttgatactgagattttcatataaaggcacggattataaagaatatagattagcaaaagaaaagttacgtcaattgataaataggagagatccttatttcgtatggcattcagatatgccaggtaaaaagtatgcagttataccagagggtgtcagtaatgaaaacttaacaagtcaattcggacttattgaggtgacttattctgtctacaaaggatatgcagaatcattaaaagatacttctgaatttagttggactgatgaaagttggcaatttgaacaaggtgttataggaagtgatgaagttaaatataaacacaatattcgttactttaaaatatttaacggttctaaagatactattaaccctttattaagacacaaattaaatattaattgcacacttacagcacctta

SEQ ID NO: 4139 - DNA, 3536 bp, Artificial Sequence
  Description of Artificial Sequence: synthetic nucleic acid sequence
gactataaacttttggatgattatatttatatcaaaaccagtgatttaactttcggtgaaaaagattttaatattgaagttcagtttaatgattataactcagaactggtcttcgctacttatcctaatcataattctatagttgaattgaaaaggcaaaattttaaattagaatttaaaaatcctaaaaataaaaatttaaagtcaaattctactaaaacaaagtatatatcaaaaaatccgaaacaagtattaattaaaaagaatataaaaaaatactctgatacagactttaaaatagcacaaagttctattagaaagggaagcctaatcaacattattggtatagatcattcaacaaaggggactcctagattgattactgacgatcaatattttatcacggcaaatacagattttgtttctccttctattaatataaataaagaagggtatatttgtgacactcccaaaaaaatcaaagtattaaaaaaatgtaaattgtaccatgacgtttcatttaaaaatgatcatttaggtactttaaaaccgggtgatgaaattaatataatagatattgcttatacaaaaaatctaacaccacgtttaaaaacacaagatggttattttataactgctaataaaaaattcattgaagttttaaattaatggaaacactcgtgcactcagattattttttaactgagtgtatttttaattttaaagtattaaattattgtatacaggcttatgtttaaattgtaaagttgtaaatatagatacaatttttatctagaactttgatattactaaatgataataagttatttacacaatataaataaattgaaaaactctaattttttagacttgactcaaaataaaaatggaaacatgatatactttaaaaaagaggtaatactaaaaatgatagataattggatagatgtattagatgaaagtttagtcaaagatttttataataatcaaacttccgaagagcaacaagaaggacttgatactacactgtcttttggcacggctggtattagagggaaattcggtttaggcgaaggccgattaaataagttcaccgtatctaaagtagcgttaggctttgcccattatttaacatcaagtatcgcgcatcctgtcgtcgtcatacattatgacacaagacacttatcacctgattttgctcaaattatcgctaatattctagcaagtcttgatattaaagtttatcttgctgatacatacagaacaacacctgatttatcatttgcagtcagatacttacaggcggatgcgggtattatgattacagctagccataatcctaaagattataatggaatcaaagtgtatggagaagatggtgctcaattatcaaccgacgattccgcacgactaagcacatatatcgataagttaggtcatccgcttcatattaatttacctagtttaactactgaacaacaaacattaattcattcagtcccgagcgaagttagagaagattatttcaaaaacgtacaagacttagttggaactattccacagtctgatttgaaagttgtctttacaagcttgcatggtacgagtgtgccagttgtacctgacatcttatcttctcttaactttaatcaatttgagttagttgcatcacaatgtgaacctgattcagatttcagctctgtagtcagtgcaaatccagaggatcataaagcgtttgatcaatcgatagaacttgctaatcatattgatgctgatttacttattggcacagatcccgatgcagaccgtttaggaatagttgaacgtgatgctgaaggtaacatccactattacaacggaaatcagattggtgcacttttgttaaattatcgtatcaaacaaacagaaggattacctaacagaattatgttccaatcaattgtaagtggtggcttagctaaatctcttgctcaatatcataatgtcaatttcaaagaagttttgacaggttttaaatatatcgcagctgaaataagacatctgtctcctgaacaaaactttatttttggctacgaggaaagttatggcttcttagcccgtcctttcgtgagagataaagatgcgattcaaattgtgccattaatgattaagtatgcagctgaattaaaaaacaaaggacgcatgcttaaagatgaattagaagacattactcgaaatgtcggtaactttaatgacaagcttttctcacatacatttgaaggtactcaaggcaaggcaaaaatcgaaaatattatgactcaattcagaagtgaaacaccttcggaaatgtgtggtcttaaagtcattgcaatcgaagattttgaaacaggtaaaaagactgacttacaaaatgatgaagtcagcgatataactttacctaaagcgaatgtaataaagatatactttaatgaaggatttattgctttgcgtccttctggtacagagcctaaaattaaactttatgtatcactttcttgtgaccattttgacgtagttgcacaaaaaatgaatgatgctatatttaactcttaagtagaataaggtggaaatgtattctctttgcaatcttgaaatcgaaatagaattaaaatagttagtagaattgctaggttgaactctcgatattgggtactattctttctagtaatcaaaacttgatgacaatgaatactcaatccaatcatccactataaatacgtaaaatgcctaggacaaaatagttgtcccaggcattttttattgaatttaaatatctagttgtttaatgaatgcttttaagtcttgactcatttctggatcttttaaagcatattcaatcgttgttttaacaaaccctaatttttctccaacatcataacgattaccctcaaaatcatatgcatacacttgttgtttgctattcattcgttcaatcgcatcagttaattgaatttcatttccagcaccttcttgttgtgtttcaagataatcaaaaatttctggtgttaatacataacgacccatgattgctaaattagacggggcagtaccttgtttcggcttttctacaaattgacgtacttcatatcgacttccctctttagcagaaggatcaatcacaccatagcgatgtgtatcagattctggcacttcttgaacacctattactgaatggcctgtttcttcataaacatccattaattgtttaatagctggtgtatcagactctacaatgtcatctcctaataacactgcaaatggttcgttacctataaactgttttgcagtatgaattgcatgtcctagccctttttgttctttttgtcgcacgtaaaaaatattagctaaatctgttgaatattgtactttttcaagtaaatctgcttttcctttactttcaagtactatctctagttctttttgattgtcaaagtgatcctcaattgcacgtttatgcttgccagtcactataataatatcttctattcctgcattaaaagcttcttctacaatatattgaa

SEQ ID NO: 4140 - DNA, 2927 bp, Artificial Sequence
  Description of Artificial Sequence: synthetic nucleic acid sequence
ttgtataattagtggaggatagtggggagatgtggtaaattataaataaggtgaggtgataaaaaatgttcatgggagaattcgatcatcaattggatacaaaaggacgtatgattataccgtccaaatttcgttatgatctaaatgaacgttttattatcacaagaggccttgataaatgtttatttggttacacttctagaagagtggcagcaaattgaagagaagatgaaaaccttacctatgacaaaaaaagacgcgcgtaaatttatgcgtatgttcttctcaggtgctgtagaagtagaattagataaacaagggcgtattaatattccgcaaaatttaagaaaatatgccaatttaagtaaggaatgtacagtaattggtgtctcaaatcgtatagagatttgggacagagaaacttggaatgatttctatgatgaatctgaagaaagtttcgaagacattgctgaagatttaatagattttgatttttaaatggaggaatttagatgtttcatcatgtgagcgtcatgttaaacgaaaccattgattatttaaatattaaagaagatggtgtgtatgttgactgtacgttgggtggagcaggacatgccctctatttacttaatcaattaaatgataaaggtagacttattgcgattgatcaagatttaacagccatagaaaatgcgaaagaagttttaaaagaacatttgcacaaagtcacttttgttcataacaactttcgagaattaacaaatattttaaatgaattagaaattgaaaaagtagatggtatttattatgacttaggtgtttcaagcccgcaattggatgtgcctgaaagaggctttagttatcacaatgatgcgaaactagatatgcgaatggatcaaacacaatcactttctgcgtatgaagtagttaatcaatggtcttatgaagcattagttaggattttctttcgttacggtgaagagaaattttctaaacaaattgcacgcagaattgaagcccatcgagaacaacaacctatagaaacaactttagaactagttgatgtcattaaagaaggcataccagcgaaagcaagacgaaaagggggacatcctgcgaaacgcgtgttccaagctattcgaattgctgtgaatgatgagttatcagcttttgaagattcagttgagcaagccattgaatgtgtgaaggtcggaggtagaatttcagttattactttccactctttggaagatcgtttgtgtaaacaaattttccaagagtttgagaaaggtccagacgtaccaagaggtctccccgttattcctgaagcatatacacctaagttaaaacgagtaaatcgtaaaccgattaccgctactgatgacgatttaaacgaaaacaatcgagcacgtagcgccaagttacgcgtagcagaaatattaaaataaggagtaagtgtaatggctgtagaaaaaatttatcaaccttatgatgaagcgacacaaaccagtatcccacaaagacaaccacaatcgagtcctgaaaaacaaaccgttaaaagaaaagttgttgttcaacttactagatttgaaaaaattttatacatagctttaataactgtaattgctctaataagtatttatatgctatctttaaaaatggatgcgtacgatacgcgaggaaaaattgcagatttagatcaaaaaatagagaaacaatctagtgagaacagcgcattaaagtctgaaattaagaaaaattcttcatatgaacgcatttacgacaaggctaagaagcagggcatgagcctagagaacgacaatgtaaaggtagtgcgtaataatggcgaagcgaaaaattaaaattaaaaaaaataaaataggagcagtcctacttgttggtttattcggactgctcttttttatattggtgctaaggttttcttatgtaatgattactggccactctaatggtcaagatttaattatgaaagccaatgagaaatacttagtcaaaaattctcaacaaccagaacgaggtaagatttacgatcgtaatggtaaagttttagcagaagatgtagaaagatataaacttgttgcagttgtggataaaaaagcaagtaaagaaagtaaaaagccgcgacacgtggttgataaaaaaaagacagcaaaaaaattagctgaaatcatagatatggacgctgacgaaatagaaaaacgacttaataataagaaagcctttcaaatcgaatttggtcagaaaggtactaatttaacttatcaagaaaaagaaaaaatagagaaaatgaaattacctggtatagcactttacccagaaactgagcgattttatcctaatggtaattttgcctcccatttaatagggatggcacagaaagatcctgatactggtgaattaaatggtgcattaggtgttgaaaaaatatttaatagttatttaaatggatcaagaggtgcacttaaatatatacatgatatatggggctacatcgcacctaatacgaagaaagagcagcaacctaaacgtggagatgatgtacacttaacaattgattctaatatacaagtctttgtggaagaagctcttgatgacatggttgaacggtatgctccaaaagatttatttgcagtagtaatggacgcaaaaactggtgaaatacttgcatatagccaacgtccaacttttaatcctgaaacaggtaaagattttggcaaaaagtgggcgaacgatttatatcaaaatacatatgaaccgggctctacttttaaaacatacggcttagctgcagcaattcaagaaggtaaattcaaaccggatgaaaagtataaatcaggtcatagaaatattatgggctctgaaatttccgattggaataaaactggttggggacgtatacctatgtc

SEQ ID NO: 4141 - DNA, 3285 bp, Artificial Sequence
  Description of Artificial Sequence: synthetic nucleic acid sequence
gtacttctaatttacttagtatgttacttacatgagtttttactgttttgatggtgatatgagaggcgcttgcaatctcttggttagagtatcctttagctataagtaataggatctccatttctctttctgtcaacatttcataaagctcggcacgttttttcatacgattgcgcatttttactaacacttctggttcaaatactgattcaccttcatacgttttacgcacagcgtcagctatatcacttgcacttgttgtctttaaaatataactatctactccagaatcaagtgcacgataaacttctttatcctctataaagcttgttaacatgactactttaatttgaggtaaatctttttttatttcagtagttgcttctacaccatccatatcgtccataagtaaatccattaatattaaatctggttttagctcatgcgctttagtgatagcatctttaccagaagcaccctcacctactacttctatatcttcttgagttgaaagatagcttgaaataccgattcttaccatttcatgatcatcaacaaataaaactttaatcgccacttgaattctcctccttattcaatggtgccttaacttcaattcgtgtacctgaatcaggtaaagatacaatatgaaacgtcgcaccaatttctaacgctcgttctcgcatatttttcaaaccataactttgttcaaatttttcatctacattaaacccttttccattatcttgaattcttagtaaaagataatcctcttgattaaataattccacagttacttttgtaccatttgaatgtctcaatgtatttgaaatagcttcttgtgtaattctgaacaagtgatcttcaatgccttttggcacttcaaaatcttgaatttcatgcacaactttcattggtactttcttttgtaaatcgatgactaaatctttaattccttcacctaaagacttatcttttaaacctatcggtcttaaatgtaataacaaagctctcatttcaagttgtgagtcttgaaccattttttcaagaattggtatctgttgatttaaaggtggttctaatttcgactcttttatcgccgatagcatcatgctcgcagcaaataattgttgactaacagaatcatgtaattccctggcaagtcgttgtcgctcatcttcgataatctttttgacttttacatcattaatattgtagttttcattagttaaattttgagtcttcattctaagtcgatgtaattcttgatttaatggaactagtgtatgataaatatctatcgtttctgtatataattcgatattttgatcattgatacctactgtttgtccttctattgatctttctatttgtgaaataatccaatcattttgttgattaattttataagctaaaacagatccaactataatacataaaagaacaattaataaatttaaaaatagaaaaacaggtattccaaatatttgtgtataaaacatcccctgaaaaaagataatatttacaaacactttatcaataaataaaaaagcaataagcatactatatactaatataagcattgagcctatagctcttatgtagtgattcatctgtaaatcacctctacgtctccaatgaatgatgaaacgtaaacattaacagtataattatcatctttcgttttttcttcaatttgaacatggttattctcaatcttataagatttatcgttcacataagcagtgccgtagaagagagtcgcatgtaaatttatattataattaagaggtacaactacttgtactttacctaaaatatgacgcacaactatggtatttgtttccttaatatttgccgcttttgtcatatcaatgtgtatgtctcctataccgtgttgaatctgtacgtcttcccatttatatacatacactggtgtatgttgttcaccaaaccatttttgcttaataaaaatgggtgatgtgatttcttcatctgtagcaatcacttttaaaggtctaaacttataaaccaaataacgtatgatgactactattaaaaatataaatagaataattatcgtgtacttattagacaaaagtgtaaaagcaattaataaggttcctatccaaaaagatagtagtcctcttactttatgaaaatacacataccctacatatacaagtacacatcctaataggagtactagtaaaaagccaattttttcaaaaaatatatagtaaaaattagcaataatcattaaagcagtaaaaataatcaacatttcagttgatatatatttgcgtgtcatatttcgccacctttctatgctacagcactcatatgatatataaagtggaatgcttcttcagtagttattttcattctagattgtaaatttatatccgcttcaattctcgcataataagactcagcatcatttaattgtgatttaatcatatcaatatcattatcatgtatttcctcagcacaatagattgcttgattgtttactaaatctatatatttattttctaatgagagcgtgagggtgtcaattaacttctttaattgtaatcttttttctcttaaataattaatataagtatcaatatttttaatttgcttatctaatgacattttatagtcattgatactttttttagtaattcgttttataaattgttgtaaatataaatctaaaatattcaatgatatcacctcgtcactgattaagctttattataaaacaattccgaaacctaatgaaataggcttcggaaccatatatgcttcatactttagtctgacgagatatgaaaaaagtaaatcataatcttaatttctaatttgaattactaatatttaattaatcatcaatcttagttgtaagtaacggaccatcttttgtaactataaccgtgtgttcaatttgagcgacataacttttatctttagtttcaaaagcccattcatttttaccttcagttacaaatgtagcatgtgttgatatgaatggttctactgcaatgacttgcccttcttttaataatgttttatctttaggatcaaaataattcatgacatgattaggtgcctcatgaagtgattgtccaacaccatgtccagttaaatttttaatcacagtcaagtcattttggcgtgcagttgcatgaacagcttttccaatattacttaattttgtacctggtttcacctttttcatagcattttcaaagttggaattatatttttaattactggaattatatttatgaattatgt

SEQ ID NO: 4142 - DNA, 3271 bp, Artificial Sequence
  Description of Artificial Sequence: synthetic nucleic acid sequence
aaacattagggttatcccaaccttctcttaatgtccattttgaaaataaaaatcttcttgtaatccagttaccattctcgtctttaaaactcagcattttttctttatttttaagtatatcattaacttcagcctgtattgcttcatcaccggaacctctgtcttcaccaaaataccctgcatggaccatttgattctcactattaagactatcatatgtcactcttaaaaaatctaagtattcaatctctcgtggtaattttttaacttcaaattcttttattaattttctaagtttaacttttaagagtctctcaaaagtctgtttcaaccagccctctttgtttctatatgacctaatagaatcaataaaaaataatgatagtgtttttacttttggttgaaaattttcttttaggttatctctcataaaattattgatttcatgctcaaaatgttgattgatagcatcattaataattaattcctggtaattagttgtaaatgtgccaggcaataaatccatacctttactaatttctaagtcattagataaagttttagcaccagaataacttaagtcaccttcaaataacgaatctatatttgctaaattctcgcctatacctagcgtccatttattttttccttttttcaaaactatctctttggcttttacactatcaatggtatatctatttttcgcttgttctggagtcaaatttggatagtaaatatctattccctttacaagtccctgattaaagctgtcaacagcattcaattcaaattgaggcctacctcgataataatctttaatatatacagctttttttcctgttcctttttttacttcaggaaaagtagcaccaaacctaacaatcatttgaggttcaagattttctatagatttgtagttcttcttatccctaggaaacctatggggttcgtctattataactacagatttggtagcttttaaagcttctatagggtttgagtaattacttaataaagtttggtcgtaatcaacctttgtcatatttgatgaatttaacatacctgcattaataagtaatacttgaatttgattagcatttaaattactgctttcaataaagttactcaaatgaggtggaaaaatttttctgcctgatctagtattaaaatcgcctttatttattgtatttatttctatttcaacatttccgtatgtttcttggaaatgtcttttagttgataaactagttaaaaaattctttgctccctctttaattgcaggacttggaactactaatataaatttaaaaatcccaaattttttatgtaattcatacatcattttagtataaacatacgttttacctgtcccggtctccatttttatatctatgttagcttcttctgaatatctatttattattaaattattagcgaactcattgtcacaattttttgaagttaaatacttttcgattcctgtgaaagtatctattatttttttaactgcttgttgttggtgaattagttcttctaagaatattttcatattaaaacctctttattaaattaactttattatctaattgatccaaagctatttctaattctctagtttcctctaatccaaaagaatagccatatagtataatattttgcaataataatttattattacctattaaattaaccaattcttttgtatttttactacgccaaccttctttaattaaatacaaccttgaattctcaatataattagcttcgtagtcaaaaatggttagcttagatacttttgtattaaaatcatagccatcttgtactaaccaattttccattataacttcttcacctgttgctccgccttctaatcctaagttttcactagagaaaatatcaatcatattatcaaataaatcaagaccaatattttcaaaattatcaattttttccaaaacactgattgggggagttactacaaagtaatgtctatataattctaggtttttttcactatttttttcataaattttatttatacgacttaaagttaattcatcaatactcttataacctaattcaaatagcctttcattagaagcaacaggaactttcacattgttttcagtaacactataagttttctctggaatttgaacgataatatattttctatttgttttttcctttatgttagcttcaattaccgcttcagctgtcgtacctgatcccccaaagaaatctaatattattgaattttcatctgaaaagtatctaactaatttttcaacaaattctactggttttggacttgtaaataaagactctgttcaatttcgatcgtttattattggttctcttgtgtaccttattctcgccacgatttgctattttttgtttcttcaaggcaaattataaggctatttacagtctgagttgatttagaacaatggtaaagttaacttaactaaaataagtttgttatttatattatagaaaagaaatctaaaattaatattaatgatttatactagtttgaatataaatattaaatgagggactcaaaattcgtataaatatcttagttgttcactaataacgagatttgaaaatcatgatagattgaggtatatgtttaaatcaatcatcgagcgcacttactaaaaaagtctgggacataaatcataatgtcccagacttttttactgtctattaaacagtaattttgttgaacttacataatcaattttaatactaatgttactataataagtataattaataataaatcaatgcctaccataatagtatatcgtgtaggtttttggccttgctgcttagctaataccattgctttataatttggaagtaaactaatgattaacaaaataattacaatgagtccgataataatagtcaagatgagcgacctccattttttctatttaagaactcccatatgacaccagcaaacacacctataattagtccggcaatgatacctatacgcggagtgaaaaaaattgctccgaatataaggcatataaaaagcgcaataggcaaagttgtaccataaataagtttacgttctgacgaacttaaaattgtaaatacaatgatataaatgacaaagaaaacaatagctgcaatgacagttcgtacaataatagacgatattgaagcctctttcatagtcaataaattaagaattaaaaatgcagtcataaatattaaagaaaatttgattgcacgtataacaagcgctttattc

SEQ ID NO: 4143 - DNA, 3310 bp, Artificial Sequence
  Description of Artificial Sequence: synthetic nucleic acid sequence
taacgttatgcataacgttaagagttctgattggctctcacaaaacttcggtgttcgctttagatataatgcacttggagatatcaatactcaaaatatcgtttcaagcaaagatagttttggtattactaaaggggtacaatcagtttcgatgcacgcaggttcaacattagcaataactgatcctaataaagctaaaggcattatttatatgccggaacatttaacacatagtcaaaaatggtctcacgcagttgatcaaggtatttacaatgggggtggcatcaacgaaggaccttatgtagccatttcaaaaatcggcaaaggtaaagctgcatttattggcgatagctccctcgtagaagatcgttcacctaaatatcttcgtgaagataatgggaaacctaaaaaaacgtacgatggttttaaagaacaagataatggaaagttattaaataatttaacaacatggctaggcaaaaaagaatctcaatcttcctatgaaagacatggggattaaacttgataataaaacaccgctacttaactttgagcaacctgagaattcaattgaacctcaaaaagaaccgtggactaacccaatagaaggttacaaatggtatgatcgttcaacatttaaaacaggtagttatggaagtaatcaacggggtgctgacgatggagtagatgacaaaagctcttctcatcaaaatcaaaatgccaaagttgaattaactttacctcaaaatatccaaccgcatcatccatttcaatttacaatcaaactcacgggatatgagcctaatagcacaattagcgatgtaagagttggactttataaagatggaggtaagcaaatcggtagcttttcttctaaccgtaaccaattcaatactctcggctatagtcctggccaatcaattaaagcaaatggtgcgggtgaagcttcattcacactcacagctaaagtgacagatgaaattaaagatgctaatattcgtgttaaacaagggaaaaaaattctattaactcaaaaaatgaatgaaaatttttaacaccgataataacatagtgttgaaaagtgagacattgtttttaatttatatatcacaaaactatgtctcttccccgtacttgaggaggttaattcaatgtctcaaattgcgttctatatccttagtgatgttcacggttttatattcccaacagatttttcatcaagagaaaaagatttacctatgggtttgttaaaagctaatcatctaatcgaacaagactgcgtgcactatgacggcagtgtaaagatcgataatggggacttcttacaaggttctccattatgtaactacttagtatctaaattaaagagtagtctcccattaacatcaatatataatcgtttagggtttgattttggaattgttggcaatcatgaatttaattatgatttaccttatctaaaacaggccatcaatcaacttcattacccagttttgtgtgcaaatataattgaaaatacacagccattcactggccaaggtattcattattttaaagtaaatgatttaactataggaactattggattaaccactcagtatattcctcactgggaacaacctgattacattaagacactcacttttaacagtgctgtccacatattaaaatctgagttacctacacttagggaaaagagtgatattgtagtagtaagttatcatggtggttttgaacgtgatttagatagtggcctcccgactgaggcgcttactggggaaaacgaagggtatgatatactaagtcagtttagcgatagtatcgatgtgttgataaccggccatcaacatcgtgatattgcgacaatcaagaaccaaacagccatcattcaaccaggttcaaaaggtacaaaagttggaaaaatagttattgaatatacacatgataaaaaagtattaattaaagaatgtaacttaatgaatgttaataacaatacctcctttaagccgaatgtcgaagatatcgctttacgtaatcaattggaagattggcttgatactcaaatcgcagaactcccctacgctatgagaataaacaattcatttgaggcaagaaaatcaccgcatgcatttgttaaccttcttaattatattttattagaaaaaagtggtgcagatattgcatgtacagcactatttgattccgcaaatggctttgatgagaaaataaccatgcgtgatatcatcaataattatccttttcctaatacttttaaagtgattgaacttagtggaaaagatattaaacttgcaattgaacgaagcgcaagttattttgacattgttaatcataaaatcacagttaataaagagtttctagaacctaaacctcagcatttcaactatgacatatttgcaggtatccaatatacaattcatgttagtcatccttacggtgaacgtgttagtgatttactaattaatgatgcaccaatacaaagtgatcaaatatatacaatatgcgtaaataattatagagctgttggtggcgggaattatgatatgtacgttaacaaacctgtgataaaagatattcaaatcgaaggtgctcaattgttaatagattacttatctcacaatgatttatcacaaatcccacaagtgattgatttcaatgttgttaagtaatccctagttctattaaaacatcatcgatgaaaagtttgattgcataaagaaaaatccttatagaggcgtcgccacacttctataaggattttttaataatcatgaatattcattaaatgtgatatgtttcttttcataaagttgattaacaagattaagaagcatacccaacactataatcccaccagatatcaaagtaatttgaatgtaaggtaaccctattgataataatatagatccaatgattgcaccaagaaaattagcaacattgaaaatagaagcagctaacgtacttgcaagaagtggtgcttcttttgcacttaagataattttgctattaagtaacggtgttgtaccaaatgtaccaaaaccgaataagaagcaaatgattaatgctaatattgaattttgaataacagtaacaaatagtatgattgttacaaatagtaaaagaaatgtaaggtataaattttttgttaatttatcttccggtacattaccagtaattaaattccctatcacaccgcctagaccaaacataaataaacaaacagttaaacctacaattttaaatggagaaaaatctcgtatcattggctccataaatgtataagtagtaaaca

SEQ ID NO: 4144 - DNA, 3444 bp, Artificial Sequence
  Description of Artificial Sequence: synthetic nucleic acid sequence
agcaacacctgatcaatatgagttattacaacaaattaaacagtatgaatatacattatcaagatatataaaacaatatatcgaacatcagaagaaacaacttaatcacatatcatcatattacaaatttaagcaaccgagtttattgtacgatcaacaaattcaaaaacgagatgaattagaaagacaattaaatcatctattaaatactaaagttgaaaagtcaaaacatcacctcaagttacttcaacaaagttttaattttaaaaatttaaatcagcagattactcaggaaaagcaatctatttatcaattgcattctagattgtccaaaataatgtccaataacattactaatttaaaaacagtgctaaaaaacaaattagaaagtcttaataatttaagccccaccaatacgatgcttagagggtacgcaattgtcaataaagacaatgaagtggttacaagcacacataaattgaatgaaaacgaccaaatatctttaacaatgaaagacggaagtgtcgatgcaacggttaagaaagtaaggtgtaatgatgagtaaagaaaagcaaagtttcgaagaaatgatgaaagaacttgaaaatatcgttcaaaaattggataatgaagcagtttctttagaagaatccctcgatttataccaacgtggtatgaaactatctgctaattgtgattcaactttaaaagaagcagagaaaaaagtgaatgaattaatgcaagaagaagttggtgataaaggaaatgaagaaactacagatgaataaattaataaatataattaatacatcactgaataagtcaatacaatcatcaccattaaaaactaatttagaagaaagtatgaaatattcattaaatgctggtggtaaaagaatcagaccagtcatattattattaacactaaaaatgcttaacaaagattatcaacaaggactaaatagtgctttagcattggaaatgattcatacttattctttaattcatgatgatttaccagcaatggataatgacgattaccgtagaggaaaattaacaaatcataaagtttatggtgaatggaaagccattcttgctggtgatgcattattaacaaaagcttttgaattagtttctaatgatactaccattgaagatagtgtgaaagtaagtattataaaaagactttcaaaagcaagtggacatttgggaatggtgggtggccaagcgcttgatatggaaagtgaagggaagtcaattcgtttagaaactttagaatcaattcatgaaactaagacaggcgctttactaaatttttcagttatggctgcggtagacattgctcaagtagaacaaaatattgctaagaatttagatgaatttagtcatcatttaggaatgatgtttcaaattaaagatgatttactggatgtgtatggtgatgaatcaaaacttggcaaaaaagtaggcagtgatatagtaaatcataaaagtacttatgtttctttacttggaaaagaaggagcagaagaaaagttaaacaatcatcaatatcttgctatgaactgcttaaatcaaatttctgatcaatatgatacttctgaattaagtgatattgtagatttattctataacagagaccattaatttataaaaaaatatactatatttagaatgtctattttaacgttataacgcatttatatctataggttgtcttcatagcttatctatgaggcaatcttttttaattcttcaatttatatacaagaattattcacatttttatttctaaacacttattttagtattattaattaggaaaatgattttgtaataaatactgatatagtgctcgttagatattttaactttacaatttcaaaatagtgtttagtagtagttcagaactccatgtgttaaaatcaatgtataaatattcgtaatttgaggtgttaattgtgccaaaaaagtcagtgagacatataaaaataagagagataatttcaaatgaacaaatagaaacacaagatgaactagttaaacgtttgaatgagtatgatttaaatgttacacaagctactgtttcacgagatattaaagaattgcaattaattaaagttcctgcacctacagggcaatatgtttatagtttaccaaatgatcgtagatatcatccattagagaagttgggtagatatttaatggattcatttgtaaacattgagggtactggtaatctactagttcttaaaacgcttcctggtaatgctcaatccattggtgctatacttgatcaaattgattgggatgaggtacttggtacaatttgtggtgatgatacatgcttacttatttgtcgagacgaagaagcgagtgaagaaatcaaaactcgaattttcaatttattataaggatgcgatgaatttatgttacaaaccttatcaataaaacaatttgccattattgacgaacttgatataaacttttctgacggtctaacagttatgagtggtgaaactggctcaggaaaatctatcattattgatgccattggacagttaatcggtatgagagcttcttctgattacgtcagacatggtgaaaagaaagcaattatcgaaggtatctttgatatagacgagagtaaagacgcaattaatatactagaatcattagctatagatgttgatgaagattttttattagttaaaagagaaattttcagttctggtaagagtatttgtcgtattaataaccaaactgtcactctacaggacttaagaaaagtgatgcaagaactgcttgatattcatggtcaacatgaaacgcaatctttacttaagcaaaaatatcatcttcaactattagatgattatgcagacaatcagtattcagatttacttaatcaatatcaactttcttataaccaatataaaaataaacgtaaagaattagaggaattagaatccgcggaccaggctttattacaacgattagacttaatgaaatttcaattagaggaactaaccgaagcttcactgaaagaaggcgaagtggaccaacttgaatccgatattaaaagaattcaaaactccgaaaaattaaatctagctttaaacaatgcacatcaagttctaactgatgaaagtgcaatacccgataggttgtacgaattaagcaactacttgcaaacgattaatgatatcgttccagaaaaattcgtaagattaaaagaggacattgatcaattttactatatgctagaagatgcaaagcatgaaatttacgacgaaatggctaacactgaattcgatgagcaagttttaaatgagtatgaatccagaatgaatttacttaataatttaaaacgtaaatatggtaaggatattactgaacttattgcttatcagagtaaacttgcaaatgaaattgataaaatag

SEQ ID NO: 4145 - DNA, 3758 bp, Artificial Sequence
  Description of Artificial Sequence: synthetic nucleic acid sequence
gtaatttaaactctggcttaggtaaatctttcccttcacgttttcttaatcgatacattgctagtgacacaaacatgaatgcaacaagggtacctgcggaaatcaattgtgctaagaaagcaaacgggaacattgatccgataactacgccaatgattgtaagtatgacaagtgctcgattaggtaaatgtttgtgattcaattgacttaaccaagaagggagtaaaccatctcgtccaaatgaatataatagacgtgaacctgcaagcatcataccgattaatgcagtgaacataccgatgacagaaattgcttgaacaattgcagcaataataccatgaccactttctcgtaatgcccaacctactggctctgcattatcagcgtattgagagtagtggaacatgccaacaagaacaagtgctacggccacaaacaatacaattgctactatgagtgaccctaagattcctctaggcattgtcttctgtggattaatcgcttcagctgaattagcagcaatagagtcaaaaccaatataagctaaaaaaatcattgaaactccagcataaataccttgccaacctccaaagtcgccagtttcagtaactttatgttctggaataaaaggtatatagttactgaaattaatcgcagttagcccaacaatcacaaataaaatgatggccaacacctttaatataaccaatacattttccatacgagcggcttcgttcattccgcgtgataatagtaatgcagttaaaataatcactacagcagcaatgatatcaatgacaccaccgttacttccaaatggattagataatgatttaggtaaagaaatgcccaatggtgcaataagacctcttaagttagcagaaaagcctgaagcaacgaaagcaacagcaataaagtattctgctaaaagcgcccaaccggcaacccatccgaataattcaccaaaaagaacattaatccatgaataagctgaaccagcaaaaggcattgtagatgccatttctgcataagtaaaggctacaagacctgccacaatagcagctaataagaatgacaatgaaacagcaggtccggcatgctcagccgcgacaacacctggtaaagtgaagatagatgtagaaacaattgtaccaacacctagtgcaagaaagtcgcgtacacgtaatgtgcgtttaagatgcccatctttactttgataagaaggttacgttaatttgtactgtctagagcaaactttggcgtacttgtgttggaagtcatttatcgaaccaacgacatgtgatgggttacggattgattatgaagctatataagataatataaactaagcctgagacaccgatgagtaatctcaggcttttttacgtattgaaagtgattgagtaattaaatagggtggatatcaaaaatgatgttggtcgatatgttaggttctttaagagaatgcaatgccaggctcaatatcgacgtagttatgaagcggtgtgtattttaaatggccgttagtatcatgtataaacggactattggaactcaacttttaaaattgatatagtataatataaaggaaatttagaggacgtgacgtttcgatatttgaataactgtattaaggaatatcgaaactttaaaatatctacgcaatttaggataaaaaatcaacattgagtgaaagccaacttagtcgaagcatctcaataaagcgtaagacactcgagttcccccacacccctataaacaaaataactatggtacatatgagaaaggatgagtcgcttgatacgtatgagtgtattagcaagtggtagtacaggtaacgccacttacgtagaaagtgagaaaggtagcctactcgtcgatgtaggtttaactggcaagaagatggaagaacttttcagccaaatcgacagaaacattaaggatttaaacggaattttagtgacacatgaacacatcgaccatattaaaggtcttggtgttttagcacgtaaatataaacttccgatttacgcgaatgagaatacatggaaagcgatagagaagaaagatagccgcattccaatggatcagaaatttatctttaatccatatgaaacgaaatctcttgcaggatttgatatagaatcatttaacgtgtcacatgacgcgattgatccacaattctacatcttccacaataactataagaaatttacgatgataactgacactggttacgtttcagatcgtatgaaaggtatgattcaaggtagtgatgtctttatgtttgaaagtaatcacgatgtcgatatgttacgcatgtgtcgctatccatggaagacgaaacaacgtattttaagtgatatgggtcacgtatccaatgaagacgcgggtcttgcgatgagtgatgtcattacaggtaatacgaaacgtatatacctctctcatttgtcacaagacaataatatgaaagacctcgcacgcatgagtgttggacaagtgctcaacgaacacgatatcgatacagagaaagaagtattgctttgcgataccgataaagcacaagccacaccgatttatacactataattgaatagaggtaagacaaacgacctacttaagtattacgcttaagtaggttatttttttggaaaagtgatcaggagaattgcagggaatgattatgtgttagtttaaacaggcttgcgcatgaacgattgattaaggaatttttttgaaatgaaagcgcatcatggaagggggagaacgatgtcttacacgctttgtgatttatattacatttcctagttgataaaaaagtaatgatgtaaaaatatgaataaataaaatattaagactctcataaaaacttaaatataaagttaaaatttaaaaacatttagaaattgtaacaaaataaaaattggcatttaaatattttttaaatatattgtatttatagttagtggccatactatttaatataaaagtgagtttctatgttcaacacaagtatgattcaacgtaataaatgatctaccgctgctttcatagttatgttgtaactcaaaacattgtcatgtgagactttatcaagtcaatatcatcgtagttaatatgaattcatttaattaatcacatgcttaattgaggtgaaagtggagcactcatatatttgattgaatgtcgtagtgatgattgatgagactcaggtaggggtgatacatatactgctagatgatagttcacttacataaagataatggtgatattaatttaggattaaaaagatgcgtgtggaaaataggatatcagtgacggtatttgaagtaagtgagtctaaaaggtctgaaatatagggaataattgtaaaaataacgttaagacaaccgtaaagttatccactgattaggaaatagttatccagaattgtgtacaatacacacataaatacccacattattcacagacttatccacaaattcacaatgaatttctttaaatatgtgtataattcctaaaaaacactaagaaaatgttaattcaattgttatactaagagggaaatgtgtgcataagtgtataacttgtggataactcgaataaatcatgtacttttggaggataaaatgaagattactatcttatcagttggaaaactaaaagaaaaatattggaagcaagccattgcagaatatgaaaaaagattaggaccttacacgaaaatcgaattaatagaagtaccagatgaaaaagca

SEQ ID NO: 4146 - DNA, 3169 bp, Artificial Sequence
  Description of Artificial Sequence: synthetic nucleic acid sequence
tatatttttcacatttgttcttaaataatcgtcaacctcaatacctctatcactaaatagtatacccactttttccaaacctatttgctgaacattaggctttctaccggttgcatccagtacataatctgtttcaatcatctttccagactcagtttctactataaaacgttgtgcattcggtttaactgacttggtattctcactaaagtaaaatttaacaccttcatcttttaacttttgaattaatttattgacgtgtgattcgttaaacccttcaagtgcatgatttgtatgatgaaccacattaacctctacacctgatttgatcatgatagaagcgaattcaatactgataatacctgctccaataaaagtgatactatccggtaaagattgcattgataaaaattcccgactatcatgcgtatattctttaccctcaatatctaattgatgactatgttgtccagttgctataacaatataatctgattgtaaagttgtattatttacctctattgtatgagcatctacaagtttacctttccccatgattacatcaattccctgttgttcaaacatcgatgtgagggtttcagacataggattaatgacttgttctttgtaatgcattaaattcttccaattcacttctaaattgtgactatcaataatattaggatattgtttggcttcttcaagcacttcataaggtccctctaataaaattttcgcattacaaccatagttagtacatgtaccggcgatggtatctttttcaactacagctacttgcttaccactttgctttaatgttaacgcagcatgccaagctgcatgaccacttcctaaaaatactacatcatattgtttcattaacactcatcctttcttatttttctatgagatgttttaatgtttgctctagttcttcaaacacatatttcgtttcatcatactcagtcgtatcaaattcttgtggtaagcaacttgaaattgcttcaaaaacagcttcttgttgttgttgcccattgtcagttaacgtaattatcaactgtcgtttatcagattgttgacgttctcttttaacccagccagattgctcaagtctttttagtaagggggttaaagtattactagataaatccaaatgtctaccaattgaatttaatgtttgaggattctcttcccataacgtcagtaatactaaatactgagaataagttataccaaactgttttaactttttctcataaaattgagcaaataaacgacttacattatatgctgaaaaacaaagctgattcgctaacctcatttgttcttgtttcacatctccacctcttttcaatcgtgcgcgattgattatagtataaaatgactcgcatatattcataatatatatgctcacaattaaaattttctcattaaaccatcaactataaagttaaagcgacttggaataatactatatccaatctaccctgaccactaatcatagaaaaagcccaagacactctgtgaggtcttaggctttccataagcgttatatttaaatttgatttacattttcaatgacagtaacatatccatttttaacattagctaacacagagaagtcattatctttgttactatcataaatgagttggcttgaatttctatcatccggttcattatacatacttaaaaattgatcttctgaaatatgattaggtgctacacctacgctaacaacttcattatcatcgtaggctacagctaaatcaccatatttttcgtaactccacttcaaactttctacagaaccattggatgttccaaatttatcttcaacttcttcacgtgtcattccattataaacacctctatatccacttgttgaagctgacttcatataaccttgatcaaagtcatcactaaaaacatcaatgcttggaccagtggattgatccttattttgaccactttcatttgattgctgagactgtgttgtttgatgactttgctcatcactaatataatgattgtaagtatagtacgcaccatacaatagcgctgctatcaacaagacaaatataattgataatacaattagccaaccagtatgtttttgttctttataaaatgttgaatcatgatgttgtctttcctcacaagaaatatacgattgctgttcacgcatatgttcaatttgattttcactttttctttgtgtcgatgtctttaaatgttttccacatttattacaaaatgactgttccttttttatcggatttccacaatgagggcagaatttcatttatatcacctttcctctaaacgattgtattcatcacgcaactgattcacctgagttagccctgctttcataagtataaatataaatagccatgcaatcataattaataagatatattttaaataaccactacttaaaagtgttatttccgtatcccatattccgtgtaatgtcactgccacaaaaaagaaaaatataaaacgtttatcgatgatattcgcccattcgaaatgctttgtttctttcactattactgccgcagcaccaacaatagctgcccaaacgaggtgactacctaaagctgtccaacctctttgtatagtgatttcagtaatattattaactccatcaaataaattaaatccaaacctaaagatataaccagctgattcaaacaccgcgaaccctgcaccaacagcagcaccgataagtaatccattgagtattttatttgtttttaaataattaataaataaaataacaacagttgcttttccaagctcttcaacaaatcctactatgaacgcatctgttatagtcataattccataatattgcgattcagtactaaatgtaacaaattgatataaaatcattgtactaatgagtgataatacaccaccaataaagaacatcctcattacatcaaagatactaatgtttttaaatgcattagattcgaagaagaagattaatcctgaaataggaactaatagtgcgccaataaatatcatacctggtatggcattggcattaccaaatatatttgttaatatccataacgctaggaaagtgatacctaaagctaaaaatacacgtgagaacacccaaggtcttccccactcctcggaaacttcattaata

SEQ ID NO: 4147 - DNA, 4102 bp, Artificial Sequence
  Description of Artificial Sequence: synthetic nucleic acid sequence
ttatcatttcaaacaaataatccatcagcataagtattgaagtttttgcaggatcaaagtgtatcttcacacattcagcatagccatcataaggagcatctaaacatttcgacgttccatttgcccttccagcttctgtttgaataactcctggaatcgtattaaaaaaagcttgagttccccatagacatccaccagcaaaatataccgtttccatatcctcactccctaaagcaaatgtgttaactcacttttcaatcataaagaattcaaaataaatctctcagttcattcaattacaatcaaaataagaaaagaacctgtacctatgattgatgtatcaggttccatattatcaacttgattactctgttcattctgtcttactatatcatcaataatttgatacccttcacaatattaataataaataatacaagcgaagcgataagtagaatacctccaataattactcctatcactagtacagcgactccatttgtcgaatcaatcaaggatagtccagcagcaaatgatataagtcctaataccaaacacacccaactcaaaatatggttaaataatgcatttcttgaatacgtagatgctggtggttgtccaacaatccatacgattaatggaaacaatacaggtgcgaaaaatacacttagataacttaaagcccctaatacatcacccgttttatcatgataacttttatcaaaattttccatacaattaatcacctcaatttaaatataaacacattctgagaattcatttaagtgatatggaatacaattacaatattgtaagtttcgatacaaaaatactaatgattaaccacttaatgcttgtactaatgcgtatttaaatgttgataccggcacagcattagcatgacgttgttgtagtgctaaacgtgtttcaaattgaccacgatgatttcctatctctttcaaagcgttactcaactgacttatatcatttacaagaaactgattttctattgcaacgaaatcttgattatgaacaacctctttatatcccataattaacaattgatgattatatgcgcttcttacagcattccctatttcgttcccctcattaatatctaaatagatgtcacattgttgatataaggtttgaactgtttgttctttaattattggatataatttaacattttcatattgcgataaacttaataattttgaagacatctcagttttagcgcctatgtgaaattgataatctttatgcaaacgtaccaacgtttcaacatgtggtatttgatctgaatttgttaatgttaatacattcttagaataatgattccgtttatacgtgtcatataagtaaccagatgcatatgctgcctgttgttcctccctagatagttgttccttgatcaatttgtattcattctgattagggacaataacggcaaagcgactttgaaggtttggtgataacatgactttcatatttcctgggacataaccctgagattgttcttgccaaaataaaataccttttttcaatgtcggcaaatgataaattgctaaaaatggtgttgataaagtattaaatataacttcttttatctcaatgcccatttcactcaagtaaaatttaatccactctgtatatgactcaaaaaaataagatttcccttcatattctacaactacatcgttagttacataattctcataaatcacttctttaccttcacgtgtcatatacttttttaatattgcattacctaacaaatcgtaaactgtttcagcaaatttaaatccttcttttgtataataatcaaccgaacgcaaacgctgttttgaatcaagccactctacatggctaactacacgtgtcttataatgttccttataaaagattttacctctaagctcacccatatctgtaatggtagccattgtcgcatctcctttaatttcccaaaaaggcggcgtatcaatatcattaaaaaaagcaggggtatcatcttcataaatttgatatgctgtgaaaaaacgatacggcgatgtcacatcatcaggtaaaaatccatcatcattaattacaattgtaaagtgattgtaaccagcacgcttaagagattgatgtaattcctgtgtttcttgattataattttcgaataaattaatcatatagcacctcttcaatgagttgtctccatagatcaacaatatgcgatgttttaaatgattctgcaatgtcatacgatacctcatgtgcccttatgggaccatcttcaaaatatcgaataatcatatgagcgatttgcgttgtgatatcatcagtagacgcttgttcaaaatctatcggtatcaaatagccattttgatgatgtcgaataaatgtcggactgccataattcacatcaaatccaatcatacctaaaccagagccaaccgcttccattaatgtcagtccgaacccttcactttgtgaggccgctatgaataattcatattgctgatatattgtacgaagatttctatgtcctttaatttgtatgtaatcctcagcacgatgtttggtaataatatttttaattttttcttgttcttctccttgtccgtagatatcaaaactcaattgaggtaactgatgtttagctttaatcacagcttccactatccaatcaacatgtttttcgttagcaagacgtgatgcggtcatgatggaatatggttttctttctttttcaggatattgtaacgattctatactacctactggaattgtacgtatacgtggacaatcattcttatattgtttaaattgttcacttagtgtctgcctttgcaaatctgtcgctgtgataaagaaatcaatatgctgtgcattttcgaattgatactcataataattattccataaaatgtgagtcccatcagtcgcaccttcactgaaatgttcagcgtgaacgactacgccaactttactggatcccttgttttctaatatggcttgtcccacatcagttgctcgatcaataataatgatatcctctgaattcaatagcaattgacgtataaagtatgcgacgagtgcttgtttactgtataaacgtgcatcatcaaacacaaaaacatgttcatcttcatctatatattcgcgatatgcaattgatccattttcattataaaattgacgcatatatattttagctttattgttaaaaggagcataatactccgagaatgttcttacatagctataaaaatctttcctaattaacattccattcaccacaaactctgcacgatcaacgtaatgttcgttagcattttttaaatagcaggttacgaatgtttgctgattatttaaatagagtcgtaatactttaccgttttgttcttttcgagtaacctcattacctaactctgaaattaaatcatcaactgtgtacgttgtaggagcgatttttacgtctgtgaagtattgatatagccaaataacttcatcatctttaaaccctatgttgcttgtgagtgtttgaatattttctgattgaataaaatctaaaaatataaattttgttggataaggtaattgccttaatagttttgctcgatacacttgtgcatattcaacaccactactggcccaaccgattccaaaattgatattataaatcgtcatgtctaacacctctttgtttatgggaaatgaatgaccatatctccgtccttatcaaaggctagaatacttaaacataaatttctaaccatcttcctttttatatcttcagacatatattcatacgtttcaagagccactttatgatattcaaaaatgacattacgctgtccattttgtcgattgtttacactggctttaagttgttgtaagttatctacttgttcaatccattcgctatctatcgctttcaaaattgatttttgaatgaaacgaagttttaaatatgaatcagcagcaacttctaaacgattgttaaattgttgagtaaattgttgtattaagaattgtatgatttcttcatcattttgcatattaatatttgatacatcttcatcgaagacaaaacttaagttttcgtata

SEQ ID NO: 4148 - DNA, 3135 bp, Artificial Sequence
  Description of Artificial Sequence: synthetic nucleic acid sequence
gatattttaaatcgactattcacccctttaatcggagttgaatcaattggactctatcattttatgagtcaattcatagataaaagtcaacaactcgggttaacgcattatatattcatgaatgaactaaaaattaacttattagatttcagggagcaaatggacaatttagaggctattggattgattaaaacatttgtaaggcatgaagaaaagtactctcactttgtttatgagttaattcagcctccaacagcctatcaattttttaatgatcctatgttatcagtatttttatttagtgaggttgataaaaaacgttatcaagcacttaaatcttatttcgaaaaagatgagaaagatttaagcaaatatcaacagacaactagaaaatttacagaagtattcaacgtacctaaaaaggtcaatgtttctgatcaaattaatttaaagcaaatcaaacactatgatggtatagatttatctaatgaaacttttgattttgaaatgttgagacagatgttgaaccatcattttattagtaatgaaattatcgataaagaagctaagaatttgattatacaacttgcgacactttatggaattactgaagatggtatgaaaaatgttatattaagttccattaccagtgcacaacaattatcttttgaagaaatgcgtaagaaagctagaacttattacctgattgaacatgataatcaattaccaaaattagagcatcaaacaaataaaattaacgatgaaaaaaaagatcgacaagcggaagatacaacaaatgattggttacaactgctagatgaaacaagtccgattgatatgttagcaagttggtctgattcggaacctacacagtcgcaaaaaagtatgatagaagaattgattaaccgtgaaaaaatgaattttggtgtaatcaatatacttttacagtttgttatgttaaaagaagatatgaagttgccaaaatcttatatttttgaaattgcttccaactggaagaaaattggtatttcaaatgccaaacaagcatatgaatatgcattacaagttaatcaacctaaaaattacgaaacacattctaatgataaacgacagaacaatcgtggaagacaaaatcaatttttatccaaagaaaagacacctaaatggcttcaaaatagggacgatcaagaagaaaataaagaaataaatgatgacactctcgaagaagatcgacaagcatttcttgaaaagttaaatcaaaagtggaaggaggaagataactaatgaaaagtttcagaaatatcatgggcgattctcaaaatctagataaacgtatacaaaaaataaaacaaaatgtaatcaatgatactgacgttaaacattttcttgagaaaaatcgtagtaatataactaatgagatgatagacgaagatttaaatgttcttcaagagtataaagatcaacaaaaagtttatgatggacatcgctatgatgattgtccgaattttgtaaaaggacatgttcctgaactatatattgaaaatgaaagaatcaaaattagatatctaccttgcccgtgtaaaattaaacatgatgaggaacgatttgattcacaacttattacatctcaccatatgcaaagagatacacttcatgcaaagctcaaagatatttatatgaataatcgagagagacttgatgtagcaatggcagctgatcaaatctgtacagcaattactaacgatgaaaaagtaaaggggttatatttatatggtccttttggtacaggaaaatcattcatattgggtgctattgcaaatcaacttaaatcgcaaaagatttcatcaacaattgtatatttaccagaatttattcgcactttaaaaggtggctttaaagacggtagttttgagaaaaaattacaacgtgtgcgagaagctaatattttgatgttagatgatattggcgcagaagaagtcacaccgtgggtaagagatgaagtgattggtcctttattacattatagaatggtacatgaacttcctacattttttagttctaactttaattatagtgagcttgagcatcatctttcaataactagagatggcactgaaaagactaaagcagcacgaattattgaaagaattaagactttatcgacaccttattatttgactggtaaaaattttagaaacaattgaattttatagtatgtggtgtataatagagataaatcttaatcgttgaaactattgaagatacgataatttaatctctgttacacagaaagtcattaattgatgagaatatggctaacacattaaattattactacttcgttaatattgatatttgtaatgaatatccggctcaagaccgttatcttatgtaaagtatagtatatgactggtcacgtatgcttttcatatacttaactagggtggtaccacgacaaactcgtcccttgctagggacgagtttttttatgctcagtaaagttaatttattcaataagccaacgatcagatgttttattaaataggaggaaaaaatatgaatcaaattaatattcaatttccagatggtaatacaaaagaatttgaagaggtttttattttaattgaaaattgataattaagaacgtagaaagatttcattataaaagaaagaattttctgaaaaatacttgtcagataacttgtaacatgttagtgtattactacatttttactttaatgtattatcgaactaaagaattcggcgtgagggaggggtggcttaagtatgaacaataccatcatttcaatgaaagaaaaggaattacgttttttaaagttttttcatcaacaaaaatataatgttgtagattttaacttaattgaagaattggattggcaacgattgactcatgaagatttgcaacaaatggatgaaagaagcttttggcaacaaaataaatctatctatgcattaagaaatgattttaccgatcaattattcagatattattcgaactatccaacacattttaaaaaagtagcttatgcaggggatattatcagagataacagagttataaagcaagtcggcattgagaattacgagccacaatttgataatatcactcaaaat

SEQ ID NO: 4149 - DNA, 3543 bp, Artificial Sequence
  Description of Artificial Sequence: synthetic nucleic acid sequence
cgttaatattttgaacagcttgatttttaatattattaacttcatcagtagtgtgtgcttttaggatattagcatctgcttcttcttgaagacgatcaactttattatttgcttcttctttttcttctgctgtcgcatttggtgtttgatctattatagcgtttttatttttagcttcgctagctagagctgctaatgcattagttttgactgctgtacttggtaatatttggctaatactcgtgttaccactatttttagcatcattaactaattgtgtagttgtagcattagtaatattgttaatagcatcaattttagctacattaactctatctatagcggctgatttttcttcattagttgatttattatttgcattgatagtatcaatttgactttgcgcatcttgttcaatttcttgtttagcattacgtttaattatagtctcaggatggacctcagaaattttagcaattccattattttccacaattttcacatcattatttgagtgtgcctgtgatacttgatttaacgcttcattctttacttcttctaatttgccaagtgctatttgtttttcttctagtgtcgcatcttgattttgatttattaaagtcgtttgttccgcagctttttttctaattatttcattagcctttggttttacaattacaataggttcaacatttcttattgtttctaatatattatttttttcgtctgtaacattttgatttgctaaagctgcttgtattctatcattgactccatttgtttcttgattaagtctctcaagggcttcttgtttttcttctgttgtagcattttgattctggtctattgtcgacctttgttgacctattgcttgagcaatgtctgctttagcttgtgttttagtttgagttgacaacacaatacgttgtaacttttgcttaccatcttctaaattctcatccactaacgcatttgtatttgcaccattaatattgttacgtgcttgtgctaacgtatcatctatagattgtattgccgtatttttctcttcagtagttgcatcttgattggctcttatatctgattttttactttcagctagattagtcaaaatattaatggcatcttgtcttttatgtgcatttgcattaatcaatttaattgcagtgatagcttgtgcttttacgttatcaacttgattatcttgtgtactttcatgaattttttgaatttgttcatttaatttttgggtcactaattgctttgcagcctctttttcatcatcagtagcattaccatcattacctattaacgtcttttgattattagcttcttgagtcaaactatttatagcagtcggttttttgatcacattgggttgtacactcttgattgtagcaatactatttgttttagattcatttacttcttgagtactatgtgcattattaatattttgtattgcttgtgctaatccagcattgactctatttgttgcctcttgcttttcttcttcggttgcatcaggcgtgttattaatttggattaattgttcttgagctttgtcatttatttcttgcttagcatttgttttagtttgagttgatggttgaatattgtttattttttctaacccattggttttagcaccattgacttccctttcagtatcactatttgtaatattagatttggcttcaattttcgctttttcaaccagctttctagcctctgctttttcttcatctgttgcatcgttgttaccattgatgattgtaacttgttgctcagcttttttatcaatagccgtttttgcatctgttttaattgttgttgctggtattatggtagcaatctcattcatgccgttatctttagcattatcaacttgattattagtttgcgcttgattgatatttgttatagttttatttttactaatctcaagaagtcgtttggcttcatctttttcttcattagttgcatctttgttattattaattaactctgtttgtgaaataaatttagtttgtaactcttggagcgcatcagattttctagttggattagcatgaatcgtttctaattcttgaagtccaatatttttgtgctgttcaacttcattgtcacgtctatcttgatttattagattcttaacttcatctcttttaccattcaatctttgaattgcatcttgtttttcttcttctgtagcattgggcgttgcattgatttgacgctttaaatcctcaaactttgaatctaattccactcgagcggatggtttttttgcaacatttgcttgaatattagttatcgtatctatagcctcagtttttgcatcagatacttgttggtttgtttgcgcttgatcaactttgttgtatcctgcatctttagctatttttaatttatctaatgctttttgcttttcttcatctgttgcatctggtgtagtgttgatagtattactttgctcattatatttattatcgatactttgtttagcatcagattttttgtgcgcatctggcataactaattcaatttcatgaatgccgttagatttagcttgtgcgacaccattgttactatgttcattttgaattgctgttcttgcttcatttgatttttgatttgccaattgaatagccgcttctttttcctcagttgtagcagtttgatgcgtttgaatttgattaatctgttgcgcgagtttttgatcaatatctttttttgcttttgacttaacagcggttgctggtaaaacgttagctatttcatttattcctgctactttagcattttcaacatcattatttgaagataaggagttaatattatctaatgatttttgttttgtagcgataactaaattgttggcgacctctttttcttcatctgtagcattatcattattattaataaattgcgtttgttgtgttgccttttgttcgattgcatttcttgcagactctttctcaacaacttgtgcattaattcgagataaagaagttatcgcgtcgtctttgatagttttgacaccttgggttgtatgttctgcatttatttgtgcttgaactcttgctaattcagcacttactctatttattgcctcttgtttttcttcattagttgcatcaggcgtgttttgaatatgattaatctgttcatttgctttattctgtactgcttgtctagcttcagatttcacagtagttgctggtgttatattttctattttatttattccattagttttcgcttcatttacttgatctctagtactattgcgttgaatattatcttttgcttcaatcttagcttcttcaattttacgattcgcttcttgaatttcttcatctgtagcatcatttattctttgaatttttattttcttatcagctgctttaatatcaatatcatttttagcatttcttttaattgatgtatcaggtgtaattgcatttatgctttgtctaccatcactcacaataccatcaatttgattattcgttgtagcattatcaatcttactaatta

SEQ ID NO: 4150 - DNA, 3238 bp, Artificial Sequence
  Description of Artificial Sequence: synthetic nucleic acid sequence
aatttctcttcacgctcaatattatattttggattgctgccatagttccattcccacgtacgatacttttcatcacttaattgcttaatatttttccaatcttcttctgttaatatatattcttcaacttcattttcaccaaaaatagttttaagaataatttttttgaattcttctatatctattggctgttctagaaattcctcaatattggcaactctttttctaacagatttaacgcctttagatttaattttagctggattcacttttaatgccttttgaacttcatttaaatcacaattcagcattaatgtaccatgactaaacattctattttttactttaaccatagcatttccagatattttagcttgccctacttgtatatcattccttccagtcatttcagcattaactcccattgattgtaaggcctgtacaatgggcatcgtaaactttttaaaattatgaaagctatggccatcatcatctgtgataaagctaaaatttaagtttccagtatcatgataaacagccccaccaccagaaatacgtctcactacatctatttgatgtttatcaatatacgcttgattaacttcttcaattgtattctgattctttccaacaataattgaaggtctgttaatataaaataaaaaataactttcttcagaaggtaaatttttaagaacatactcttccattgctaaattgagggaaggatcattaatattattgttgctaataaatttcataacattctctccttaaataagtctctctatatgcccttaccctagttatgaatcatttatagaaaaatttccactcttttactcatttatgaatgacattttataattttcttttagttcacttctttttcatagaaattagtttatttgtcaagtaaattttagtacaatataatctagctatgatttaagggaggactcgtaatgactgttgcagaagtaggtaatatagtagaattttatgacggtttaagaggccgtgtcgagaagattaatgataactctgttattgtagatttaactattatggataattttaatgaattagatttaccggaaaagacagttatcaatcataagcgatacaaaatcgttgatcaagaaggttaattaaaatgaaaaatgtttctaaagctttgatttggtttgttataagcttcatcatctttcacgcaatattatttgtgatgtggggagaacatcaagaatactggtatttatatactggcattatgttaatagctggaataagttatgttttttaccaaagagacattgcatctaaacgattattaacttccataggcatgggtataataacgagtgtcgcacttattattatacaattaattttttcacttatttcatcagaattatcatacgcatctttaatcaaagaattatcacgaacgggtgtctactttaaatggcaaatgctcgttactttattatttgtgataccttgtcatgaattatatatgagaactgttttacaaaaggaattaataaaatataacttaccgaaatgggctagcattttaattgttgcaatatgttcaagttcattatttatatacttagataattggtggattgtattctttatttttgtagctcaattcattctatctcttagctatgaatatacgagacgtattgctacgactacaattggtcaaattgtggctatcattttattattgatattccacggataaaaaaagcatttcttagactcatgaatttgagctaagaaatgcttttttaaattaattaaagaaaaagttacacatacaccgttataaatagtacgaggaagattaataaactttaaaattatgatttaatttcacagaatacatgtcacattttaaattttttctaatcaatccacccatcgtttccgaatatgtgtcgtgaacgatagcttcttgtaaatacattttgtagtttctataacaataatctgtcattgttattctatacgaatcttcttcatttagaccatttaatttaactctatggataaactttctactcaaattattacttagctttgttatcgttattttttctgggataattatccctactatcttctttaaacacatgcttaatgatgtaatcattacacaaccatttagtttggttactaatcaaatgttagaaataacactcaataactatattttagacacacatccagcattttatttaagttttattacactattgatactattcatcattgtttacaatggttacaatatgtgtttcttattagcacgatactaatcgctttaggtagtatggaggtatcgccgatgaaaccatacattcaactcgtcattaagaaaactctatggttaggacaaaaattggctcagcaaaattttaaaatacctatcgccattcaagatatggaccatagttccgcttcgaaaaaattaattaaagatatagagcaaaatcagtatgtaacagtaaaacatttatctcatgatgatttttatattgatgatttggtaaaaaagaaagaagtcattgcaagccttgaaatacctaaggatttctcaaaacaccttaaagataatgatttaaataagactcttccattatatagcagagatgattttataggacatattgctatggaaataatcagtcgatcattatacgaacaacaaatccctaatattattcatgaacatcttgatgatatgaaacaaccacaatccttagataaagtgaaacaatcttattattcgcttacacctcaatctaaaataaaaagtgtagctatcaataaacatgctcatcaatccatttcaattggcattgtatttgttgtcgtcatctttgtaagtgttatccaaatcctattacatcaacgtcttaaacagaacgcacctctcgaaagattatatttggtaccttatagtcaacttaaactatacttgacttatatcagtgtacacagaatttctaactttgaaacagctggccctttatactatagagcagaaccagttggttgtagtgcaacaattttatataaaatgtataaagaacgtggatttgaaattaaaccagaaatcgctggacttatgatttcagctataatttctgatagtttattatttaaatcacctacctgcacaaaagaagatgtagatgctgctcaagcacttaaagat

SEQ ID NO: 4151 - DNA, 3049 bp, Artificial Sequence
  Description of Artificial Sequence: synthetic nucleic acid sequence
atatcttgtggtgtttcagcattcattctaacttgcagtcttgcaatctcttcagaccaagtcataaattgatcgaactcttcactatgttcagcattgactgtttcaattgctcctaaatataaatcaccagctgaaccatctacagaaacgatatccccttcatgtaattcaccttcaggataatatactgttttgttcactgtatctatctctacattcgaacatcctgtcacacaacatttgcccattcctcttgctacaacagcagcgtgtgatgtcataccaccatgagttgttacgattgcttcacttgctaccatcccctcaatatcttcaggtgatgtttccggtcgcattaacactactttattaccattttcagcttgaagttttgcttcttcagcagagaagactacttttcctgttgctgcaccgggactagctggtaagcccattttagaaaccactgtcgcttgctttaatgattcttcattaaaattaggatgtaataattggtctattgattttacctctacttttgatactgcttcttcacgtgtaattaattgctcgtgaactaaatccacagcaatttttattgcagctttagcagtacgttttccgttacgtgtttgtaataaataaagtttaccattttcaattgtaaattctatgtcttgcatatctttgtaatgtttttcaagttgtttggttacatcaacaaactcttgatgtacatctggcatttgttgttttaaagtgtcaatatccttaggggtacgaatgcctgcaacaacatcttcaccttgagcattaagtaagtactctccgaataaatgattttctccagtaactggatttcttgtaaatgctacacccgtaccactattttcaccactattaccaaataccatttcctgaatatttacggctgtaccaatatcatgtggaatatcatttaaatctctatatacacgtgcacgatcattatcccaagatttaaatactgcttcaattgcttcttctaattgctttaacggttcttggggaaaaggtttatatgcctcttctacatagatttctttatatttttcacatatagtttgtagtccttctgccggaatttcagcatcattttgataacgatgctttgttttaaaatcattaaaatatgtatcgaaagctgtcattggaataccataaacaacctctccaaacatttgtagtaaacgacggtaacaatcatatgcaaatcgtgcatcatttgttttgtcaacaagcttttttacattatcatcattaagtcctaaattaagaattgtatccatcattcctggcatggaaatttttgcaccactacgtactgatactaataacaagttatcatcagaggaaaaggcttttcctgttcgtttagaaaaagctgctaaatgatcaattaattgtgtctttacttctgtaggtagttcttcattttgttttaaatatgtaatacaagcttcagtcgtaattgtaaaaccatctggtactggtagtccgagtctcttcatctctgaaagattggcacctttaccaccaagtaagtctttcatagctatatttccttcattaaatgcataaacgaattgtgtcattcttgaccacctcttattttttattatgtcatactatttatttacaagtatgtcataataaaaagagaattacaacatttttaagaaaaggctttcattaaatttgctctaaatatgtcaaaagtattaatttaatgcttttttattcatgattctatttttcaattcatcattgattaggttatactcatgcaatctaaaaagcagggcaaaattcatactgaattccctgtcccatcacattaactaaattaaactaatgcatattctaatattagtctctgacagtcaaaataaaaaaacctgagacattgtataagtgtcccaggaaatattttcattcatgcttaatgtgatgaatcttgttgtttatatttttttatttctgcgtcacgtaattcaacacgacgtatcttacctgaatttgtttttggtagatgttcaacaaattcaattgctcttggatatttatacggtgctacttcatttttacaaaatacttgtaattcttggattaactcatcacttgcttcataatcatcttgcaagatgataaatgctttaacaatatttccacgaatgtcatgaggacttgcaacaactgcacattctttaacagctgcgtgatttgttagtgcatcttctacctcgaaaggtccaatggtatatcctgaactaatgataatatcgtcacggcgaccttcgaaccagaaataaccatcattatcaatatgagcttggtctccagtaacataataatcacctgttgaagctgcttttgtgcgtgcttcatctttaaagtaacctttaaataaagccggtaagtctaaaggcacggcgatattacctttaacatttggaccaacctctttaccatcatcgtcaatgacagtaacaaaactaccaggtatacctttgcccatagaacccatacgtggttcagtatcttttagaaatccgatcaacaatgtactttcggtttgtccatatccatctcgaacagtaatattaaaatgacgtttaaattgttcaacaacttctcgatttaaaggttcacccgcagacaccgcactgtgtaaatactctaaattgtactgttctaaatgactaagtttagccatcatacgatattctgttggtgtacaacatagaacattaatttgataattttgaagtaactcgagatatgtttcagggtggaaacgaccgttatagacaaatgctgttgctcccatccctaatacagataaaaatggactccacacccacttttgccaccctggtgctgcagttgcccatacaagatcattctcttgtatacataaccaatgttttggtgccatttgtaaatgggcatacccccatccatgtgaatgcgttactgcttttggattgcctgttgtacctgatgt

SEQ ID NO: 4152 - DNA, 3067 bp, Artificial Sequence
  Description of Artificial Sequence: synthetic nucleic acid sequence
tataactggtcaacacaattcagaattaaataaatctactattgatcaaacgattagccaaattaacacagctaaaaatgatttacatggtgcagaaaagttacaaagagataagggaactgctaatcaagaaattggacaattaggttatttaaatgaccctcaaaaatctgctgaggaatccttagtcaacggttcaaatacacgttctgaagtagaagagcatcttaatgaagctaaatcattaaataatgcaatgaaacaattaagagataaagtagctgaaaagactaatgtcaaacaaagtagcgattacattaatgattcaactgaacatcaacgtgggtatgatcaagcacttcaagaagcagaaaatattattaatgaaatcggtaatccaacattaaataaatcggaaattgaacaaaagttacaacaattgactgacgctcaaaatgcgttacaaggttcacatctattagaagaagctaaaaataatgcgattactgaaatcaataaacttacagcattaaatgatgcacaacgtcaaaaagcaattgaaaatgttcaagcacagcagacaatcccagcagttaatcaacaattaactttggatagagaaataaatactgcaatgcaagctttacgagataaagtaggccaacaaaataacgttcaccaacaaagtaattatttcaatgaagatgaacaaccaaaacataactatgataattctgtacaagccggtcaaactattattgataaacttcaagatccaatcatgaacaaaaatgaaattgagcaggctattaatcaaatcaatacgactcaaacagcgttaagtggagaaaataaattacacactgaccaagaaagcacaaatagacaaatagaaggtttatctagtttgaacacagctcaaatcaacgccgaaaaagatttagtcaatcaagctaaaacaagaacagatgttgctcaaaagttagctacagctaaagaaataaattctgctatgagtaatttaagagatggcattcaaaataaagaggacatcaaacgtagcagtgcatatatcaacgcagatccgactaaagttacagcttacgatcaagcactacagaacgcagaaaatatcatcaatgccacaccaaacgtagagcttaataaagctacaattgaacaagcgctatcacgcgttcaacaagcacaacaagatcttgatggtgttcaacaattagctaatgctaaacaacaagctacacaaactgtcaatgggttaaatagcttaaatgacggtcaaaagcgtgaattaaatctattaattaattcagctaatacccgtacaaaagtacaagaagaattaaacaaagcaactgaatcgaaccatgcgatggaagctttaagaaacagtgttcaaaacgttgatcaagtaaaacaaagtaacaattatgtcaatgaagatcaacctgaacagcacaattatgataatgctgtcaatgaagctcaagctacaatcaacaacaatgctcaacctgttctagacaaattagctatagaacgtttaactcaaactgttaacactacaaaagatgcattacatggtactcaaaaactgatacaagaccaacaagctgctgaaactggaatacgtggtttaacgagtctcaatgaacctcagaaaaatgctgaagtagctaaagtaactgcagcaacaacacgtgatgaagtgagaaatattcgtcaagaagcaacaacattagatactgcaatgcttggtttacgtaaaagcattaaagataaaaacgatactaaaaatagtagtaaatatattaatgaggatcatgaccaacaacaagcttatgacaatgctgtaaataatgctcaacacgttatcgatgaaactcaagcaacgttaagctcagatacaatcaatcaattggcaaatgccgtaactcaagctaaatctaatcttcatggagatactaaactacaacacgataaagatagtgctaaacaaacgattgctcaattacagaatttgaattcagctcaaaaacatatggaagattctttaattgataatgaatctacacgtacgcaagtccaacacgatttaacagaagctcaagctttagatggtttaatgggtgccttaaaagaaagtattaaagataatactaatattgtttcaaacggtaattacatcaatgcggaaccatctaagaaacaagcatatgatgcagctgtacaaaatgctcaaaatataataaatggaacgaatcaaccaacaattaataaaggtaatgtcactacagcaacacaaaccgtgaaaaatactaaagatgccttagacggtgatcatagattagaggaagctaaaaataatgccaatcaaacaatcagaaatctatctaatttgaacaatgcccaaaaagatgcagagaaaaatctagttaatagcgcatcaacattagaacaagttcaacaaaacttacaaaccgctcaacaattagataatgctatgggtgagttacgacaaagtattgctaacaaagatcaagtgaaagcagatagtaaatatctaaatgaagatcctcaaattaagcaaaactatgatgatgcagttcaacgtgttgaaactattattaacgaaactcaaaaccctgaattacttaaagcaaacattgaccaagcaactcaatccgttcaaaatgcagaacaagctttacatggtgctgaaaaattaaatcaagacaaacaaacgtcttcgacagaactagatggattaacagatttaacagatgcacaacgtgaaaaactcagagaacaaattaacacttctaatagtagagatgatattaagcaaaaaattgagcaagcaaaagcactaaatgacgcaatgaaaaaacttaaagaacaagttgcgcaaaaagatggtgttcatgctaacagtgattatacaaatgaagattctgcacaaaaagatgcgtataataatgcacttaaacaagcggaagacattattaataacagctcaaatcctaacttaaatgcacaagacattact

SEQ ID NO: 4153 - DNA, 3532 bp, Artificial Sequence
  Description of Artificial Sequence: synthetic nucleic acid sequence
aatggaccctaaagtagctatgttaagcttttctacaaaaggttctgctaaatcggatgatgttactaaagtgcaagaagcattgaagttagctcaagaaaaagctgaagcagatcaattagatcatgtagttattgatggagaattccaatttgacgctgctattgttcctagcgtagcagagaagaaagcacctggtgcaaaaattcaaggtgatgcaaatgtatttgttttccctagtctagaagcaggtaatattggttataagattgctcaacgtttaggtggatacgatgcagtaggaccagtcctacaaggattaaactctccagtcaatgatttatctcgtggttgctcaactgaagacgtttataacttatctattattacagctgctcaagctttacaataatggacttagcaactaaatattttaatcaaatcaactggcgttatgtcgatcattcaagtggtttagagcccatgcaatcttttgcgtttgatgacactttttccgaaagcgttggtaaagatttatcttgtaatgtagtacgaacgtggatacatcaacacaccgtgattttgggcattcatgattcgcgtttaccatttttaagtgatggtattcgttttcttacagatgaacaaggatataatgcaattgttaggaattctggtggcttgggtgtcgtattagatcaaggaattttaaacatatctttgatttttaaaggacaaaccgaaacgactattgatgaagcctttacagtgatgtatttattgattaataaaatgtttgaggatgaagatgttagtatcgatactaaagaaattgagcaatcgtattgcccaggaaaatttgatttaagtattaatgataagaaatttgccgggatttcgcagcgacgagtacgtggtggtatcgcagtgcaaatatacttatgtattgaaggttctggctcagaacgggcattaatgatgcaacagttttatcaacgtgcgcttaaaggggagactactaaatttcactatccagacatagatccctcatgtatggcatctttagaaacccttttaaatagagaaattaaagtgcaagatgttatgtttttattattatatgcactaaaagatttaggggcaaacttaaatatggatcctattacagaagacgagtggacacgttacgaagggtattatgataagatgttagaacgcaatgcgaaaatgaatgaaaaattagatttttagcaagtgtgacactatagataagtcataaaatgataagcctgggacaaaatgattgtcccaggtttttttacgtattagcagtgatagttgatgtgaatagaaaataattttttattaattttcaatcaagacggggttctaaccaagaaaatttcacatagaaattcaacaaaataggcaagtgttattcgaggttaaaagaggacaacaaattcaatttgaattcaatcttactactattttgtttaataaaaatacctttcaaacaaaagttaagatgactttgttagaaaatgatatatattctatcacaaatttgtagtattatagttgaggtggaaaattttaaaaactttagtaaaaaatttaacgatgtttacaaaattgtcatttaaggtaaatatatttcatgattttgataactctttaaaagagttttataatattaaagtgttgtgaaaacttaaacaaaaagttattatgcccttttgttgttattttacttttaaatagttataatgaacgcttgattattggcgatatgataaatgtattcgataaaattgacatttaagtgacatctatcaagatgaatatgtaaagaaattaaattaatatcacgtaaaatagcaagtcaatcattctaacatcgtcagtacatcttatgaagtgatattttaaagaaggtatataaaggtgagaaaacatgactagacaaggatacggagaatctactggaaagattattctaatgggtgaacacgcagttacatttggtcaaccggcaatcgcaattccatttaatgctggaaaaattaaagtcctcattgaaagtttagatgaaggtaattattcttctatcacaagtgacgtatatgacggaatgttatacgatgcccccgaacatctaaagtctatcattaatcgctttgttgaaaaaagtggagtgaaagaaccactatcagtaaaaattcaaactaatttgcctccatcaagaggtttaggttcaagtgctgcagtagcagtagcgtttgtacgcgccagttatgattttatggatcaacctttagatgacaaaacattgattaaagaagcaaattgggcggagcaaatcgcacatggtaagccaagcggtattgatacgcagacgattgtgtcaaataaacccgtctggtttaaacaagggcaggccgaaaaattaaaatcactaaaattaaatggttatatggttgtcattgatactggagtaaagggttctaccaaacaagcagtagaagatgttcatgtattatgtgaatctgatgaatatatgaaatatatagagcacattggtacacttgttcacagtgctagcgaatcgattgaacagcatgatttccatcatttggctgacatatttaacgcatgtcaagaagacttgagacatttaacagtaagtcacgataaaatagaaaaattacttcaaattgggaaagaacatggtgccattgctggtaaactaactggtggaggaagaggtggcagcatgcttcttcttgcggaaaatttaaaaactgcaaagactattgttgctgctgttgaaaaagctggcgcagcacatacatggattgaacatttaggaggttaaatcattggtgaaaagtggcaaagcacgagcacatacaaatattgcgttgattaagtattgggggaaagctgatgaaacttacattattcctatgaataatagtttatcagttaccttagatagattttatactgaaacaaaagtgacatttgaccctgattttactgaagattgccttattttaaatggtaatgaagtgaatgccaaagagaaagaaaagattcaaaactatatgaatatagtgagagatttggctggaaatcgtttgcatgcgcgaattgaaagtgaaaattatgtgccaacagcagcaggacttgcttcttcagcgagtgcttacgctgctttagctgccgcttgtaatgaagctttgtcattgaacttatcagatacagacttatcacgattagctcgacgtggttcaggttctgcttctagaagtatttttggtggatttgccgaatgggaaaaagggcatgatgatttaacttcatatgcacatggtattaattccaatggttgggaaaaagatttatcaatgatatttgtagtgattaacaatcagtcaaaaaaagtatctagtaggtcaggaatgtcactaacaagagatacttctagattttatcaatattggttggatcacgttgatgaagattt

SEQ ID NO: 4154 - DNA, 4126 bp, Artificial Sequence
  Description of Artificial Sequence: synthetic nucleic acid sequence
ataagtacttgactaatcgtaggaaagagtccggaacataaagttccaggataagtaaataaagacaatttctattgaaataatataaaaattgtcttttttatgattttttataattttcagctcgttgagctggtacttttcttatattaagtgtcattagcacaagtcctagttctcttttgtctttatttatccctcgaacggactttcgagtgaaactcaaaataggcttcataattccaaaaacagactccacatcaatttttctttgactgtagatggtttttgcttttcgttctgaaagcttttgattaatttggacattgaaatattcccaactataattcttcatttttttttatttgtttttgaatcgattaatcgttttataagaaggcttttgattttatgatagccacatcattcggatattatcattaagtaatttttctatcttacgtcctgaaaacacagattgtgtgtaggcatataaaactacttttaacatcatttttggatgatatgatgttgcacctcgatgatgtctgaattcatcgaattcagtctcgggaattgtttctataatatcatttacatgtcgtgaaatatcatttgtggggataagaactgaagtttccattggtagagtaagttgagtcatgttatagtctttatacataaggcacctcgttaattttgtttattggtatttattaaattatacgaaagaccttatttttttaagtatttcattgtgaaattacatataaacacaaagtattttggcgagactcttgagggagcaggacaagctgaagctgtcccctaagaaagcgagccaacaatacgaagtattgtaaataaacagccagtaaatgaatttatgaaaactcatttactgactattttgctaggaattatgtcccagcctcgaatagatacatttagatataccattcaattatttgtcttttcgaggtaatggatagaatccttgattaaactgttcccaaagatttggtgttagataatgttggtcttcacgattaggatcaaaagcatttataatttcgtcttctcgaccttctttaattttagcaacaaaatcataatcaagtagaatttcacaacctaacgcaacaaattcaactccaatgttttcaacagcatttagtgcatcttcagctgtaaagacagaacctataccaataagcggcatacgtccatttatccattgatgaataagttccaagcgattttcacctttatatttaccttctcgcgtaactgagttaacatccattaatgacacatgaatataatcaagtggtttatttgcgatttggtgaattaattcttcagttatctccattgaaatacctggtgattccgcttcttcaggtgacaatctgtaaccaataataaaatcatcatatgcatgagcttttttagctttaacaacttcatctataacagcaacagggaatttatagttatcagcccaaacatcatttcttctattatagtaaggagaaacaaattggtgaataagataatggtttgcgccatgaatttcaacgccatcaaaacctgcttcaattgctcttctagttgcttcaccaaagtctctaatagtttgttcaatttcttcagcagtcatctcacgagcatcatgttctttttgctgaccaaaacttttaagagaaatggcacttggtgcaacaacatctccatcaggtgttaactctggtaaagcttgagcacctccatgatgaatttggactattgctttcgcaccatttttcttcataacttgagcaagttcttttaacccttcgatatctgagtcatgtgcaacagaaggttgaccaggaaatgctttgcctacatcattaacattacttgctgcattaattgcaatcccaacatctttagaacgtttctcaatgtaaggtaattctatatctgaaattgttccatcatcatttgatgaagtatgtgtaagaggagctaaaacaaaacgatttcttacttcaacaccattaggtagtgttaaagatttaaataaaggttcatatttattattcatatttttaatactctccttgtttaatgatgttatgactatagcatgctagttacatactattctaattatttgcttacaaattatttattctccaattataaaaatgctaagcatagttaattacattcaacaaataaataataactatctaaaattttttattttcccttattgagatcattgtttatccaaaataattattaactttaattaataaaaaaagacaatcctaacaacacattgttgtttaaagattgtcgttatcatgtgattgattgcatatatcacaacatcacatgttggcacgaattgacagtcgtttagtcattgtgaattgcacgttttgactgtttgatccagaccggtaagcgttctttaagtgtttgaaacccatacttttctgtttctctaatttcatctaagacagactgtttttcttttttacgctcataatttttaaagtaatcattatcttttaaggacaaatttaatttaccttcatcatcaattgataatatttttgctttaacaacctgtccttcagatagaaatttctttaaattatggacataatcatccataatttctgagatatggataagcccttcagtatggtcaggggtctcaacaaatgcgccatacggttgaataccagtcacacgtaccttgatatgttgacctactttgtagtgatgattcaacttgataaccccttatttcgattttcttaacactcatatcatatatggttttttattaccatcacctagtatatgttcatacacgtgatctaaatcagctttttctatatgtgatttaccttttttatctttatatttaatctcaacatttggcgtttcagaatctccatcatttaatatttcataataaacataatcatatttatcagatttttgactttccttagatggctctttttgttttccagaacctccacatgcacttaaagtaacagttatggtaagtatacttatgatcataaatacttttttcatattaatactccttttctccattcataaattcataataaattataacaaacaatttttaaattattattaatgattaactaaaaccttatttttaaaaattcagtttaaattaagcgccatggataatccgaaaaattaaaccaaaagcattcacttatatgtattttgataaattataaaacaagtatctttcaaacatgtaagtttcatgtctataaatgtaagtttagataaaggcaaggatatcccaaccatcctacaatttaaatatagataactaaaggagtgagaggatggctattttaacagcaaatcaattatcaaaagtatatggtcacaaacaaaaatatcgagctttaaataatataagtttttcagttgaaaaaggggaatttgtagctgtcatgggtccttctggatcaggtaaaacgactttactcaatgtgttaagttcaatagatactatttcagaaggaactgtggaagttgaaggcaaagaaattaataaactgagccacaaagaagtggcaaattttcgaaaacaacatctcggttttatttttcaagattatagcgttttacccacattaacagtaaaagaaaatattatgctaccactctcagtacaaaaattccataaatatgaaatggaacaaaattataaagaagtggctgaggcattaggtatttataacctgggaaataaatatccaagtgaaatttctggcggtcagcaacaacgtacggcggcagcccgggcattcgtccataaaccaacgattattttcgcagatgaacctactggcgcattagattctaaaagtgctcaagatttgttacaccgtctagaagatatgaataaacaatttaattcaaccattatgatggtgacacatgatccttcagccgctagttacgctgagagagtcattatgttgaaagacggtgatatacactcagaaatctaccagggtaacgattcaaaacaaacattttaccaagaaattatgaaacttcc

SEQ ID NO: 4155 - DNA, 2993 bp, Artificial Sequence
  Description of Artificial Sequence: synthetic nucleic acid sequence
tgtaggcctccttatattttttatatggtttaaaaaacaaataccctaggacagcaactgatgtcctagggttatttaatatattaatttcgatgccagtgttagtgttaagataacgcttttatcaattttttcactctaaaccacacctgttgcgagagaaaaattcaatacaacttctgaccaaccgattttgttttttttttcttatctaatatttctttcactttttcaagtatatcagtttgttttttatttttttgcttcatatttatctacatccttacggactatatttacccataagtcatatatataaacatttaacttgtataattttcggtccaaaagggttgtcttcgatcattgaaatatacacctacgcccaaataatcaaaatgggtgtttaaaatattctttctatgccccaatgaattcatcaaaccttcatgtgcatagatactattcaattgtccatatgctaagttttctccagcagcattaaattctattccatctttttttaatctatcaaaaggagaaagtttcttttgatttacatggtcaaaataattatgcttaaccatgtcaacactatgcttacgcgcagtatgagaaacatccttagaataatctaatgtttttaagccatgctgttttctttcagcattgacaatgtcaaaattttgcaactcaaaactctttgcaagtaatttagatggtttcccatattgatatcttaatcgattttccattttctcactaacttgtaataatgacttcacaccattatctctgtgcttatcataaaatactgtggtataaatatggtctttatggaaaacatcatattcattactttttacatcaaaaccaactttccctttttttataacttgaatcgggggcccatatctttccctaacaacatctttaggagtatcatacttaatttgagattttgatgaaataagattttgatttgtatacagtgcattaacatgattgttaatataactcaccatcaaaaattgattataatcatttgaataatatgtgtaccaatttgtgccatacacactcgaagtcatacgcttatgttgtcccaattgtgcttcaacatcttttttagtcatattcatctgtatattgttgattgcaaattcttgctttttaggaatcgctaattgagtattatcgtcatttgaatcagaatcaatccatcgattaatttgatgacgtatatcattttgagctttaatcataaaagtagtttctttgactggcgtaaaaataacgatgcaaagtaaaactgtaatcaataaaagaaatcttttaattgtattcacctactactttttactaatctctatcaccattaaagattgaatttcttactatgacgtaatcaactgttcttaatgacttcaagtcctttcctcctgcatatgaaattgaactctgtaaatcttgttccatttcagtaagggtatctttaagagatcctttgtgttctacaaacatttttttaccttcaacgttcttatgttcacctttttgatattctgaggcactaccaaaatattctttatattttttgccatctagctcgacggtttcacccggtgattcctcgtgggcagcaaataaagagccaatcattaccatagtggcaccaaaacgaattgatttggctatatcaccgtgggttcttaaccctccatctgcaataataggttttctagctgccttattacaaagatttaacgcagaaagttgccaacctcctgtaccaaatccagttttaattttagtaatacatactcttcctggaccaatacctacttttgtagcatctgcaccggcattctcaagttctcttactccttcaggcgtcccaacattaccagctatcacaaaactatttggtaaatgtttttttatatgcttaatcatatttataactgaatttgagtgaccatgagcaatatcaattgttatatattctggtatgagcgatgaagaagctaatttttcaataaaattaaattcgttttctttaactccaacagaaatagaagcaaataaccctgcatgatgcattttttttataaatggaattctattttcttcattaaatctatgcatgatataaaaataatcgttttctgcaaaccattgtgcaagttcttcattcatgactgtttgcatatttgctggaacaactggcaatttaaaagtacgaggcccaaatttaaccgaagtattacactcagatctgctttcaacaatacatttattgggaattaattgtatatcttcataatcaaaaattttcatcttttttaaccccttacaatagaattaatcttcaaaatgtttaatgaaaatacgaataatacctttaattttgtaaaaatcattcatattattcatcctttttaaatgtacattgtttttcttctattgtaaatggacctaagtagtaaatttttaccaactagatttttttacacctggaatttgacctttatgcgcatgttctctaaatgcaattctagacatttcaaatttacgtaacacacctctaggtctaccagttactttacatcttctagttaatctagttggagatgaatctcttggcaactttcttaatgcttcatagtccccttttgcttttaattctttacgtaactcgtaatatttatttactaattcttgtcttttttgttcttttgctattttagatttcttcgccatatattataacctctttctacaaatagtaataattacgttttatagaataacatatatttcaaaatatacaagtgaaaattcttctaagtacaaactataaaaaaaactcccctatgagttaaggagagttttcgtttcaaattgtcgtatttgaaagataagtaattattttgtttcacgatgtaacgtatatttatttaatcttggacaatattttttcatttcaatgc

SEQ ID NO: 4156 - DNA, 3305 bp, Artificial Sequence
  Description of Artificial Sequence: synthetic nucleic acid sequence
gctgttacaattaaattatatatataaactgataaaatatgtaattaaatgcctaaatgttaaaataaaaaccctatctgtttacattatattaaatattatatttattttttaaaatattttttataagaatttggacacaattattagtaacttactcattaataaaatttttgagactatcaaatgataaataacaattagcgcttaaataaataaaaaaagagtgaaaacattaaatttacaatggtttcactctaaaaatataaatgtataccggtggtcgggatcgaaccgacactccaataaaggaacgggattttgagtcccgcgcgtctgccaattccgccacaccggctcaatatataaacaaaaaacttcccaatggaagtgaataatggagcggaagataggatttacacctatatctcattccgggaaggaatgtgttctgagagttgaactactcccgcatatttaaaattggagcggaagataggatttgcacctatatctcattccgggaaggaatgtgttctgagagttgaactactcccgcataatattaaaatttggagcggaagataggatttacacctatatctcattccgggaaggaatgtgttctaagagttgaactactcccgcataataacctggaggcggcaaccggatttgaaccggtgataaaggttttgcagacctctgccttaccacttggctatgccgccaataactgggctagctggattcgaaccagcgcatgacggagtcaaagtccgttgccttaccgcttggctatagcccattaatataaagggcggttgaagggaatcgaaccctcgagtgtcggaaccacaatccgatgcgttaaccacttcgccacaaccgccatggcaggggcagtaggaatcgaacccacatcaaaggttttggagacctctattctaccgttgaactatgcccctatataagatggtggaggggggcagattcgaactgccgaacccgaaggagcggatttacagtccgccgcgtttagccacttcgctacccctccaaaatggtgccggccagaggacttgaacccccaacctactgattacaagtcagttgctctaccaattgagctaggccggctataggtatggttcaggacagaatcgaactgccgacacatggagcttcaatccattgctctaccaactgagctactgaaccaaaataagaaatcgtaatgacacctctttgaaaactgagtcatgtatgttctaaaaaacaatatgcatatcaactgtttcatcacgaaacccatatcaataatattgcgggaggcggatttgaaccaccgaccttcgggttatgagcccgacgagctaccgaactgctccatcccgcgctaataattaatggcggaggaagagggattcgaacccccgcggcccgttaaggccctgtcggttttcaagaccgatcccttcagccggacttgggtattcctccacaaattatagataaataactattaaaatttaataaatggcggtcccgacgggaatcgaacccgcgatctcctgcgtgacaggcaggcgtgttaaccgctacactacgggaccattaaaacggaggaagagggattcgaacccccgcgagccgttaagctcctgtcggttttcaagaccgatcccttcagccggacttgggtattcctccaaaattatatggaccttgcaggactcgaacctgcgaccgaacggttatgagccgttagctctaaccaactgagctaaaggtcctgaatataattatacaactaatagtagtggcggtggaggggatcgaacccccgacctcacgggtatgaaccgtacgctctagccagctgagctacaccgccgttatgtagtttgtaaattaatattggtggagactagcgggatcgaaccgctgacctcctgcgtgcaaagcaggcgctctcccagctgagctaagcccccaaaatttattttactatcgggaagacaggattcgaacctacgaccccttggtcccaaaccaagtgctctaccaagctgagctacttcccgtaaaataagcgcgcccgataggagtcgaacccataacctcttgatccgtagtcaaacgctctatccagttgagctacgggcgcaaatattaaagatggtgccgaggaccggaatcgaaccggtacggtgatctctcaccgcaggattttaagtcctgtgcgtctgccagttccgccaccccggcaatatcattaatggagcggaagacgggattcgaacccgcgacccccaccttggcaaggtggtgttctaccactgaactacttccgcgaatgcgggtgaagggagtcgaacccccacgccgtaaaggcgctagatcctaagtctagtgcgtctgccaattccgccacacccgctatttaaatggtgagccatagaggattcgaacctctgaccctctgattaaaagtcagatgctctaccaactgagctaatggctcaaaagatggtgccggccagaggacttgaacccccaacctactgattacaagtcagttgctctaccagttgagctaggccggctataaatggtggagaatgacgggttcgaaccgccgaccctctgcttgtaaggcagatgctctcccaactgagctaattctccaagatattttgcctggcaacgtcctactctagcggaacgtcagtccgactaccatcggcgctaaggagcttaacttctgtgttcggcatgggaacaggtgtgacctccttgccattgtcaccagacaaatgaatgattatacattcaaaactagatagtaagtaagattttgcgtcgcaaaacgttttttaaaaattgattaagtcttcgatcgattagtattcgtcagctccacgtgtcaccacgcttccacctcgaacctattaacctcgtcatcttcgagggatcttataaccgaagttgggaaatctcatcttgaggggggcttcatgcttagatgctttcagcacttatcccgtccatacatagctacccagctatgccgttggcacgacaactggtacaccagaggtatgtccatcccggtcctctcgtactaaggacagctcctctcaaatttcctacgcccacgacggatagggaccgaactgtctcacgacgttctgaacccagctcgcgtaccgctttaatgggcgaacagcccaacccttgggaccgactacagccccaggatgcgatgagccgacatcgaggtgccaaacctccccgtcgat

SEQ ID NO: 4157 - DNA, 3619 bp, Artificial Sequence
  Description of Artificial Sequence: synthetic nucleic acid sequence
caaatgcagttaaagcagcttcaacaccacgtgacataccagcaagtaactctccggcaagtaagtcacgaatagcgttagtaatcaaaataccgggaacgagaggcatgacacttgcaatagtaataatgtcttgatttttagctatacctagtttagtgaatattgctgcaatactaataacaacagcagatgctacaaactctgaaaagaatttaatttgtatatatttttgcacgaaactaaacgttaaaaaagctatgccacccgctaggcatgcaatccaagcgtcggaagctacgccaccaaacatgaataagaaaaaaccacaagctacaaaggcagcaatgagatttgttaagaaagaatactgaagagacgcacgtttaagttgcagtaactcactttttgcttcgtcaattgtaagttgcttactcgaaattttacgagataggctattggttaaagcaattttctcaagatcggttgtacgttcgcgaatacgaatcaacctcgtactagtacgatcatttaatgagaaaataattgcagttgatgtcacaaaactgtatgtatcatgtaaaccataactatgggcaatacgattcattgtatcctcaattcgatatgtttcagcgcctgcttcaagtaagattcgcccagcaattaagactacatcaatcactttattttcatcaatgatagtgattgaatctgacatatctcatcacctccgaagctatttaatatttttatgaacaattgaagtttacaacttgaagacttaagtttcaatagacagcttgattttaataacattttcaatactaattaaaaatagtaaaaaatgctatgcataactgtatacgctttaataattttttaacgtagcagttaacatagcatttagcttgattataatttgacaataggattaaacatgactttatttcttccttcacttttagccacatgtaccatgtcatcagcatctttaaatactttacgttgagatttacgatcttcttgagttaagtatcctacaccaattgaaactgatagcttgattacttctttgtttggtaggtggaaagaagatttttcaacaccacttcgaatattttctgctaatttcacgctttgatctagtgtgtaatctcttattacaacagaaaattcttcgccaccgtttctaaatattttgaactggtttgggacatagttttttaatagttgagacatttgtttgagaacagcatctcctgattggtgtgaataatgatcgtttacatctttaaagccatcaatatcaatgagaagtaaggctaaactttgtttcttttcttcagctttacttgagacctcatttaagtgtctatcaaattctttcacattacctagacctgtaagataatcgtatttatcttcattttcataacgattgactaaagagaaaaagtgccatatatcaacgaatgttattgctgaagcaattgtaataataaatgaaatagggataagcactaaaatctctacgagttcataaatagggcttaataatgctaaaaataacaaaatgataatgctaatcaaatttaaaataagtaaagaaatgatatcgttttgctttaagaatggtcccactgcactgacaatacctgcaataacgattaatgtaataccataaataattgagtttccaaagataaatacatcgactaaagatacgataaaagcagccgtgagtgtatatatcatgttggtataacgtcctaaaaacaaaagaggtacaaatgttaaatggacgaggtattcgttttgaaatgggatagggtatgccgctaaaagtaaagaaacgaatgtcattagtactgttacatattctttagaaaaaatcattcttttattttcagaatattgtaacctatgaaataaatatatacctgccaccatgacagatatgttatatatgatagcttcaaacatttccataccgactcctttattaaccattagctattgtaagtgaaaacttacacaggtaatttatcttttgtactcttatctgagctattgcctaaatctgagtcgttgtctgagtctgaatcactatcggaatccgaatcactgcctgagtctgaatcactatcagaatctgagtcactatccgagtctgagtcactatccgagtctgagtcgctatcggagtctgaatcactatcggaatctgaatcactgtctgagtctgaatcactatcagaatctgagtcactgtctgagtctgaatcactatcggaatctgagtcgctgtctgagtctgaatcactatcggaatctgagtcgctgtctgaatctgaatcactgtctgaatctgaatcactgtctgagtctgagtcgctgtctgaatccgagtcgctatcagaatccgagtcgctgtctgaatctgagtcgctgtctgaatccgagtcgctatcggagtctgaatcactatcggaatctgagtcgctgtctgagtcactatcggaatccgattcgtcatcatagtatccgttatctatactaaagtcatcatgatcagtaattgttacatgaacttcttccccatcagcatcctgttcgtcatcatcaccagaatctgttgttgtttgagtcatacctgaaggtttatcaaaatgaacaatataattaccactatttaaattatcaaattgatactttccattttcatcggttgtagttgtactaatgatatttccgttttcatcttttaacgtcactttaactccagagattcctttttcatcatcaccttgaataccatctttattagtgtcataccatacatagttccctaagctgtatttaggtgtttgataaaatccactatcaatcgtcatatcgtcttgtccattaatagttacccatacagaattaccttctgagtctagtgcaggatttgttcctgaatgtttaagcgtcggcgtatatccttcaggtgtttcgaatgtaattttataagtcaatccgtttttcaatccatcaaattgatatttcccatcttcatctgttctgactgattttgaagttccatcaggatacgtcaaagttaccaatacattactaagcggtttttcattatcatttgtattttgaataatattggtgttcacccgggtttttagggttccatctcatactataaagtgtattttgatcgtcatgagataagaaatgcttatgaataaaatcagcgccaccataaatagctttttgtggtgtgtcccatccatgttttttagcatattcggcacctgttttaatagggtcactatctaatgcaccaacaccatagaaattgtaatattttttaccatctatttctacaccattagccagttcacttttagctgcgcctgtttctaatagagcatgagaaataagatatacttcattgacatgtttagactttgcagcattaataaaatcatctgtatgttttagtagtactggtctatcaaacaacatgcgtttaattctgtttttatcaatgccttgatacttagacaaatctaaaaattgatatttttgtttatcatcatctatgaatttactactatcc

SEQ ID NO: 4158 - DNA, 3500 bp, Artificial Sequence
  Description of Artificial Sequence: synthetic nucleic acid sequence
taccatagataaagtcatacttatctattagctccatagtacgttcaatagtaggtgtatcaaaacctactacaaacattctatctacgcctgcttctctcgcacgagatatcacttcatttaaatcctcatcatattgttcatcatttaaatgtacatgcgtatcgattaacatcattatctctcctatccttagattatactatttaattactgcaccatttggaattgcgctaggcaagcttatcaaggtaagtacgccatctttttcagctgacaaaatcataccttcggatttttgtcccatcaatttagctggttttaaattagtaacaactgcaacttttttaccaataatgtcttccggacgataaaacttagctataccagatactatttgacgttgttcattatctaattcaacttttatttttaatagtttctccgatttttttacattttccgcatcaataatggttgctgctttgatttcaactttatcaaaatctttgatatcaatttgctctttaccgggttcatcagactgttttattgatttaggtggttgcattgattctttgatataagcaatttctgcttcagtgtctaatcttgggaaaattggtgttggcttttcagttacagtaattgcctctgacaacataccatattgttgcagactatctaattgatgtaaatccggattgttaatattaagttgcttaaatatctctctaggtgcatgcgtcaagaatggttgtaataagattgtagcgaaacgaatgttctcgacaagatgtgccattacattaccaagcatctcacgttgattttcatcttttgcaagaacccaaggttgagtttcatcaatatatttgtttgtacgactaataaatttccatactgttgataaagcaacagaaaattgtaaactttccatattatcattgaatgatttaacagtttcaagcgccatcgcttccattttttcatccaattcatgttttggaccttggtatgcaggtaattcgccgtggaaatatttgtttatcatagagatagtacgattcactagattacctaaatcattcgcaagatcgtaatttgttctttcaacaaaggcttccggtgtaaatacgccatcagaaccaaacggtaattcacgcattaagtaataacgtgtcgcatcaagaccataacgatcaattaatacattaggatctacgacattacctttagatttactcattttaccatctttcattaaaatccaaccgtgtgcaaaaacttttttaggaagtggtaaatccaacgccattaacaatattggccatataatagagtggaaacgtacaatttctttagccatcaagtgtatgtctgctggccaatatttattaaataatgtttcatcatcagatagataacctaatgaagaaatataattaacaagtgcatcaatccacacgtatacaacatgtttaggattagatggtacacgtacaccccaatcgaatgatgtacgtgatactgctaaatcttctaaacctggtttgataaagttattaatcatttcattttttctagatggtggttgtataaagtctggattttcatcgtaaaattctaataagcggtctgtatatttattaatgttgaagaaatagctttcttcttttacaagttcgacttcgtgaccagaatcaggacttttaccacctacaattttgccgttttcataaacagggtcaacaagttgtgactctgtataatatgtttcatcaggaacagaataccaaccttcgtattcacctaaataaatgtcaccttgttttaataatcgctcaaacactttctcaacgacttgcttatgacgctcttctgtagttcgaataaaatcatcattagaaatctcaagtttactccataagtttttaatacctgaaatcatttcatctaagtattctagttctgttttgccagctttttgagctttttcttggattttttgaccgtgctcatcagtgccagttaaataacgaacatcatagccttgcattcttttatagcgagctatcacgtcgcctgcgactgtagagtatgcatgaccgatgtgtaggttcccgctcggatagtatattggggttgttatataaaatgtatctttagccatcactggtcctcctcattaattacataataaatgatatctaaatttatttttcttttcaatgaagtcgcgtaccgttatgtatcagtttgaaaaattcgcatcaattgaaaattaattgtcatcatctttactacaataccataaaatcaacacgctatgggttttttacaataattaagtcattataaagtaaagtgtttaacacatttttaatcaatattatgataaatattatatatgtcacccgtcttcatatgtcgatctgtagcgacaaatttaattgcttttttaggtttaacatgtttggtttcaatataataatcaacatgttctttaaccgtatagctttcaaaccatgattcaccactcttaggtaatgcaccttcaatcagtatcacaaactcacctttaagaggtaatttgtcatgattaatcaatttcaacatatcatcaactgtaagtgtaagaacttgttcaaatttcttcgttagctctctaccaacagtaatccatctttgtgaatctattttagctattgctttcaaagtatcagtaaccctataaggcgattcataaagtattaaagtactattttgaaacattctatcctcaagcacttcaattttttctttttcttttcttggcaaaaaacctaaaaatgtgtatgtgaaagatggtaatccacttgacataagtgcagtcaacccagcattaggacctggtactgtttctatatttatattatttttacgtgcttcgacaaccaattcatatcctggatcactaattaatggcaacccagcatctgatactaacgctatatttaagccagtttgtaactgcttgattaaatagtcagtttgttgttctttattatgttcatgatacgactttagaggtgtttgtatttcataatgattacacaatttccgtgttacacgtgtatcttcacatgcaatcacatcaactttttttaatgtttctatagctcgaaatgtaatatcaccaagatttccaattggtgttcctactaaatataaagttgtcatgttatccctcctgtatcatttttaacttttgttgtctagtatatgttttaatttcatattcacgtttcaatgcttccgatttcgttgtatatgtttcttgataaactaactctaccggccgtcttatttttgtatatttagcacccttaccgttattatgctttattacgcgtgcatttacatctttagcatagcctgtatataaacttccgtcattacatttaacaatataaacaaaatgtttatccataataaacacctttcatctcatcgctata

SEQ ID NO: 4159 - DNA, 3284 bp, Artificial Sequence
  Description of Artificial Sequence: synthetic nucleic acid sequence
cttaagtcaccgccaattataatcttcaatcaatatcattatattaaattcatcttatcacactcaaatatgcaaagtaacatacttatattgtaattaaaaaagctagaatcattgatgacgatactttgacgcaaacaatgttctagctatgtgtaaaatgagttaaattttaattatcttttaattctgtaatataatcagctgcactttgagccgcaatactaccgtctcctgtagcagtaacaatttgacgtaaccctttatcacgaacgtcacctgcagcaaaaatacctcgtactttagtactcatgtcatcttgtgtgacaatgtatcccgcgtcatttgtaataccaagatttttaaatggtgctgtgagtggtttcattccaatataaatgaatacaccgtcggcatcataagtctgttcagcaccatctttagttgattcaagtgtaactgaaccaactttaccatctttttcattaattgttttaagtgtatgactccaaataaagtcaactttatcatttttgaaggcacgttcttgcaagatgttttgtgcacgtaattcatctctacggtgaacaatcgttactttatctgcaaatttagttaagaaagtaccttcttctaccgctgaatctccgccgccaattacgaaaagacgtttatttttaaagaatgctccatcacaaaccgcacaataacttactccacgtcctcctaattcttgttcaccaggaacgccaatctttttatactctgctccagttgagataataactgcatgtgctgttatctctttattccctaaattgataactttatagtcgcctttatcttcaacagatttaatatcgccatattggtattccgcaccaaattttttagcatgttcaaacattttagtagataagtcaggacctgtgatcatctcaaatcctggaaaattctctacttcttcagtgtttgccatttgaccgcctggcataccgcgttcaatcatgacagtttttaaattggcacgagatgcatatactgctgctgtcataccggcaggacctgcaccgattattgctacatcaaaatctacttcagtcattttaaatgcctcctacttattaatcattatgcgcattatatatcatacttttcatttcataaatttatatgctcaatataaattcaattgctttattcagtttgtatctagaaacattaaaatcgtccatcaattgcctcttggtaagtggttggctagaacgacgatacgataggtaaacaaatgcagctacatatctatcgacatctactaaatctacattttcagctataatcatttctgcttgattaatccaatctgtaaataaagacgtgttatatttgaatttcttaaaattatacaacctttgcatacctctgtgtataaaatctaatttattgagtgtgagtccttgtaccaaatatgtgagataaagtttctcatagtcattcattgattcaagaattgaccaaatatcttcagtcattagtatttcttttccatttaattgatgaagtaaaaaaataccgtaaagtcgataatgattattatcatctagtaataatggtaacactcgtgattcaaataccgttttactttcctcaattacccaaggtgcataaccaacatcaacttcagaaatttgagtgagcttgttccacatctcaatactttcgtctttatttcctaggtaataaaaattgaaactcaatgcattatacatttgaatagagacaaatttaccttttttataaagtggataaagtaaattttgagaagcacgatactgttttaaataactcaatacgattcctaatttaaaggtttcgtcgtcatttagtggtactactttattaagtattttaagatatttttgatatttttctgtttcttttttattataaagtaataatgtgtagtgacaaagtgcatgcacgtctgaattatcttcctttaaaagttcttcaaacattgctttggcgctatcatactcacctagatacaaataacacattgcaagtaaattcctaatcaccctatgctgttgtatctcgtaagattgattcaaaatatatgttcgggcttcttctaacctaccttgcgaaaagagaaattgaaataaaagttgtgttgaaaacaattgtgcttctaattcaattttttgttcatttgtatacgtgacttcgaatgttttttcaagcatttctctaaaatctttatcctctgacaatattacataattaataccaaacaagaatgccttgtttggctcgtttaattctatatttaattgacttagttcatagaaactttctgctacatgaaagtctttaacaatattctcataaaatagacgttctgcttttttgccgatatttaatttaactaaacattgagcatagtgttgttgaatatcaaaatccttaggtgacaactcaagcactttttcataatattctgccgccttcttgtagtcctgttgtcgccacttttgggtagccattttacgataaaaagcctcatcaaaaatcattggaatgatgttattttctttttgtgccattcattgtcacctcctgaatctaattgtatttgcataggattaccaaatgcaaaactgtaatcgggaacatctttagacacaaccgtacccgcaccaattttaacatgatttcctatggttattcctggtaatattgtcgtatttgcacctattaaagtgtaatcgcctataatgacttttcctactctccactcatcaacaagtacttcgtgagttaatattgttgtattataaccaatgactgtattcttgccaaccgaaatgtattctggataaaacaaatcaggcaacactttatatgcaaatgaagtatgattcccgacatccatttttaaaagctttttatatattttatttttaagtttcatactaggaacaaatcttgcaatttctataatcaacgtttgctttagcacttttacgaatttaatttttctatatatatgccataaaggattcacttgatgatgcttctctttacttaatcttctcaaaataatcacttagcctttttaatcggccatgttaatggtcctgaattttcatattttattggttggtatttaactcttctataaattacgaatatcacactaatcataataagcacgacagaaacaagttgcgcgacacgtatatgactcgtaagcatcaaactatcggttctcatcgcct

SEQ ID NO: 4160 - DNA, 3520 bp, Artificial Sequence
  Description of Artificial Sequence: synthetic nucleic acid sequence
tagactatttacatcggaagtgattttagaaaataaagcagttgcagagggtaaaggaaagacaaagaaagaatccgaacaaaaggcagcagaacaagcgtataaactaatgaaaaataaaaaatcattataattataaaaatatgataatctatgattgattatcatataaagctttaatctatattgataatttttaataattgttaatatagccccaagcttatcaactcaacacgactgtgataaggagaatacaatggtttatttaaaatcaattgatgccataggatttaaatcttttgccgaccataccaatgttcaatttgataaaggtgtgacagctattgttggtcctaatggaagtggtaaaagtaatattactgatgcaattaaatgggtactaggtgaacagtctgccaaatcactgcgcggtgctaaaatggaagatatcattttttcaggtgctgaacatagaaaagctcaaaattttgctgaagtaaaacttaaattagataatcattcacaaaaactacaaattgattctgaggaattagttgtcacacgccgtctctatcgaagtggtgagagtgaatattatttaaataatgatcgtgcacggttaaaggatattatagatttatttctcgattcaggacttggaaaggaagcatttagtattatttctcaaggaagagtagatgaaatattgaatgcaaaaccaatcaatcgtcgacaaattattgaagaatctgccggagtacttaaatataaaaaacgtaaagctgaatcgattcaaaaacttgaccatactgaagataatcttaatcgagtcgaagatatcttatatgatttagagggacgagtggaaccgttaaaagaagaggcggccattgctaaagaatataagcaattatctaaagagatggagcaaagtgatgtcatcgttacagtatctgacattgatcattatactgaagataatcagcgattagatgagcgtttaaatcacctaaagagtcaacaggctgagaaagaaggtcaacaagctcaaatcaatcagttactacaaaaatataaaggtaaacgtcaacaaaacgattatgacattgaaaagttaaattatgaattagttaaagcaactgagaattatgagcaattatcaggtaagctaaatgtattagaagaacgaaagaaaaaccaatcagaaacaaatgcaagatatgaggaagaattagataatttagaatcacaaattgattctattaaaaatgaaaaagcccaaaatgaaaaattattagctgagttaaaaaataagcaaaagcaattaaacaaggaagttcaagaattagagtcacttctttatatatccgatgaacaacacgacgaaaaactagaagaaattaaaaatagttattatacattgatgtcagaacaatcagatgttaataatgatataagatttttagaacatacaatcaatgaaaatgaagcaaaaaaatcacgattagattcgcgtttagtagaggctttcaatcaacttaaagacattcaacaaaatattactcaaacacaaaaggaataccaaagttctaagaaatctatggaaaaagtagaacaaaatattcaacaattagaacaacagttgacagattctaaaagacttctatctgaatatgaaaataaactatatcaagcctatcgttataatgaaaagttaaaatcaagaattgatagtttagctactcaagaggaagattacacgtatttctttaatggtgtaaagcacattttgaaagcaaaagataaagaattaagaggaattcatggtgcggttgcagaagtgattaacgttccttcagaaatgacacaagcgattgaaaccgccttaggtgcatcgttacagcacgttattgttgataatgaaaaagacggtcgccaagcaatccagtacttgaagcaaagaggtttaggtcgtgctacttttttaccattaaacgtgattcaaccaagacatgtagctgctgacattaaagatgtagctcgtggttcacaagggttcattaatattgcatctgatgccataaatgtatctgctaaatatcaaaacatcattgaaaatttattaggtaataccatcattgtagaaaatttaaaacatgcaaatgaacttgcacgtgccattcgatatcggacaagaatagtaactttagaaggtgatgttgtaaatcctggtggttccatgacaggaggaggagcacgtaaaacaaaaagtatattgtcacaaaaagatgaattatcaacaatgcgaaatcaacttgaagattatcaacgacaaacagcagaatttgaacgtcagtttaaagaacaaaaaacacaagctgaacaattaagtgaacaatattttagtgcaagtcagcagtacaacaatttaaaagaacaagtacatcatcacgaattagaactggatagactaaaaacacaagaagcacatcttaaaaatgaacatgaagagtttgaatttgaaaaaaatgatggatatcaaagtgataaaagtaaagaaacattaaaagaaaaacaaaatcatttaattgagatacaacaacaattgaagcaactagaaagtgatattgaaagatatacacaattatcaaaagaaggaaaagcttcgacacatcaaacacaacaacaactacatcaaaaacaatctgatttagctgttgttaaagagcgaattaaatcgcaaaagcaagtttatgaacgtttagataaacaacttagcgattcagaacgtcaaaaaattgaagtaaatgaaaaaatcaaattgtttaattcagatgaaatgatgggtaaagatgcttttgaaaagttgaaagagcaaattcagcaacaagaaaatgtaagacaaaatttaaatcaacaacttagtgagattaaacagcaacgtaaagatcttaatgagaaaatcgaaataaatgaaagtcagcttcaaaaatgtcatcaagatatactttctatagaaaatcattatcaagatattaaagcaaaacaatcaaagctagatgtattaatcaaccatgcaatagatcatttaaatgacacgtatcaactcacagtagaacgtgcaagaatggaatatgattctgatgaaactattgacaatttgcgtaaaaaagtaaaattaacgaagatgacaatcgatgaattaggtcctgtaaatttaaatgcaatagaacaatttgaagagttgaatgaacgatacacatttttaaatgagcaacgaacagatttaagagaagcaaaagaaaccttagaacaaatcattcatgaaatggataaagaagttgaaggtcgttttaagacaacatttcatgcggttcaagatcattttacgacagtgtttaagcaattatttggtggtggacaagcagaacttcgtttaactgaagatgactatttgtctgctggcgttgatatcatcgtacaaccgccaggaaaaaaattacaacatctttcatta

SEQ ID NO: 4161 - DNA, 4448 bp, Artificial Sequence
  Description of Artificial Sequence: synthetic nucleic acid sequence
ggattagctgttggattctgggatgataaagaggatatccgtgaacgttggaaacttcaaactgagttcaaaccagaaatggatgcagatcaacgtcataaactttatagtggttggaaaaaagctgttaaggcgactcaagtatttaaattagaagattaagctatgtattagactttttaaatctttaaatggacttgattttcttaactgtgttataatctagataagttaataagaaaatcgagaaacgagagatttgttcgtacaaaacaatttaatgttattgtggggataaatttctcgttttttatttataactaggaggcgtttagataatgtcattatctacattgaaaagggatcatattaaaaagaatttaagagacactgaatacgatgttgttatcgtaggtggcggtattacaggtgcaggtattgctttagatgcaagtaatcgtgggatgaaggtagctttagtagagatgcaagactttgcacaaggtacaagttcacgctcaactaaacttgtacacggtggtttaagatatttaaaacaactgcaagtaggggtagttgcagaaacaggtaaagaacgtgctattgtttatgaaaatggtccacatgtgacaacaccagaatggatgcttttacctatgcataaaggtggtacatttggtaaattctcaacttctattggactagctatgtactgagagatcccctcataatttccccaaagcgtaaccatgtgtgaataaattttgagctagtagggttgcagccacgagtaagtcttcccttgttattgtgtagccagaatgccgcaaaacttccatgcctaagcgaactgttgagagtacgtttcgatttctgactgtgttagcctggaagtgcttgtcccaaccttgtttctgagcatgaacgcccgcaagccaacatgttagttgaagcatcagggcgattagcagcatgatatcaaaacgctctgagctgctcgttcggctatggcgtaggcctagtccgtaggcaggacttttcaagtctcggaaggtttcttcaatctgcattcgcttcgaatagatattaacaagttgtttgggtgttcgaatttcaacaggtaagttagttgctagaacccatggctcctttgccgacgctgagtagattttaggtgacgggtggtgacaatgagtccgtgtcgagcgctgattttttcggcctttagagcgagatttatacaatagaatttggcatgagattggattgcttttagtcagcctcttatagcctaaagtctttgagtgactagatgacatatcatgtaagttgctgataggtttccagttttccgctcctaggtctgcatattgtacttttcctcttactcgacttaaccagtaccaacccagcttctcaacggatttataccatggcactttaaagccagcatcactgacaatgagcggtgtggtgttactcggtagaatgctcgcaaggtcggctagaaattggtcatgagctttctttgaacattgctctgaaagcgggaacgctttctcataaagagtaacagaacgaccgtgtagtgcgactgaagctcgcaataccataagtcgtttttgctcacgaatatcagaccagtcaacaagtacaatgggcatcgtattgcccgaacagataaagctagcatgccaacggtatacagcgagtcgctctttgtggaggtgacgattacctaacaatcggtcgattcgtttgatgttatgttttgttctcgctttggttggcaggttacggccaagttcggtaagagtgagagttttacagtcaagtaatgcgtggcaagccaacgttaagctgttgagtcgttttaagtgtaattcggggcagaattggtaaagagagtcgtgtaaaatatcgagttcgcacatcttgttgtctgattattgatttttcgcgaaaccatttgatcatatgacaagatgtgtatccaccttaacttaatgatttttaccaaaatcattaggggattcatcagagctatgtacgatcgtctagctggtgtcaaaaaatccgaacgtaaaaaaatgttatctaagcaagaaacgttaaataaagaacctttagttaaacgtgatggattaaaaggcggtggctactatgtggaataccgcactgatgatgcgcgtttaactattgaagttatgaaaaaagctgctgaaaatggagcagaaatcattaattatacaaaatcagaacacttcacttatgattccaataagaaagtaaatggtattgaagtattggatatgattgatggcgaaacgtatgcgattaaagctaaaaaagttattaatgcttctggtccttgggttgatgaagtgagaagtggcgattatgcacgtaacaataagcaattaagattaactaaaggtgtacacgttgttatagatcaatctaaattcccattaggtcaagcagtttactttgatactgaaaaagacggacgcatgatttttgcgattccacgtgaaggaaaagcttatgtaggaacaactgacacgttttatgataatgaaaaagcaacacctttaacaacacaagaagatagagactacttaattaatgcaattaactatatgttcccaacagttaatgttaaagatgaagatattgaatcaacatgggctggtattcgtccgctaattcttgaaaaaggtaaagatccttctgaaatctcacgtaaagatgaagtttgggaaggtgaatctggattattaactatagcaggcggtaaattaactggttatcgtcatatggcactagaaattgttgatttattagctaaacgtttaaaacaagaatacggattgaaatttgaatcatgtgccacaaaaaatctaaaaatttccggtggtgacgttggcggaagcaaaaactttgaacactttgttgaacaaaaagttgatgcagctaaaggatttggaattgatgaagatgtggcacgtcgcttagcaagtaaatatggttcaaatgttgatcaactatttaatattgctcaaacggcaccatatcatgatagtaaattaccattagaaatttatgttgaattagtttatagtattcaacaagaaatggtttacaaaccaactgacttcttagtacgtcgttctggcaaattatactttaatattcaagatgtgttagattataaaaatgctgtgatagatgttatggcggatatgcttaattatagtgaaactcaaaaagaagcttatactgaagaagtagaagttgcgattgatgaggcacgtacaggtaatgatcaacctgcaactaaagcttaatcattcctattgattgaatatctaatagattataataaactacttgtagatggaatagatctttttatctacaagtagttttttattttaatgctataagcttatataaactcaatatgcgtacgatttgatatgatatctcacacacggtatattaaatatgatataggtagatgtactataaatgacataacaaataaaaaaaggaataggggcagatgttgtgagtcaaagtcattttaaaataacagttgaagatggaacaatgttagaggtgaaaattgataaagcaaaaaagagtactattggtattgttcatcttttccatggcatggctgaacatatggaccgttatcaagagttagttgaggctttaaatacacaaggttatgacgttgttagacataatcaccgtggacatggtaaagaaatagatgagaatgaacgtggtcattttaatagcatgaatcaaattgtagatgatgcttatgaaattattgagacattatatcttgaagagctcaatgtaccctatattatcataggtcattcaatgggctccattattgctagatcatttgttgaaaagtatcctgacattgctcaaggtttaattcttacaggaacaggtatgttccccaagtggaaaggtgtaccaatacgtttagcaatgaagttagttacatttatttttgggaaacgacgtcgactcaagtgggtgaatcaattattgaataaaactttcaataaaaaaatcactcaacctcgaacagatagtgattggatttctacacgtcaggatgaagttgataaatttgtggaagatgaattttgtggattcaaagtatctaatcagctcatttatcaaactttaaagaccatgatgaagacagtagaacgacaacaactaaaaagaatggacaaagaactacctatactatttatttctgggaaagatgatccttttggtgaatatggtaaaggtataaagcatttagctagattatataaaagagcaggtattaaacatataacagtacaactatataaacataagcgtcatgaaatattatttgaagaagattatttgaaaacatg

SEQ ID NO: 4162 - DNA, 4100 bp, Artificial Sequence
  Description of Artificial Sequence: synthetic nucleic acid sequence
gcctgaaattaaaattaatgaattgtaagaaatcgaaactattctcataattgttatgctagtctctattacttactttatcattgatttcattttatggatcaaaaggaaaaattttctttcatcactattaaatcgctttttatcattgtgttatttatcattttaaagataattacgacatgaatttcagtttacaatatatttaaaagatagttctattatgaaaaaatataattatatttaatttattatatgaaaatgaatgggaatttcatataatgagagtaacggtgattataaacagttattgttatagttattaacaggaggatagaacatttatggaaaaaacagggaaggctctaaaagtgtgggcatggatttttattgttacatcagtaattattccattacttggtgtaggtagtatcatttgtagtattaaatacaaaaaatatgatgagaaaaaaggggcacaattattacagatttctataattgtagctgttgtagctttggggtacaacatcattaaattgctccagtaatttataaaaagaggttgaatatatatatttaatctctttttttatgtgtatattattaaatatgaagtgataatataaaaaatattcatcttaactttgttaattcttattataacagtagttggatgtaataagggggcaaaaaatcaacataataatattcaatatcatgatgaaataaaaaagatattaaaaattcaagaaaaaacacatcaagaaatggcccataaaagtgaaaaagttagaccaaaatttgaaaaagaaaaagtaaatagatacgtttttaaagacggaaaattgattattattagttataaattattcaaaaataaagagcaactattttatgttgcatatgaaataaagggaaagaaagtctactataaacgagatataaatcctaaagattatattaaagaacataaacctgattgtaaggatatacgtagaaaatgaaaggagaattatgatgaataaagcaattaatataacatcattgataggaatcattttacaaagtttttctagtctattgtttttagttttcttggtattttcaattactggagcgatggatgctaattttactacaacagttaatggtgaaacaacagttcatagtgcagaagccgcacagcatgtttttagtgttggatttttggttatattcatcgttgcaattttttcaatcatttttggaattataggtatgatgaagaaaaaaactaatactatagcaagtggtgtattttatattataggtgcaatattaagtttaaatatgattacttttatatcttggctagtgtgtggaatattattaattaaaaaaagacaaaataaaagcataaaagacaataaaacacatttggtggattagcttatctttagtttttagtttaatgagttcatatgatttttaatggcatttggtgcttttattatgattgcattaaatttaacgtggttgataatatacccccatttattataagtagaaaaagagtttaaacaaattagcttgtttaaactcttaaaattattcaacatatgaaaatacataatgatatagattaaaaatatgttattatatctaacgtttttatagcaatatatatgtacgtatctgatttttactttttatatttttacaaagtatttaaagtggaatttttagaagacttaactctttgttttaataaatgtaatgaattattatggcttatcgtttgatttttaataaaagggattgttaagttattgataagcttcatgagagtaagccacgacaaactataaaaatattttgcattagttcattcttattcgtgtgttgtgttaattcaatataaatgataagtttgataattcatttctcgggaaataatgtattaatacggactaaatcttaaggagaaatgcatcatgattattgcaattatactattaatatttgtttcatttttcttttcaggtagtgagacagcattaacagccgcgaatcgcactaagtttcaaactgaagctaaaaagggagatcgtaaggcgcaaggtttaacaaagttattagataaaccaagtgaatttatcactactatattaatcggtaacaatgtagcgaatattattttacctacactcgtgacaatcttagcgattgatattggagtgaatgtgggaatagcatcagcaattgtaacaattgtgattatacttatttctgaagtgattcctaaatcaattgctgcaacatttcctgataaaatttcaaaacttgtgtatcctatcattcatatatgtgttattgtactcaagcccattacaatcttattaaacaagatgacagatggtattaatcatttactatctcgaggccaacctgttgaaaaaagattttctaaagaagaaattcgtacattattaaatattgcgggtagagaaggtgcatttaatgagatagaaaatactcgacttcaaaacgttatggactttgaacaattgaaggttaaggatgttgataccacgcctcgtattaatgttgtagctttttcaaaggaagtaacatatgacgaagcttatgatacagtgatgaataacccatatacaagatatccagtatatgatgaaaatatagatgatatcatcggcgtattccactcaaaatatttattagcttggagtaaaaataaagaggacgcaattactaattatgcatcaagccctttatttgtaaatgaacataatagggcagaatgggtattgcgtaaaatgaccgtttcacgaaaacatttagcgattgttttagatgaatttggaggtacggatgctatcgtatcgcacgaagatttaatagaagagctacttggtatggatattgaggatgaaatggatcgtgaagaagaaaataaattaaaacatcaaaaatttccgcaaagcatgatgcatcgttaattttattgtaaaaatgatagtggttatgaatgtcaaacaagttgcggtgcaattaagatgttgtgtaatttagttgtgatataaattgtaaaggtagaaaacctgggacataatacattgttccaggtgtttttctattttagtaggcagtaatagattgaaaaactcgataaatataaatattatcaaacttagtctttattgctaaggttatacaaggaatttgaaagggttgcatctttctcttaccacaagatgtacttttgtttaactataagatatatgtatattaaagaatatgtaaatttaacttaactcaagtgaatcaatgatttgtaatgtggtatcatgttgttggtgataaatatgatagaaataggtcttactggctggggtgaccatgatacattatatgaggatttagagcgtaaaacagataagttaaaaacgtatgctagtcacttcccaatagtagagttggatgcttcgtattatgcgatacagccagagcgaaatataattaaatggataaatgaaacgccgaatagatttcaattcgttgttaaaattcatcaagcattaacattgcatgctgactatagagattatgcagagtcgagagatatattatttaaacagtttaaagaaatgatcaatccgttaaaagagcataataaattggcgatggtgctcgtacaatttccaccttggtttgattgtaacgtccaaaatataaattacatcttatatgtgagaaaacaattaactgatattccgatgagcattgaatttagacatcaatcatggtttgacaatcagtataaagaacaaactttatccttcttaacacaacatcaaatcattcatgcagtggtagatgaacctcaagttaaagaggggagcgttcctttagtaaataggattactagtgaaattgcttttgtacgttatcatggacgtaatcattatggttggactaaaaaagatatgactgatcaagaatggcgagatgtaagatatttatatgattatagcgatgatgagttagctgacttggctcgtaaagtcgaaatacttaatcaaaaggctaagaaagta

SEQ ID NO: 4163 - DNA, 3221 bp, Artificial Sequence
  Description of Artificial Sequence: synthetic nucleic acid sequence
tagaggtttctgttgatgaatatgaacatttcttcaaacgctttgaccaattagaattgaatcatgaacttgaaaaatcaaatgcagatcgtgacattttctatttaaaatctattgataacaatattcgtgaatatcatatagcagaataatctaaactcaattcttttgcttttttaattttttaaaatgaaagaaacgaatttactattcatacttgccccctaaaaacaacgtcatatagctgtttttagggggtttttaatcccaagatagtgcatttcatctattatagacctctactatttatatactgtttacctactattcatagataaaaacgaatcctatccatagatcaacattgacaaataactaaagcaattctatacaataacgtatctcaaggtttcgttgtttttttaggtctgtataaatgtgtcatatctatttcttccaattttaataattttattttgttgtctaaagtacctccgtatcctgttaaatttccatctttaccaaccactcgatgacatggtataagtatagaaataggattactcccaacagcacctcctacagcctgagcagacattgctggcttattcattgctcgtcctactgttttagcaatctctccatatgttttaagttctctataacgaattgtctgaagttcattccataccttctgttgaaaatcagtgccttttggtgctaacggtacttttatctcaggataattccctttaaaatactctcttaaccacgctttagtatctttaaaaacatctaacgtatcctttgttttaattcctttcaaatgttgattagggtataagacatgtgacaacgagatgccatcgtttgtaattaattgcaataagccaacgggcgagtcatacattgattgatacatatttctccaactccttaaatgtgtatatcattctagtcatatccttataaactaacgcattctattctgaacataattttataatatagataattgctatatttatgaaattggataaacattcgaatagaatgtgatacaccattaacgataactaaaattgaaaaatgtcatcatttatatattaagtcaattatcgacaggtcatactttaagaaagtctggaactttgatttacgtcccagactggtcaagatatagaatttaaagtccaactcacccttttgattagatgtcattatatttattgaaaattataaagttcataccctttattttttgcatattctaatgcgagaatttctaaaacattaatgaacgcaggttcgtcttttacttttatatattgaaaagtgaggccgtatttatctgcagtaatgtcttttaaatgatttggatttaagtccttattttgagcataagcttttctaaatttagtcgtacctgtttctgaacgtgaattgtattgtcctaattttgtatacaaatcactatttataggttgatgtgtggatgaatatcctccagtttgacctacaaacactggttttttctcatcgaaaatcacatagacaccaaacttatccttaacttttcccctatcctctggtgtaaacgccaaagcctttttatgatcaaatcatatgttgttctaatgagtctgtctaaacctggttcttcgatgcctaaatcttctaagaacatttctttatcttcatcatctaatgtagcgatttcttcctcgatttttgcactaataacgataacttctgaatcttcgtttgctgcatattcacgaattgctttcactttatcattatctttatctccaatttcatcttcaccaacattagcaatgtataacattttcttagatgttaataactgagcttgattaacccacttttgatcatcctcattgaaatcaatactgcgtactggtttaccgtcttctaacgcttctttaatttgtgttaatatacgtaattccatctcagctgttttatctttttgacgagccatcttctctattttcggtaaacgtttttcaacagattctaaatctgctaaaacaagttccatattaatgacttctatgtcatcaagcggattaacacgccctgatacatgtgttacattctcatcgtcaaacgcacgaaccacctgacatatagcatctacttcacgaatatgtgaaaggaatttatttcctaaaccttcgcccttagatgcacctttaacaatacctgcaatatcagtaaactcaaaagttgtaggaattgtttttttaggttgaaccatttcttctaattttattaaacgtgaatctggcacttcaacgataccaacattgggatcaatcgttgcgaagggatagtttgctgctaatgcgccagctttagtaattgcattaaatagggtagacttacctacgttaggcaaacctacgatacctgctgttaaagccattattcattctcctaactttctttgtcttgatgagattcaagaacttttttcattttcttattaaacacttgccgtggaatcataacactgcgctgacaatgttcacatttaatacgaatatcagcacccattctaataatcttaaaacgatttgttccacatgcatgtggttttttcatttctactatatcatttattccatactttgacgtcatgaaatgacctccaatgatgattagcttttttcttcattataatttgaaatgactggttgtggcatgcgaataccttcttgtctaaacattttttgagcttccttacgaataatacgagcgcctgaaaatccttcaccaggaattgtttccgctgaaattcgtatagtaaccttattagattctatcgcatcaatgccatcaacaactggatcgctgacaaataagtaatatttactacgtaaagaaacaaataaacgattgagtttcttttcaacttgatctatattttcatcaactgatactggtagttctacaatagcagtcccatttgtaattgaaaagttcgtaatttcccccatgctaccattaggtaaaatagtcagttctcccgaaattgtattaattcgcgttgatcttaaaccaatagatttcacagtaccttctgctaccgtagttcctgaactattgattttaacatagtcacccacatcaaattgattttcaaagataataaagaaacctgtaataatatcttttactattgtttgcgcacc

SEQ ID NO: 4164 - DNA, 2997 bp, Artificial Sequence
  Description of Artificial Sequence: synthetic nucleic acid sequence
attttagaacaatacttaattattataatgaattagatcatcagcatcgcgcacacacagaaactaagcatcatgcacatcaagccatgcaggttgattatagaaatacaaacgtttctgcatttttagattatcttaacggtaatattaatgggcttgttttaggagcaaatggagacggtatagctgaaacaaaacaagccagagtatcaatagatggtaccgtacatcccttgttgcaagaaaggctgcttcatgactttttaggaattaacagaaaattagataaagaaatacattctaatggtgcagttgattttatttggaatcctccatatataccaggaaatagattgggagaaaatgggacaccaaataattgggaaccagaagcccatattgaagcgtttttaaaccctttagttgataatcaatacgttacaaaagaagttataggagaagatacatcaggaaaatataatgtgtacaaatttacgtttgaaccacaaaattacaataaaacgttacttattacttcatgtatacacggtaatgaaactactggattttttgatatgtgccatatactcaatctattggtcaatcaatgggaaaagtatcctcaattaacttacttaagaaaaaatgtacgtttaatttatgttcctatggttaacccgtggggattcgcaaatcaagaaagagagaatgtgaacaatgtagatttaaacagaaattttgattataactggaaggcaggtaaagggacagatcctgataaatctaacttcaaaggtaaaagtcctttttctgaaaaagaatcacaaaatatgcgtagcttagttcaaagtatagataatttaactgctcacttagatttgcatgatattatttcagtaaataatgattactgtttattttatccgcgttgggccaatcaaaaaaataataatatgactcatcttattaacaatttaaaaagtaacggagacctcgttgtttggggttccagtacattatcatcttttagtaattgggtaggaatccgaaataaaacaacgtcatatctttcagaaataaatgaaaaacgtgtcggtgaaaagaaaagtcccgaagaaatgagacgttcagtacgctgggtaggtaatgtaatttttagaatggcacaatttgaatcttatcaaaatggtcaaacatcattagatcctttcattaaagtgatggtatatgatgatagatttaacaataaaacatctgaagtcattaccctacgtgcagaaaggaatgaatggcaacgtataatgatgagtcagcagcgtttcaaagttttagcaaatggatttgtagagctctatggatatgtgactataaacgttgatagagatgtcacagtggggattaatcctaatattgttcagaattatcatccattctttggatttaataaaagtagaaaacgtaatttattttcaattgaacatagactcaacaaaggaaatacaactttccctatttacgctgctgctggagttcaaatgtcgacgattactgaaccaggtacaaaacgtactgatacagtaatgccggtactagatgttaagaaaaaaggtgctggtattgtaacaatcaaacaaattaaattatttgcgaagttcactcctacgcattctgctaattccattcagatattaaaatctggagaatattatttttatttttttctaacgctttgcgatattgctcatcattatcccacatttcttgaatttgtggttctttattcggtaagccacctctcataggaaaatcagttttcggcattaatagggtatctttgtaattcattaaattcactccttgtaatgataaaaaagaactctaagttcaattaaaagggacggttaatccgcggtaccaccctacttaactcaacttagagttctcttaagaatatttataaaattgaaaaagccagtgatataagaaacaaacaatatgctaggctcacaccaatcctaactcgctgtactatgttcactgtttcttacgcgtctgtctttatatcatatcaataaattactatttagaaaatgcatttttaataaacaatgaaatttcttcgctattttcacatcaaatagttaacctgtgattcgtttttaattatttgatgttgattgtgatgattcgttatttgcatttgattgactcacagattctgaacttgatgtagaaggctgattagccgatatttcttgattttgcttttgtttcattgcacgttcttcaggtgtcaaatcattatcatgaagatgatgaatatcttctaatgtcacttgctcggcgtctaaatcataattgagtaagtaatcccaatcttcacttttgagtaagtcaagttgtgcttcaacaagcatacggaaacgagagcggaaaactttagattgtcgtttcatgtcttcagtttggaaagctagacgacgcgctttttcaattgcatcattcacaatactgtcagcttgtacttgtgcttttgataaaacggcttcagcttctttagttgctgcttgttttgtctcttctcctactttttgtgcttgaataagtgcatcgcttactgattggtgaacatctttatatgatttaatattagaatctctatcttcaatgactttttcaagttgctttttatcttcttttaaacgttcgatttcattacttagttgctctaagtaatttgcaacttctgtaggttctaaaccattttttactcgtgtaaattctttattcttaatctcacttggtgtaaaaggcatgataatcctccttgattgatagctatttaaatagtgtttgataatgaatgtgtaacttgttcttttttgtttttccacctatttcaacaatttgagctctaccataaccttggattgacaataaatcattctgctctaattgaaaatctgtagaatctattattgtatggttaactttgac

SEQ ID NO: 4165 - DNA, 3600 bp, Artificial Sequence
  Description of Artificial Sequence: synthetic nucleic acid sequence
tacatcattaagtgactcgacaagtacgagcgtttcagactcaacaagaacatcaacatccgatagtgcatctacatctatgagtgtaagctactcaaacagtgcaagtacgtccttaagtgactcgacaagtacaagcatttcggattcaacgagtacatcgacatcagacagtgcgtcaacgtcaacaagtgtgagcgactcaaacagtgcaagcacatctttaagtgagtcgacaagcacaagcgtttcagattcaacaagcacgtcgacatcagaaagtgcatccacatcaacgagtgagagtgaatcagcgagtacaagtaagaagttatcagaatcagcgagtacgtcgatgtctgatagcgcatctgcatcaacgagtgaatcaaacagtacaagtacgtcattaagtggctcgacaagtacgagtctttcaggatcaacgagtacatcgacttcagaaagtgcgtcaacatcaacgagcgtaagtgactccaatagcgcaagtacgtcattaagtgaatcgacaagtacgagtctttcagactcaacgagtacagagtagatatcgaaagtaatcctacagatttaaatgcgacaaatttaacgagatataattatggacagccacctggtacaacaacagctggtgcagttcaatttaaaaatcaagttagttttgataaagatttcgactttaacattagagtagcaaacaatcgtcaaagtaatacaactggtgcagatggttggggctttatgttcagcaagaaagatggggatgatttcctaaaaaacggtggtatcttacgtgaaaaaggtacacctagtgcagctggtttcagaattgatacaggatattataataacgatccattagataaaatacagaaacaagctggtcaaggctatagagggtatgggacatttgttaaaaatgactcccaaggtaatacttctaaagtaggatcaggtactccatcaacagattttcttaactacgcagataatactactaatgatttagatggtaaattccatggtcaaaaattaaataatgttaatttgaaatataatgcttcaaatcaaacttttacagctacttatgctggtaaaacttggacggctacgttatctgaattaggattgagtccaactgatagttacaattttttagttacatcaagtcaatatggaaatggtaatagtggtacatacgcaagtggcgttatgagagctgatttagatggtgcaacattgacatacactcctaaagcagtcgatggagatccaattatatcaactaaggaaataccatttaataagaaacgtgaatttgatccaaacttagccccaggtacagaaaaagtagtccaaaaaggtgaaccaggaattgaaacaacaacaacaccaacttatgtcaatcctaatacaggagaaaaagttggcgaaggtgaaccaacagaaaaaataacaaaacaaccagtggatgaaatcgttcattatggtggcgaagaaatcaagccaggccataaggatgaatttgatccaaatgcaccgaaaggtagtcaaacaacgcaaccaggtaagccggggggttaaaaatcctgatacaggcgaagtagttactccacctgtggatgatgtgacaaaatatggtccagttgatggagatccgatcacgtcaacggaagaaattccattcgacaagaaacgtgaattcaatcctgatttaaaaccaggtgaagagcgtgttaaacaaaaaggtgaaccaggaacaaaaacaattacaacaccaacaactaagaacccattaacaggggaaaaagttggcgaaggtgaaccaacagaaaaaataacaaaacaaccagtagatgaaatcacagaatatggtggcgaagaaatcaagccaggccataaggatgaatttgatccaaatgcaccgaaaggtagccaagaggacgttccaggtaaaccaggagttaaaaaccctgatacaggcgaagtagtcacaccaccagtggatgatgtgacaaaatatggtccagttgatggagatccgatcacgtcaacggaagaaattccattcgacaagaaacgtgaattcaatcctgatttaaaaccaggtaaagagcgcgttaaacagaaaggtgaaccaggaacaaaaacaattacaacaccaacaactaagaacccattaacaggggaaaaagttggcgaaggtgaaccaacagaaaaagtaacaaaacaaccagtagatgaaatcacagaatatggtggcgaagaaatcaagccaggccataaggatgaatttgatccaaatgcaccgaaaggtagccaagaggacgttccaggtaaaccaggagttaaaaatcctgatacaggcgaagtagttactccaccagtggatgatgtgacaaaatatggtccagttgatggagatccgattacgtcaacggaagaaattccgtttgataaaaaacgcgaatttgatccaaacttagcgccaggtacagagaaagtcgttcaaaaaggtgaaccaggaacaaaaacaattacaacaccaacaactaagaacccattaacaggggaaaaagttggcgaaggtgaaccaacagaaaaagtaacaaaacaaccagtggatgaaatcgttcattatggtggcgaagaaatcaagccaggccataaggatgaatttgatccaaatgcaccgaaaggtagccaagaggacgttccaggtaaaccaggagttaaaaaccctgatacaggcgaagtagttactccaccagtggatgatgtgacaaaatatggtccagttgatggagatccgattacgtcaacggaagaaattccgtttgataaaaaacgcgaatttgatccaaacttagcgccaggtacagagaaagtcgttcaaaaaggtgaaccaggaacaaaaacaattacaacaccaacaactaagaacccattaacaggggaaaaagttggcgaaggtgaaccaacagaaaaagtaacaaaacaaccagtggatgaaatcgttcattatggtggcgaagaaatcaagccaggccataaggatgaatttgatccaaatgcaccgaaaggtagtcaaacaacgcaaccaggtaagccgggggttaaaaatcctgatacaggcgaagtagttactccacctgtggatgatgtgacaaaatatggtccagttgatggagatccgatcacgtcaacggaagaaattccattcgacaagaaacgtgaattcaatcctgatttaaaaccaggtgaagagcgtgttaaacaaaaaggtgaaccaggaacaaaaacaattacaacaccaacaactaagaacccattaacaggggaaaaagttggcgaaggtgaaccaacagaaaaaataacaaaacaaccagtagatgaaatcacagaatatggtggcgaagaaatcaagccaggccataaggatgaatttgatccaaatgcaccgaaaggtagccaagaggacgttccaggtaaaccaggagttaaaaaccctgatacaggcgaagtagtcacaccaccagtggatgatgtgacaaaatatggtccagttgatggagatcc

SEQ ID NO: 4166 - DNA, 3806 bp, Artificial Sequence
  Description of Artificial Sequence: synthetic nucleic acid sequence
acatttttaataattgcttgcccttctttatcattgatgtttagattttttattgttaaaagtttcaacttttacacctctttgttctaataaacgatctcttacagcatcaccagttaaattaaatatcaatattgtacctgatatcaaagatgctggagcgataatcatgataggatgtgaagtaataaattcacgccctgcttgtaacattgccccccactctggagatggtggttgtgcacctaaacctaaaaatgataatgaactaatgtataaaatgatttttccaaaatcaactatcataataacaaatatagatggtaaaacttttggtaataagtgtttaaataagatattcaaagttgagacattaaaaaattgtgccatctgtatatacgattgattcatttcggtattgacaatccctcttgtcacgcgagtataattcatccattttatgattgtaatagctattactaaattccaaagactaggatgaaaaaaacttgctaaggcaatcataataacgaattctggtatgcttaatcctatatcaataattcgcatgataatcgtatcaatccaaccttttttatagcctgcaagtaaccctaaaggtactccaaccactacagtgaaaagtaaagtaagtagtgtaacaaacaatgttgcacgagagcccacgactaaacgactgaataaatcacgtccgtaatcatctgtgccaagtaaatgattcatactcataggttcaaatgagtttgacaaatgtacctgatacgcagcttcatcattgattataaattgcaatacaataagacatataatatagaccgtaaaaatgaaaaatatagtgtttttctttgacaacttaaacttcatcgttacgaccttcttttctatgtgaattaaaccatttaaactttgatgtttctttctgagtaatagcataacgttgtttaggatcgataagtaatgaaagtaaatctgcaattgtgtttataatcactacaaagaaaccaataaataatacacaaccttgaatgactggataatctctcgactttatactgtcaactaaaaaatagcctaacccaggaatatcaaataaattttcaatgactactgttccacctatcaaactaccaatggataatcctaatagaggtatgattggtagtatcgtaggtttaaggatatcttgaaaaagtatatatctttcgggcatacctctgagacgagacgattcaactataggtgtttgatattgttctaataaagtagaacgaataaatcgaatataataagcacacattccaatactcatggtaattattggtaaaatatatgaaacgaaacgcccctcatctgaagttggtaaaatattcaacttcaagctaaatatatataataagataagaccgataaaaaatgatggtaggcttacggataatgatgtcataacacggattatcctatcccaaattttatggtagtaaaccgctgctataatccctaatggtatagaaataactaatgacactataagcgtaccaaaagtaataataagtgtaggaccaagataatttgctatttccctaattacaggctcgcttgtttgataacttgttcctaaatcaaaatgaaacaattgatttaaccagtcccaccattgaataaaaataggattatttaagccaagcttattctctgtcgtttctatttgctcattagatacatgcgaaatatcaagatgtaaaattttgtctacaggattacctggagagagtttcattaatataaatgtgattgtagttaatataaatagtacgacaatcatttgtgaaagtttataaattatcattttaaacatatgttggcatcctttcactttcaacgaatataaaaaatattaaataataaattttattaaattgttttcatcaaaatctattatagtatgactttttttaaattaataggaaaagagataaaaaagaaataaaaaacaactttgcttaagataagatggtagcaaagttgaaaagttgttatttatgacgacgaagtgactcttcatcatcatatttgcgaatctctttttccaattttatttttctacgattttttctccagtttctagaaaaataccaaataagaaagcttatgattaagctcattatgcctaagaatcctgcatatccaagcagtggttgatatgaaatgttttgaaaatttggtataaaaaaggcaagtactgctaaaactacaaaagtaatgattgcagactggaaccatttatttaatacaagtgtgtaaaatacagttaataaaatcataccaagaatggtaatccacaaatagtttggcatatcaaatattgtcattgcacgtgctcctataagtaatatttagttactattatacaacttattaatataatatcattcagacttaagaagtaatcattttttaatattatttatttaacaagaatatgttaatactcataatatgattaaactaattataacattactaaatgttacacatcatctgtttaggcgtcctttgtgagtttgttattgaattttagtataatgtcattaaatgatttataaaggagtgtcataaatgagtgaaggtttacctttgagagaagaagttccggtaaaagaaacttgggatttgaaagatttatttacaagtgatcaagcattctatcaaacattggaacaagtagtacaaatgtctttagattttaatcatacatattatcagaaacttaataacatagaaacaatagaaaaggcattagatgaatatgaaaggatacttatagaaatagatcgtttatataattatccagaacttagattaagcgttgatacgtctaatgaagaagcacaaaaagttaacgcaaaacttaatacgacttctggaaaacttgctggtttattatcttttgttgattccgagattttggagttacccgatgagataataagcgaattgaggtctcaaacaaaataccctcattttattaaacaacttcaagatcgtaagccttatcaattatctgctgatgttgaaaaagtattagctacattaacaccaacattgagaagtccgtttgaattgtatggtactacaaagagtttggatattaattttgaatcgtttgattatgagggtgttacctatccattggattatgcaacatttgaaaatgaatatgaagatcatccatctcctgaatttagacgtaaaagttttagagcttttagtgatgcattacgacaatatcaacatacgacggccgcaacatataatatgcaagtccaacaagaaaagattgaagcggatttacgaggatatgattctgttattgattatctactacaagatcaagaagtaacaaaagatatgttcgatagacaaattgatgtcattatgagtgatttagccccagttatgcaaaagtatgcaaaaattattcaacgtgtacataacctggataaaatgcgatttgaggatttaaaaatttcaatagaccctaactttgaaccagaaatatcaattgaagaatcgaaaaaatacatttatggagcgctcaaagtacttggtgatgattatgtcaaaatgttagagtctgcctatgattaccgttggattgattttgctcagaataaaggaaaagatactggagcatattgtgcaagtccatacattacacattcatatgtatttatttcatggactgggaaaatggctgaaacattcgttcttgcgcatgaattagg

SEQ ID NO: 4167 - DNA, 3003 bp, Artificial Sequence
  Description of Artificial Sequence: synthetic nucleic acid sequence
ggaacaccatctttaattaaagtgtctccgtttttattatttaacattaaatcaagtaagaaatttttatttttttggcttaattttccatttgcgataagtttatttaaagtcttgccgaaagcagcaggcgttgaagtatcttttttgctctttggtgaatagtaatttaattctatttcatatctaactggatttgttactttatctcccaatttttttaaacgttttttaatttttttgattccaccgatttcgtttataattttattgtttgctgtattatcactatacttcattgaagcctcaataagttcttttaaagtgatatcttttcctacatatttttctaaaataggagaataagcaactatatcatctttgttaatatgtacttttttatttaacttattataaggtacttgttctaacaaaatagcactatttatcgcttttgaagttgaagcataggcaaatctcttatcggcattaaattttacttccttaccacttttagtatctaatgcatagacaccaatattagcattatatttcttttctaaattatttaactctttagcatgtgaactggttgaattacatgcacttaaaactaaagcaattgcaattaaaagtattaactttttcaaaatataccctccaatattacagttgtaatttctataaatcaataatattacaattgtaatattcgcgtcaatagtttattataaatatttgaaagaaggtgttgaaatggctaagttattaataatgagcatagtaagcttttgttttatatttctattgttattattttttaggtacatattaaaacgctattttaattatatgttaaattataaagtttggtatctaactcttcttgcaggattaattcctttcatccctattaaattctctttttttaaatttaataatttgaataatcaagagcccacagttgaaagtaattcacacaatttgaatcctaacataaataccactaaacctgttcatgagtttacaacagacatccataagtttaattgggattcaatagataatatctgcacagttatttggatagttttagttattattttaagttttaaatttttaaattctttattatatcttaagtatttaaagaaacagtcactttatctaaatgaaaaagaaaaagataaaataaacaagatacttttcaatcatcaatataaaagaaatattgtgattcgaaaagcagaatctattcattctccaataactttttggtatggaaaatatattattttgattcccagtttatattttaaaagtataaatgacaaaaaactaaaatatataatattgcacgagtatgctcatgctaaaaacagagatactttgcatttaattatctttcatattttttctattgctatgagttataatccactaatacaaattgtaaaaagaaagatgattcatgacaatgaagtagaagccgatagatttgtccttaataatattaacaaaaatgaatttaagtcttatgcggaagctattatggattccgtattaaaaacctcatttttcaacaaaaatatattaagccattcatttaatggtaaaaaatcattactcaaaagaagattaattaatataaaagaaggcaatctgaagaagcagtcaaaattaattctaatttttatttgtatttttactttttttatcatgataattcaaagccagtttttaatggggcaatccttaactgattataattataaaaagcccttacaaagcgattaccaaattttagatgaaagtaaaaattttggttcaaatagtggatctttcgttatgtacagcatgaagaaagacaaatactatatttataatgaaaaagaaagtagaaaaagatattctcctgattcaacttacaaaatttatttagcactgtttggacttgaccgtcatattataagtgataaaaattcacgtatgtcatggaatcataatcattatcctttcgattcttggaataaggatcaagatttaaatacggcaatacaaaactcagttaattggtacttcgaacgtattagtaatcaattatcaaagaactatacttctgatcaactcaagcaattaaattatggtaataaaaatttgggaagttataaagcctattggttggaagatagtttgaaaatatctaatcttgaacaagtaatagttttaaaaaatatgatggaacaaaataaccattttagtaaaaatgaaaagaaacaattatcttcttcgttattgattagaaaaaatgaaaattatgaattgtatgggaaaacaggtacaggtatagtaaacgggaaatataataatgggtggtttgtaggttacgtaattacaaatcatgataagtattatttttctacacatttatcagatgaaaaagcctctggtgaaaatgctaaattcataaatgaaaaaatattaaaagaaatgggtgttttaaatggccaataagcaagttgaaatatctatggctgaatgggatgttatgaatataatatggaataaaaaatcagtatcagctaatgaaattgtagttgagattcaaaaaaataaagaagttagcgataagacgattagaacattaattacaagactatataaaaaagagattataaaacgctataaatataataatatttatttttactcatcaattattaaagaagatgatattaaaatgaaaactgctaaaacctttcttaataaattgtatggaggggatatgaaaagtttagtgcttaattttgcgaaaaatgaagaattaaataacaaagaaattgaaatgcacactatgatcatatcggagcattagataatattattgaaaaatatcaggttccagtttatatgagtaaagatgagtttgattttttaactgatccagataaaaatggctcatctaaatttacacaatatggtttatctaaaatagaaagtcac

SEQ ID NO: 4168 - DNA, 3249 bp, Artificial Sequence
  Description of Artificial Sequence: synthetic nucleic acid sequence
atgcattgatagaaaaattagaaaaagagttcaagttaagtgtcttgccgacactcactccgttaggtattgatgcgtatcatccatttccaaagttaaataataaaagtttaaatatttttgttgatatcgatacggaagatgccattaattcagctatcgttcaaattccttcattaattccacgctttttaactttaaatgagggtacaaaacaatacgttgtcatggtagaagatgtaattacgtatttcatcaattatctatttacaggatacgaagtactaaatacttttactttccgaataacacgtaatgcagatttaaccattcatgaagatggcgctgaggacttgcttatagaaattgaacgtttcttgaaagaacgtaagagtggttcggctgtacgtttagaattagattgtcgcacttctgaaaaagagaatgtagaatggttaatcgatcaattagaaattgaagataatgatatttattatttagatggtccacttgatttaacattcttatttggattggttgatcatctatctcataagctcaaatatttaacgtatgagaaatatacccctcaaccacctagatcattaggcaacaagaatatctatcaattatcattagaaagagatatattcttccaccatccgtatgaatcatttgaaccaatagttgactttattcgacaagcagcagatgacccaaatacaatcgctatcaaacaaaccttgtatcgagtgagtaaggattcgccgattattaacagcttaaaagaagccgctgaaaacggcaagcaagtaacggtgctcgtagaattaaaagcacgctttgatgaagaaaataacgtacattgggcacgtatgttagaagatgctggctgtcacgttatttatggtatgacacatctaaaaacgcatagtaaaattgcgctagtcgttaaacgcatcaacaataaacttacgtcatttgttcatttaggcacaggtaactataacgataaaactgctaaattatacacagatatgggtatcatcacgacaaataaagatatcgctgaggatgcaattaacttctttaattacttgagtggttactcaacaaaaccagaatacaataaattgattgtagcaccatacgatattcgagacgtcttcattgatcgtatcgataaagaaatacgtagtcatttacaacatggtaacggtaaaattatgatgaaaatgaactctttaaccgataaaacgattatcgaaaagctcttcgaagcatcccaagcaggcgttaaaatacaactcatcattcgtggtatatgttgtcttaaaccaggcattccaggtattagcgaaaatatagaggttgttagtattgtgggtcgtttgcttgaacattcacgtatttactacttccataataatggtgaggcgcatatttatttatcttcagctgacgttatgacacgtaatatgattaaacgtgtcgaaatattattccctgttgaagataaatcaataggacaacgattagttaactatatgaatttacaattatctgacaaccaaaaaggtcgttaccaagatgcacaaggcgtttatcattatgtcgaaaacaattcatctcctttaaactctcaatcttacttgatgcaagaagcaattaagtatggagaagaactaaaaaaacaatcggtacaaccttctggacaacccgttcattctagacgtggtggtagttggatacgaaaattaaaaagtacatttaaaagataaactcaccttgacaattgtattttatatgaaatgaacacgaaattaataaatatctttttataaatatacaacttgttattctttataataattaagaggtacagaacacatcactttaactcaacattttgtgagtataaaaggtcgtgcttgtacctcttttttatctatgatgatttataggattgtgggtgtgcataccactcttttaaaaatgtatataaaacatcactatattgagctaattcctttgcttttattttctcatctacactatgtgcctcttctaaactacctgggccatataatatcgtgggaatgccaaaatgtgctgtccaacctccatcagttacagttgtactcataccatgttcaagctttttattatgaatatgttcatgtgcttcttctaattgcttaaaacctggatgatgtgtcggaacagtgaaacttgggaagatttctcctttatcctcaatcatggatgtaccaccccattcaaattcaagtggattctctctgagccatacatctgcttctgcaaccttatttaaatattgctctatttcattaactacagattcataactttcgttcggtaagtaatgaacagtaatccataatcgacattcatctgcaataaatgcagggtgacgtccaccttctatgacagctgggttaattgtattcgcacctggaggcattccagggctcttcttcatgacagcccaatgcctttcaagttcattaagcgattgaatcacctttgtcattttttcaatggcacttgcaccaaacaagcccccaccagcatgtatcgtttgactacgcgcaccatcatgtattgtatttttacttttaactgtaatccatccggtaatcacgccaccttgcccaagtgcttgattctcactcgtatctaagacaagggctaagtcacctttaggtcctatttcacatgcacgtttagttcctgcttcacctacttcttcaccgactactgattgaacaataatatcaccttctggacgttgcccctcttgatgtaattgctccaagacgtagaataatgaagacataccacctttcatatcgctaacgccacgaccgtataaccattcttctttgttggtaagtttaaaaggtggatactgccaatattgatcgtcatctacagaagctacatcaacatgtccattcaatatcagttttggcgctttaggattgtgcccttttaaggtagctactatcacactatcattgtcgtataactgttctctctgtattgaaaaatccagttgtttaagtaacgtttcgatttcatcttgcaatggatctgtattacgtccaggtggactttcagtattaaatctcactagcatatctaaaatttcaaattgacgtttatccaattgatatcccatcctttgtgtaaagtggttgaattcaaacgtaacaatttaagtgt

SEQ ID NO: 4169 - DNA, 3368 bp, Artificial Sequence
  Description of Artificial Sequence: synthetic nucleic acid sequence
ctttggatttctcaaaaattggaagaatgtgatttgaatgattcagtttgaaattggactcaacactcaactgaatttttgataatatatcatcttttgataatgggttttgcatggcttttacaaagaattcgatttttttagcatcttcatctgaaaataaaggtgatacttgtatgactttaggtatttgtaaaagttgacttgtatcaaagtcgtgagtagtaattaataagtcaatcccttcaaaatgatagttattaatatcttcaagttttaatgtatctacgatctgtattgcatgattaagttgtttgattttctcagcaagcaacgttgaaatgcctaagccataataacaagcaattacaacatgaatatgtgatgacttatggcgttcgatagaagactgaaaatgtatagttaaaaaggcaatctcatcttcgcttaattggatattggtatcttgtgataattgtcgaatactatcatatagtgtattaaagacaaagggatatagtcgtttgatttgacttgttaatggattatttagataaacatgactcattaatcgcaaatatgtacgactaaagtggacgttcatattatcttttaaaattgtatcttgtgaaaagggaaaaccaatatgttgctccattaattcaatgagtcgatcgatataactttgaataaatagttgttggatccctaaatcaaacttattgaaatggtagctaataaaaaaggaaaagcattcacttgttttattgttaagttgatatccaagggtttcattgatatcttttatacactttttcgcaatagttaaagattctgtatcagtgctccaatcttcttcctctggttgagaatgtttgataattaaaattagatgcacaagtaattgttgtattttattttcagaagttgataattgatgattatctatatgctttgagataatttgttttatttttctagtatgggcttgaggtaactcttgtaaaataaggttttcaactttaaagtcatcgtctgtaagttgattgatatgaagtacagcattactgatactcgttgtactcgcatcgatcatgataccttgcttctttttaattgataaataaatatcaaattttatagcccacgtttgtatacgtgttacataatcaatcacttttgattttgttaaatggtaagttgaagatagctctttgatagtgaatgtatgcttttccataaataacctataagcaattgtgataagcaatttattctcttttacaataactgactctaaagcagattgtatctcatcaggtgtataaagacatgtatttagcatataacctttagattgtacacttaaaattaattcatttaaaaatgtagtatgtatagttttaatatcattacgtatagttctattagatacatttaactgtttggcaatatcatagccacttatatacgtatctgtataatttaataacaatttgatgagtttgatttgtctatcaatcacgattaatcactcttctctatataaactttgagaaaacgctttaataatttactttaattctattattaaaattgagcacaatcaatatgggggaagatggtgaagtattagaataaatgattttgtcagagaaatagagggctaaaatgataaattctaaaaaggctatagaattagtattttaagatgaatagtatagtcacttgttcaacttaattagcatctacaaatacaatgaggtttcatatgctattttgaattaaacaaattttaaaacttggtcaacgatttttgcaactgtatctgcaataccgaatcccatgtctacccaatcttgttttacgtgtaaaccagcgtttacagcgttatgtaatgattcaacgatacctgacataatataatcctcccttgttgttgtttgtgatacgcttacataactatttctaacatacacataggtacatgtaaatggagttgagaaattttaacaaattctttaaaaacaaaataaaattgagttcgatgaattcgaaatattgtgacttcttataatttgatttattgcaatagatgaatattgaaaattaaatgttaataaaattgtgcatttattcacaatatattcacatcaaattgcgcaaattatgataatttaaatatataatcttaagaaatattgaggagtggttttgttgagtaactcaaaaaaagtagccgttgtcacaggtgcagcacaaggtattggcttgaaaattgctgagcgtctatttgaagacggatatagcatcgcgcttgtagactttaatgaagaggtagctaaagagtcagctgaaaaattatcaaaagaagggcaagaggcagttgcttttaaagcagacgtttcaaatcgcgatcaagtatttagtgtgttaaatcaagtcgttgaacactttggcgatttaaatgtcctagttaataatgctggtcttggaccaatgacaccaattgaatcagtaacacctgaacaatttaatcaagttgtaggtgttaacgtaggtggtgtattctggggtatccaagctgcaattgaacaatttgataaattaggacatggcggtaaaattatcaatgccacatctcaagcaggtgttgaaggtaatgctggcttatctctatatagcagtactaagtttgctgttagaggattgactcaagtagcagcacgtgatttagctgagaaaaatattacagtcaacgcattcgcacctggtattgttgaaacaccaatgatgaaaggtatcgctgaaaagcttgctgaggaaaataaccaaccaatggaatggggttggaaacaatttacagatcaaattgccttaaaacgcttatctaaacctgaagatgtagctaatgtagtaagcttcttagcaggtagcgattcagattatattactggccaaacaatcatcgttgacggtggtatgagattccactaagataaatatcaatgagatataaaaaagttgagtaaagttaattctagagattttaaaatttctagaattaactttttaattatcaaacattaacattcttctattctgtaaaaataacttaagctatttaaggtattaaggtatgttaactgcttagtaaatggtcaatatttataattatcaattaaatttaaaattgatggcgtgatatattgtggcatatcttttacaaaaggtatgcgcttagaaaaatattcactctcaaatccagaaatgacatgaaatctagcaattgcaaatattggataatctttaggtaaacaatgattgatactttgatttgttcattgctttatcatttaaacaaacat

SEQ ID NO: 4170 - DNA, 2902 bp, Artificial Sequence
  Description of Artificial Sequence: synthetic nucleic acid sequence
tattaaaacaaagactgatatgagtgaagatcaacaatttgacttttatgaaaatatgtttaatgcacttgccgataaaatcagattaaaaatactaaatcaaattagccaaagcttcaataaatcattatgtgtatgtgatttagaagagttattagatataaaacaatctaaactttcttatcatttaaaaaaattagtagatgcaaatgttcttattgctgaaaagcatgggacatggaattattataaaattaatgagcaacaaatacaggttgttttaaatgaagatacttgttgtaagatactttaagtatcttttttaatatagtattaatcaattttttttgattaatacatcaagaaatattgattaattaaatttggaggcattatactaatgttagattcaattatggaatttataaaaacatttgtgatgttgttttttgaattattaatactattcatcatcgtgagctttattgtaagtataatccagcagatagtttcagaagaaaaaataaaacactttttaagtaaacctaatcaagctattaattatattttgggaatggcttttggtgcgatgacaccattttgttcttgttctacaattcctatacttgcaggtttattaaattctaaagttccatttggccctgcaatgagttttttaattgcgtcacctttaatgaatccattaatgatatttatgttatgggccttattaggttggaaagttgctgttgtttactttattttactagcactctttagtgtcttaacaggtctagtattttcaaaaatgaatttagctgaaacttataaaggagtaaatgttaaaggcgatggattttttgctaataaaatgggatctcgttttaaacaagcattaaatgatgcgtgggcatttttatatccaatgcttccttacctatttattggtgtgtttattggagcgttcatatatggctttgtacccgaaacatttattacaaaatacgcaagtggtgatggcgttatatctgtattcattgcatctgttataggcattccaatgtatattagacctgaaacaatgttacctatagctgaagcattagcttcaaaaggaatgtcgcttgggacagttgttgctttgatcattggtggtgctggtgcaagtattccagaagttgtattattatcgaaactattcaagaaaaaatttgtagtctcatttgttatcgccattttagttgtagctatttctacaggtttgattgtgaacatcgttatttaaaggaggtgagataatgggagtcaaagacgtattaaaaaaattaaaacctcaggaacaatcttgttgttcagtagaaattgaagaaaaaacagagaagaatgaaaaaggacagcaagataataataattgttgtaacaattaatttagaagtctgtaaaatatatacttctaataaataaatgaacgacaaattctaatgtaatagtatggaatttgtcgttctttcgtttcagttaaggaaaatgattttgcttgtttagtatttctttaagacttataacaaaaagacgttaataaaaaaccgcatcattaaccgatacgcagaagcgtatcacaaataaaactaaaaaatagattgtgtataatataaaaggaagggatttatattaaaattttgaattcaaaaattattgaaagggaagctaccttagaaattgaatctatggccactaactgcttttttatatcaccacttattaaaaaatgtaagaatattcctcagtgctaagtgaaggaggttctagttttatttaatattcatattgataggtaatggttaataattgcctgtaaattattgttaaatatcgttgttatagtatcatcattcattactgtttaccatttcttttaaaggtttagaatttgtggggtttcttaatacatttttaattgttgattcataatcttgaatagcgtcgatgttttgaggctctatgattgtgctatcatcaggcacattgatttcaatttcagattttccgtacaaaacttgcgtcttcacttttatcccctccaattaagatttttaaaataaacaccttcatccccaaaattataaggtgtgattaagagcgatgacttttcactgacatgatatatgcctacaatataggtataaggttttttttgaggtgatcaattgagtagatttatggatgatgctattcaactagcaaaaatggtaaatggacaaacaggtgttaatccaccagtaggatccgttgttgttaaaaacggtaggattgtaggtttaggtgcacatttaaaaaagggagataaacatgccgaagtacaagctattgaaatggcaggtttaaatacccaaggtgctaccatatacgtttcattagaaccttgcacacaccatggttcaacaccaccttgtgtgcataaaatcattgaagcgggcatatctaaggtcatctatgctgttaaagatactactttagtaagtaagggtgacgagattctgagagaagctggtatagaggttgaatttcaatataatgaaaatgcagctgcattataccgtgacttttttactgctaaaagaaacgaagttccagaagtaactgtaaaggtctcatctagtctagatggtaaacaagcaacagactttaatgaaagtaagtggataacaaacaaagaagttaaagaagatgtttatcaattaagacatgagcatgatgcagttattactgggcgtagaaccattgaagcagacaatccattgtatacaaccagggttcctgatggaaagcatccgattcgagttattctttctaagaaaggtcaactcgattttaatcaacaaatatttaaagatactgcatc

SEQ ID NO: 4171 - DNA, 3263 bp, Artificial Sequence
  Description of Artificial Sequence: synthetic nucleic acid sequence
tatgacctgattttggcatctttttagcaaatctccacaaataatgatgcttaagttcgacatccgtaggtgcactaataccattcacttcatatcctgttggatctaatttttctctaatacgtttaatattgccacctttaccagcagcatccataccttcgaaaaccaaaacaaggggaatctttctttcatataaagcaaattggatttctctcattctctgttgcaattcaacaatgagatttttatacgtttttttgtctactttctcaagattattattaaataaagaagtcgtaaagcttgatgtgaacttaccgttgactttagttgtttgttgttcaactttttttatagcttgctcaagtctatctattaaatgtaagtacattttttcaaaagcatgctcgcgctctgtgtaatcgatcactttccaatctttatctttgttgatgaattgatgcatttgatttagataactttcttgaggtataacattttcatattcttgaactttccatctagttaatggattatcttttgtctgttgaatatgttcattgcgtttttcttcatttatttctatgaaaaattttataatttcatagttatcattctttaacatcgattcaaaatgataaatttgattgactaaaacatcataatttttatattgatcatgcttaattttattttctttataatctaaaaagtgtgaataccaacttctaaaataaatatttatattgcccttttgtggtaaagtattccaatatttttgtaaaaattggtaacgtaaatcgtttgactctggcgatttagtagctataaatcgcgaatatttggcatctaggtgcaatagtaattcatttgataaacgtgtcttccccgaagcaggaatcccctcaaataataccataattggaatacctaattcatgagtacgtcgacttaatcgagctacttttaattgtaattcttctagtttccctgacatcgtttcaccctctatatatgttaaagttagatgttatattgttatattttaacatagaaaaatctcttcaacgttctaaacgtcgaagagatacgaagctttatcccataaatttaaaaatatcattctcatacaaatgaattaatcttctaagtattaaatctaaaatccatgcaactagaaacggcacaacaaaaaaggcgatgacaataagtaataaacttaaccatgcagaatcaacatgcataaatttaaaggcattaataggcccaaccattccgataaaaccaaatcctgctgattcttttgttcctgaaataccaataatccctgaagcaataccagatattgccgctgtcaagaaaatcggaatcataatgacagggtatttaaccatatttggcatcatcattttcaccccaccgaaaaatattgataaaggaatacctacatgattaactttgctggtaccaatcaataatacagcttctgtcgctgctatacctattgaagcagatcccgcagcaatacctgataatccaatagcaatagctatggctacagttgacaatggtgatatgattataaaactaaacaccatagagattaacatactcataaacactggttgtaattcagtaaagctattaaccatgtcaccaattcccgttgtaattaaccttacatatggtaaagtaaatacgccgattgtagctgctaaaccaccaacaactgtcggaaaaacaattaaagccatactaccaacacgttcttctattaataaaataagtaacacggcgatggatgcagttaacatcgtattaattaaatccccaattcccgcaattacccatgtaccttgtttaaattgagctgcaccactaccaacatatgaggcacttgctactacagctattgctaaaggtgtcatattgaacttcatagctatcaatgctccaataagcgctggcactgtaaattggatggcttgaacgacccctaataaagttttgaaaataggatgatattgcataaagtatttaaaaatttctcccaaaattgcatttggaacgagtccggctactattccaattgctacccctgataacactctaaaaacaaaatcctttggtccatcgatattttttatcgtcgacataagttaaacctcccaatgtgctaagtgaaattatgtataaaaagagtctcgaagcccatatatgattcaattaaatctttcttagatgctgtaacttagagggataattagtgaaatgcatatatgacattcaagactatgctcaatagtatatcatatttttctgaaaattaagataacttattcgacatttaattcaaaacattaatttttttaattaaaatacacttcataacctttagtttaaatactaacgttatgaagtgttagctaactcgtcctatttgaaataataagtgctttactcttcctcatttttaattttagctttgcgagattcttttttatatttttgatacatcaatagcatgataacaaaccatacgggtgcagaaagtacggcataacgcgttgcactattaatcaatagtataataaaaataaatgcaaagaaccctaaaatactgtaagccatgtattttccgccccacattttatagttactttctttatgctgtttcggttcatgtcttaaataacctagatacgcgatcataataattgtccaaatcataatatttaaaacagttgaaaatgttgtaatttgtacgaacactttagtcgcatctttaaaaattgcatttaacacgactgaaatacttaataagccacatgtcactaaaatagcataatgtggtacgccgtgcttattggttctatgtaagaatgctggaccttgctttcttccagctaatccaaacatcgtacggctattagcaaatataccactattacaagaagaggctgcagctgtaagtacaacaaagttaataatacctgctgcaaaagggattccaactaatccaaacattttaacgtatggactgtcagcaggattcaattgttgccatggtacaacagacatgataactgccaacgatcctatataaaataataatattctaaacggtacattattaattgcttgaggaattgttttgtgaggatctttagtctcccctgcagttattccaatcaactcaataccaataaatgagaaaattgccatttggaatgacatgaagaaaccttgtgcaccattag

SEQ ID NO: 4172 - DNA, 3592 bp, Artificial Sequence
  Description of Artificial Sequence: synthetic nucleic acid sequence
accaatgaaaacttcattttttatccccgcaaatgatatttcacgacatgcaaatgatatttcacgacatgcaaatgatattgtagaaacaattcccgagactgaattcgatgaattaagacatcatcggggtgcaacatcataccattcaaaaatgattttaaaagaactatgacattttacgtaaaggttgatggtaaagtgtaatgaaaccagcagtgagtaaaaatagacttattataccatttgtattgaaatttttatctttcataccagtattcggtagcatatcagatgaactttgttgtggtaagtcagaagattgaacttgacctacgtagtatgaattgagctcacgtgtactatccactgcttgtgtctgttgagtagagtgtcgttttacttgtgaagatgttgtagcaatatcttgtgcaacataacattgtcgtgtattgagttgactatattctccataatttccacttttatatagcaccactccatttttgtatactttataagtaccgacacctgcaccagatttattatttatatcaattgtgaaataatcccctttatccttaacttttttgaaattttgtaagtccggattgccaccactatttttcatagcttgaattgctacagcttgtgcatcatgagatgttacttcggctgcatgtgtcgttgtgtcattgacacttggaaataataataatcctgttaatacagtcgttgcaattagagaaatctttttcacattgataaccccatttcgaattgatgatatatgatgtatttaaattactttacgattatagtttagcaccttgattgcgagatgatagtagtttaaaagaattcaaatacaaattttaagatacgttaaaaatcttaataatcataaaccattgctaatgatatagcagtaaaacagacggcaagtattgcttcgtaaatagcgaatctttaagaatttgttaaattgttgtacatttttaaaaatagttagtttataattattttataaagtggtttattttgttgagttaaatatattagaatgtgagggagtatttgaattgaagaaattagcagtgatatgtgcgtttacaatattaatattagctggttgtggtcttggtgatagtgataataatggaagctcaacgataaatgatgatcaacaatcaggatataaaagtaacagagattcaaaatcaagtataagtagaaatcaaacagaagataatcagcaggacacacaacaagatacccattcgaatagatactatgctcaagtttggttaactgctttagatagttatagaggtgaaagtgaccttccttttgacgatttagaaattgtacatcaaaatatttctaataaagttttagatccctatcacccagacgaatcagccaaactacctgaaggaacagaattgttaacagcaagtgttactgcagcaggttcagtttattataaaagtaatggagatggcacaattacaatatatagtgtaccatcacatttccaagggagttggcgtgacgctgattactctaaaagagaatctcaacgcattatagatgatgctcgtacagttaagttatacaacgctagtgaaagtgaaatcaataagataagtcagatgatgaggactgaattttcagttggtgataatttaacagatgaagatgatacttctgaatctgaagatcaatcaagtagttctgatgaagcaacggtgacacgaagtaatgttatcgatatagttgaagactacgaagggcatcaattagatacagacacatatatttacaaagaaccagaaaaagatagcgatggtagttgggggttctcatttacagataaagaaggccatttagaaggatcttatattatcgataaagatggagaagtaacgaagtatgatgaagatggagagccagaataactaataaggcagtagagatatcatagtctaattatctatgatgtttctactgccaatatttattttataatgtgtaaaagacattgagatatgagttttaaaatcataaaatttttttcgaaatgataggtagacaagtcgccattaaaatgatgaaaaaaagatgtgcaactaaccaccatgcaaattcgttccaactaaaggaaaaaaatggacgttgcgcaagaaaaacgagaagtggatacatcaaagtaaatatcaatactaaaggtaagtatgctagatgatacaaggattttgaataatgatagataattaaaaaggcgagataaatcaatattccaatacttaaatgaatcagtacttcaataattgttggcacttcatcagggttgattaaaaaatcaatattgagtaataactgagttaagtgtgtgttttgtagtaacgcatccattaatatagttataataagtaatatcacgctaatcgtggttgcgcataataaatgataaaatatttttaaccaatgcatattaatctcctccgtaaaatattttattctaaattccctttaaacatatattctaagcctcaatgacatatatttctttatcacaaaagattcggaacgtaagtattctaaattatcagaaaatatttacaaatctgaaaattattagtatattgattactatcctattaatattgatttattttaaaacgatagcagttgatagtttttatagcttcatatgtagatagctatattaaaaagagtcactattgggagggaactcaatgagtaaggttaatcatttgatagttgaagatgaacgttattttgcacattctggacggattaaatattatccactagttattgatcatggttatggagccacgttaatcgatgtagacggtaagtcttatattgatttattagcaagtgcaagttcgcaaaatgtgggtcacgctccgaagccagtagtcgaagcaattaagaaccaaactgagaattcattcattatacaccagcatatatgtatcatgaaccgttagtgcgattatcaaaaaaattatgtgacattgctcctggaaattatgagaagagagttactttcggattaagtggctctgatgctaatgatgggattataaagtttgcacgagcgtatacaggacgtccatacatcataagttttactaatgcataccatggttcaacatttggttcattatcgatgtcttcaattagtttgaatatgcgtaagcattacgggccattacttaatggattttaccatataccttttcccgataagtatagggggatgtttgagcaagctaagcctaacacggttgaggaatatttagctcctttaaaagaaatgtttgcaaaatacgtccctgcggaggaagttgcatgtattgtagttgaaacaattcaaggtgacggtggcttacttgaacccgtaccaggttattttgaagcattacaagagctttgccacgctcacaatattcttattgcagttgatgatatccaacaaggattaggtcgtacaggaaagtggagttccgtagatcattattattttactccagatttaatgacatttggaaagtcc

SEQ ID NO: 4173 - DNA, 2937 bp, Artificial Sequence
  Description of Artificial Sequence: synthetic nucleic acid sequence
taccagtctttccaactattattttcatcaatactggcaagtcttatccattgatgatcaaccttttgtctaaagtgattatgatgttttaacaaacgttgaatatatgcatctggcgcttgaataacaattaaaagcctaataggtgcgtgatacgcctctttgtcattcatcattactgactgccatggtaagccatacattaaatcactagcatttccttgcatgacacctacaccacttgttacagtttgcgttgttttactaccgcttccataatagtgaggtgccacggttgaggcgtagtattgtaaattaatccattgtgctactagtgctggcccagaaataattgtatttaaaatctcaccgtcttcatcctttgtccaatcataattatgaagaaatgcccgtccctctagattactattttgggtgatttgacgtttcccaataatgaattcagcatttcgtgctagaccccattctggacgaacttcactccaatcgctagcgtgacgatgcgcttcagcattaggattatggtcagtgttatttatatttggcaacgatgccaaacgttctaaattggctttataacatacttttggcatcacatgcttaagttcgtcaaaggcattttgagcttctgtagttaaaggtggaacataaatatactctaactcatcaactgacgtttgatgttcagcagctataaacactgtatgtcttggaatgtcgattccttccatcaataatccacgtctaacattttcttgattacacattacaatatgatattatatttaaataatagaagaatagcttagagaggtcgtaaggcatggataaggaaaaaggactgttaattgttctttcaggcccttcaggtgttggaaagggaactgttagaaagaagatatttgaagacccaactacttcatataagtattctatatcaatgacgacacgtcatatgcgtgaaggtgaaattgatggtgtagattacttctttaaaacaaaggaagaatttgaggcgttaattaaagacgaccagtttattgagtatgcacaatatgtaggtaattactatggtacacctgtacaatatgtaaaggatactatggaagaaggtcatgacgtctttttagaaatcgaagttgaaggtgctaagcaagtaagaaagaaatttccagatgcgttgttcatatttttagcgcctccaagtttagatgacttgaaagaacgtcttgttggtagaggaactgaatcagatgaaaagattcaaagtcgtgtgaacgaggcacgaaaagaagtagaaatgatgaatttatacgactacgttgtagttaacgacgaggttgaactcgctaagaatcgaattcagtcaatagttgaagctgagcatttaaaaagagagcgaatcgaagctaaatatagaaaaatgttactggaggtcaaaaaataatgttaaatccaccgttaaaccaacttactgcaaaagtgaattcaaaatatcttattgccactacggcggctaaaagagcacgtgaattagatgaaaaacgcgaaacagcgcttttagatcagtaccattcagctaaacctgttggaaaagctttagaagaaattgctgatggtaaaatagaacctgttgtaccgaaagagtatttaggataaagttttattaatattggtagagcctgggacataaaaattgtcctaggttttttaattactagtaaattataaaatagttgaatagcgtataaaacaagcttgaaatcagacaaaaattctttgtccaacttgaaagttacatttagtaatagtcacttttttaatttaatgattaatttgtgtataataattataaataagtcgtcaatgaatctgaaatataaatgactagttttagccattaaatctcttcgcagtagattgactaccctgaaatgtacttaaaataaaacgtttaagggtctgagtttctgttatgaaaattttattagattctctatttaaggtcatattgcgagagggtgggataatgaattctattccgctctctttttacgagggatatgcttttgcttagccaaagttgcctttaaatttgatatttaatagataacacataactaaattattccgttccatttctaatttaggcgtattgataaagtattaagggagaatataaataatgaaacatattttattagctgttacaggcggtatcgcagcatataaagcaattgatttaacaagtaaattaatacaatccggctatgatgtaagagttatgctatctgatcatgctcaagagtttgttactccgctagcttttcaagcaatcagtagaaatcctgtttacacaaatacatttaaagaagaaaatcctgaagagattcaacatgtatcattaggagactgggcagatgcgattatagtcgcgccagcaactgctaatactatcgcaaaattaagtgttggaattgctgatgatttaattacttctacattacttgctacaacaacaccaaaattcgttgcacccgcaatgaatgtaaatatgtataacaatccacgtactaaacataatatgaaagtgctaagtcaagacggatattattttattgaacctggtagtggctatttagcatgtggttatgtagcaaaagggcgaatggaagaacccatgcaaatcctatctgttattaataaattttttactcaacagaagaatgttgtcaaaagctctttttctggaaagcgcgcattagttacagctgggcctacagttgaagttattgatcctgttcgatacgtatcaaatcgttcatcaggaaaaatgggatatgctatagctgaagcattacgagataagggagcaatcgtaactttaattagtggtcccacccacttatctctacc

SEQ ID NO: 4174 - DNA, 3268 bp, Artificial Sequence
  Description of Artificial Sequence: synthetic nucleic acid sequence
aaattaaaacagtattactgattaaattaaatgatagcgtatgcgtaaagtaagcaatcataaggattaatactattgctataacaacgattccgatgattgttccgtactttttcttttcagaagaagataatgggtttgtcggtttcataccgatactacccaaagtttttcggttaaatagtaagtaccaaactaatccaagagccatccctattgctgcaatcaagaagccgccatggaaatttctaatatcaatatagtgttgtaaaataattggtgaaacgagtgcacccatgttcactgacatatagaagataacaaatccagcatccatgcgtacgtcgttttctggatagagtctaccaacaatatttgaaatgtttggtttcattaaacctgatcctacaataataaagaacatagaagtgaataaacctaccattgcaaaaggaaggcttaaacatatgtgacctataataattaatatagctccgattaatgtggcacctcgggtacctgtaattctatcagctatccagccacctggaattgaagacatataaattaatgatccatatacagacatgatagacatggctgttgttttgtccattccaagtccgttttcctggagtgcaaaatacatataaaaaataagcattgctctcattccgtaatagctgaatctctcccaaaattctacgaaaaagagaacgcctaatccttttggatgcccgaagaatccatgttgtggtatttcttgaactgctttttcatgggacttatttgaagtcataaatcatcccaacctttcttgcccaaatcaccttattaaattgttttaaggtgattttactattgtgataaaaaaatttcaataattttcaaaaaatttaaaaaaagaaaattctgtcaattgatataatctgtaacatttaatccgatgatataatttcaataattttattactatatttattcaatgacgcgctatatataaaatacgctttaatgcagcaaagtgcaacaaaaaatctctaccatcaaatataacagtagagatttttataaaatatatattaacgattatctattttttctggatacatgtcatgattcattaatcgatgttcagccattttttcatattttgtatcaggacgaccataattcgtgtaaggatctatggaaatgccacctctcggagtaaatttaccccaaacttcaatataatgtgggtccattaaattaattaaatcattcataataatattcatacaatcttcgtgaaaatctccgtggtttctaaaactaaataaatataactttaatgatttagattccaccatcttgatattagggatatacgagatataaattgtcgcaaaatctggttgacccgtaatagggcatagtgatgtgaattcaggacaattaaacttaacaaaataatcacgaccttgatgcttattatcaaaagtttctaaaacttccggtctataatcaaattcataagtgttattttgattgcctaataaagtaatatcttttaattcatctttttgacgtccttgtgtcaattttctagctcctttaattattttgatttatagttgtttcacgtcttgctttatcaaacatatagtaacttgctccgataatgacaatatatcctactgttgcaaacatatcaggtgattctccaaacagaataaatccaaataatgcagtaaatattatagacgcatatgtgaagatggagatatcttttgctggagcaaaactataagccaatgttataccaatttgtcctacagctgctgataatccagcgccgagtaagaaaagaatttgaattgttgtcataggtgtataagtaaatattgaaaaaggtataagaactacaactgagaataatgaaaaataaaacactatcgtataaggtttttcacgagtgctgagtgctctaacacatgtgtaggcagaagctgcaaaaataccggatagtaatcctgctattgaaggaataactgatgatgaaaattctggtttaacaattaatagcatccctattatagcaataatcatcgccgtgatttgatattttcgtaccttttcatgtaaaaaaattaaactaagaacaattgtccaaaaaggatttaatttcattaatgtatcagcatcacttaataccatgtgatcaattgcgtagatattaagtaagacaccaattaacccaagtgttgaacgtgagatgagtaggggttgactacttaattttccaaacataggttgcctatatttataaataaaaaataatggtataaacatggctacaaaatttctagctagagatttttgaaagactggtaaatcaccggccaatctaaaaaagactgacataaaactaaaacccacagctgaaatcaatatagcaataatacctttaacttttgaattcaatatcatcgcctcaatattatatgattaacgacattatattagcatataaaatctaactatgcataagttcttgataattcaatggaaacgagctataataaaaaacgaacaaatgttcgcttttaaagattgttatttcttatgcgcaatttaataaaaagctagaatcatgtttttaaaaatgtcatttatatctgttattgtagaaatttacgtaactattcttttaaccctatatgtctaatttcaatagaaaagcaagtaaagacactcaaaaaaatttttttattttaaaataatgacactaatctcgtagtgatgcactttccaaatgataggttgtttctgccatcaatttttaactttcattagtgatatgagttatgtataatgaaacacagaatatagtatcaaattagaaatgcaaacactatatatagtgtttagctgagaatttaacgttgtagaatttaatcattttaatgcaatttgacactacttttatctcgaaaatattgcaattatagtaaaaccctactaaaaagataatttatcatgtagtgcaaatttaagttttaaccactatatattgtggttatttatatattttaaaggctatttacagattgaaaaaattttacgtaaaagtaactattttcaactgtttttataagtagatgatttaaattatattaaagatatttaatcatttctaatctacttttggctgaatcaatggttgacgaaagaaggtgattcaatgaaagtagtatattattcattttctggtaatgttagacga

SEQ ID NO: 4175 - DNA, 3349 bp, Artificial Sequence
  Description of Artificial Sequence: synthetic nucleic acid sequence
ccaacattatggctcatattacattaaattatttatctaaaactttaggaatgcatcaaacgattaatgtcattcttccagaagataaaagttactttgatacaaatgaaaatgcgaaaccattaaaaactatgttattgctacatggtttatcaagtgatacttcctcttatatgagatatacgagtatagaacgctatgcgaatacccaccaactagcagtggtgatgcctaatgctgatcatagtttctattcaaatatggcttatggacatagttattatgactatatactagaagtttatgattatgttcatcaaatatttccattgtctaaaaagagagaagataattttatagcaggtcactctatgggaggttatggtgcaatcaaatttgcattaacgcaaagttatcgtttctcaaaagccgctatgctttcagcgccatatgatgtttctatgattggtcaatatcaatggtatgattttactccagaagcgattgtaggtaatacgcaacatgtcgcggggacatcttttgatccatactatttagttgaacaagcaatagacaatggacaaacgttaccacaactatatattacttgtggaactgaagatgaattgtatcaaggtaatattgattttgtgaactatttagatgaaaaaggtatttcatatcaatttaaaaaagcgccaggtcatcacgattatgcattttgggataaagcaatagaagatgtcattgaccgttttacatcatcacatatttaaaatgaatgttagaatatagttaaatccatacggcttttgttaagattaataaagaagtgggagagcgtacgtattgaatgagttagattatttcaacaatgaagcgtcccatgcatgtaaaatttgaatatagaacttttttatttaagcatcgactgctcatatgctaagaacgcctaggacgactattaatgttctaggcgttctttttttcgtcatttctaaaagatataactatgaataggtaaatatttttccacttttaaaagattatgagtatattaaaacttgtgtaataagtaagcctccaccaaatattaaaacaaacgcgacaacaggccatacgaaacgtaaccagtgtgagtagcgcatgtttaacatttgaagtgttgccattacaagtccagtaggcgctaagaacaacattgcatactgaccgaattgatatgttgtaacaataacaaatcttggtatacctactgtatcagctaatggcgcaaagataggcatagatagtactgctaatcctgatgaggacggcacgataaatcctaaacagaaaaagataaagagcagaacaatgataaataaaggcccactcatatgttgcacgatagatgatgaaaagtgcaagattgtgtcagaaatcattcctttattcaatactaagttgattcctcgagctaaaccaatgattaaagatacacctactaaacttgaagcgccattaacgaatgcatctacagtgcctttttcgcctaaaccatattgtcctgttccagcaataaacatgatgacaatggtaaagatcaagaatgcagatgccatgactgggaaccaccatccttgtgtcatgacgccccaaaccataatagggaatggtaggacgaaaagcgtaagaataatctttttacgtaatgtaaactcagaagaaccgtcatcatggagcacagaccactgtttttcaaatgctgctttgtcttcataagaataagaggatttaggatcttttttaatttttttacaataccagaataaataactaataacaaatatggcaccgatgatacaagcgcctattctccaataaagaccatcagtaaaagttgttcctgctgcattagaagcaatgacgactgagaatgggttgattgttgagaatgtactacccacagagcttgctaagaaaattgcaccgactgagacaatagaatcatatccaagcgcaataaatattggaacgagtacaggatagaacgctacagcttcctcttcaatgccacatagtgttccacccagaatcattaaaattgctacgaacataatcaacataaattcgtggcctttcgttttttgagtaagtgctaacaatcctgattcaaaggacccgctcgcttgaacaataccaatcagtccacctagaacaagtataaagaccataatatcgacggcttcgatggttcctttaaccatgctactagtaatttgatcaagaccagctggatgttgttttagacgttcgtaagtattaggaattgaaacgggtttattaattgcaccagatttaaattgttctattttgattttaactcctaatcgatcaagctccttttgtgttccaggaactttttttacttgatgatgaggattgacaatttttaattcttgggatgaaggttcatatgaaagttttgagtatgcacccgcggggattatccaagttgctataactgcgacaactgttaggataaagagaatcataaatgcacctggcattctaaagttaaaacgttttttctttttattatcattgatcgcttgttccaacggtttcatctccttcgacagttaacctaaaataaaagcctatcaattgaatttggttagtattttacatgattgattaaggaagtgcaccctgtatgaaatggagaggagtggaataacaggatgcactgtatgaatatgattaaattaatttctacttatacgttaaaacgttactttgtaatgagtgtgccaattttaccttctagtgctgcatctaattgatttaatgatgtgatgagcacgctaccgttaggattattttcaataaaggagatggcagattcgattttaggtagcatgctgcctttggcaaattgttcttcttcaatatatgttttaagcgtatctatatttgttgttttaagtgcttgttgttggtcagtatgatagttgatataaacataatcaatcgctgttaaaataatgagttgatcacagtgaatatcagcacctaataatgcacttgttttgtctttatcgatgacggcatctatacctggctttgaaaaattagttccagatgcgaagcttgacgacggttatttcacgttaattattgtagaaaaagcaaatcttgctgaattgggtcatattatgacactagcgtctcgaggtgagcatacaaaacatcctaaagtcatttatgctaaagcgaagtctattaatatttcatcatttactgatatgcaacttaatgttgatggtgaatacggtgggaaattacctgcaaatttccttaattt

SEQ ID NO: 4176 - DNA, 3043 bp, Artificial Sequence
  Description of Artificial Sequence: synthetic nucleic acid sequence
taaattataataacattacaatatttatgaatatacaatattcataaatacgttaaagttttttgtgtttaagagcttagagaaatattctattatgttgaaagaggtagttttaaatataaaattgctaattgtatatatattaaacgaggggagacatattgaatatttacattgccatcgtattaggattaatttttgtattcttatctgatatggattatagaaggagaaacaatagtacaaatatggataagaaaatgataaagattagcttttttacatagtgtaattactttaattatggttagtttagctatatatttatcttattttaaataatcatacgaagaaaatatagaaaaaggtaaaaatacccttagaagtagataatctaagataatgtaaaaagagatgtgtcataatcagatattattttttcacaatttattatcaatgaacttttgcgatataatgtgttgatatactgcagtgttaaactataatgagattaattagtgtattagaggtatatggtatctttattaagttgtttaatacgaatctaaactaatgtcctaaaatagttaaaggttttgaagaaatgttttaataaaataacaataattattattttattaaaacattctcaaccatatattttactaattaaaatttttaagaaggagaatttatttgagtttaaaggaaatatggaaagttctcataaataaaaaatggcaaactgaagaaatatgttatttaatattgtatatatttttagcgagtatttttaccacgccattgtttggtattcctttgggagttttagcatacttatatcttaatgaagaaatattgaagtagttagcatatatttctcattaaacttcaaatcgattttttattgaaagttggaataatcattttagatgttatattaaagacttttacatataatatatcttaaaaatataaatgattaatactaaactactaaaactgtttattagaaataatgccgtttttacgataattgctacttcaaatataatttttttactaaaattaaagatatcaattaaataatactctactgcttgttagttgcattcatttccaaattattcatcatcttctaaaaagttggttacattaatcgtaatttctttagtattatggttaataattatatcttcgttataaccgagagatttaacttgaaccgtctcattatctatttttaatgctacttcgacatgttgatatttctgtaatatgagtaaagtatcttcattggctacaacatttataggcccttttccgttaatcgttattgtccattctctaaatttcatttacatttctccttttacattatagatatgattgattattcttaatgattttcgatcattgaaaactagattaaaattattatgattgaataagtaaaaagacatagcacatcttgctcttttttaaattgagaaataaaagtttcaacagatttctagaactgtcatatttaattttatttgaaaaatatatatcaactactttttaatatttatcattataaaatatgattggaaacttttgattatttagttattttatataattactttaacattacctttgtacttgttatcttatcattcatatatgataatttgtctatatatcttaagtgactcatttcaattcataggtgttatagtataaaattaaaatactgacatttaacaaatgatttaaagaaagatattttgaaacagtaatgaacaatctaaatacaataaaaaagaagcgcatttgtaggtttatacttaacaaatgcgcttctatatccttttatagttaaaattttagaacttaaaatcatttcaattacgctttaaataacttagaaattatcctcatattttttaacccttgaatattaactctacaataattggaactcattataagtgaatgtgtcctttggtatatctataatttttagggtctttaggtggaacaagcgctctactaatattcagtaatccaattttaccacataacattacgatgaacgtgtgcagggacttcagattgaataaataaagtcgatttatctggatcaatacctgttgccaaataaattgctgcgagttgacgtatttgtttgcgtaattttaagcgatcttgtggtaccgttattgcatgttggtctacgatacagaaaaaacattcatagtcatcttgaacatctacaaattgttttaatgcaccaatgtagttaccaattgttggaataccacttggctgaattcctgagaataaagtttccatattagatgcctactttctaattaatattgtttatgtaacattataacagtatttcgttaatttgtaagttgtgttaaaatatcaatatctgggtatatcgttaaagagagatatacatttttatttatttttaagatttctcagaaaaattaggtttttctcatttaattttaatcttagccatttataataataagtgtaagattaagaaagctaaaaacttaatttctttaattaacaaataattttaaaataatgaattaaattcattctataggagagtgagatgtatggtaacattatttacttcaccaagttgcacatcttgccgtaaagcgaaagcatggttacaagaacatgatattccgtatacggagcgtaacattttttctgaacatttaacaattgatgaaattaaacaaattttaaaaatgactgaagatggaactgacgaaattatttcaacacgttctaagacatatcaaaaattgaatgtagatatagattcattaccattacaagatttatactcaatcattcaagataatcctggcttgttacgtcgtccaattattttagatgataaacgtttacaagttggatacaacgaagatgaaattcgtcgtttcctaccacgaaaagtacgtacgttccaattacaagaagcgcaacgtttagttgattaataataatattaacaact

SEQ ID NO: 4177 - DNA, 3900 bp, Artificial Sequence
  Description of Artificial Sequence: synthetic nucleic acid sequence
tgaacaacaatttgaattcgctaaaaaaatcatcgctaaaggtttagtacctattatcgaaccagaagttaatattaatgctaaagataaatctgaaattgagaaagttttaaaagctgaaatcaaaaaaggtttagattcattaaacgatgatcaattagttatgttaaaattaactattcctactgaagctaacttatataaagatttagctgaccaccctaatgttgtacgtgtagtagtattatcaggtggttacagccgagatgaagctaacaaattgttaaaagataacgatgaattaattgcaagcttctcacgtgcattagcaagtgacttacgtgctagccaatcacaagaagaattcgataaagcattaggcgatgctgtagattcaatctatgatgcgtcagtaaataaaaactaatcatttatcagttcataacgaacaatgttttatctaaacaacatcacattgtctagataaatattaaaaccgtgtggtagattaatctgaccacacggtttttttatactttacacacatattgtcctttgattattcatcgaacgacatactactttcgataatttttttaaatacgcctagttgataagatgaaaaatcgttttgagcacttaagaatggcgctgatgcaacttcaacgtatttatgattatcgtcactatctaattccgttggtgaaaatagataataagctaagatggctgaggaaatatcattctcttcatcagaatcactgcctaatattgaaacttgagtgtatggtttccctttatatttcgtctgtaaaataccatatgatgtcgctttaggatctttcaaacgcgttaaatcttccaatgtcttaactttttctaagtctttagctttaaccattttctttttgtctaaagcaaaaaatccaggttgaatatttgtagctactaatttaccttctttaaatgttgcaagtatttgagcgtaggacataggttgcttatctttacctgcttttttaccatctggatctacatacatataattgatatgcttaatatttttttccttacttttcattcgtttaatctctacaccttttttatctttaaagaacttattaacttcttctatagatgaccctttagattcttttgtgtatttataatctgcaagtgttaccttatccactaattttttatagtcttcccagccttgcaatcccgttttgtttgtaaaacctttttctgtaataagtgcatcgatttcattaagaactggcttttgtttaagatccttagcttctttttctagttctttatattcgttctcttttgtatattcagtcgccacatccgtttttttctccgaactttttgatgatgacttttcattagaagattgatctgaatcattgctattcgaacatcccacaagagcaattgacatcacaattaataaaattccccaaaattttttcatattctatctccttttaatttttatatacagagaaataacaattaaatattacttagttttaaattgctatttataaatttataatacactatttaaggttttgaatatatagttatctatacatatttttatttattaattttaaaaaatgaattttcattaattatctatcaattaaagaaaagatatgaaatatactttgtattgaatttttcgctgccttatcaaaggatatgatagttaacgatcttgatttgaatcccttccatctgcaaattaacaccattgactgttaatatataaaaatgcctgagacactcattgtctcaggcatttataagattaaatacagcaactttacctaatatggattaatagataacgctatatctttttattttgctttattatagaatcctaattcaagatctttagatgtttgtttacgtatttttctcattaattgaacatcatcaataagtgattcaccatatgaaggaatcattttcttgattttaggttcccagtctttcgcgtattcagggaagtttttctctaaaacttctagtgctactgatactgaagttgatgctcctggtgattcgcctagtaatgcaataactgagtggtcttcagaattaaccacttcagtaccaaattggataaatcctttaccattctcttcagtatctttaataacttgtacacgtttaccagctgtataaacttgccaatcttcatcacgtgcttcaggatagaacgtacgtaaatggttcatacaaccttcttttgtcatgatgacttggtcaaatgaatacttaattaatggtaagtttttaactgcagaagcaagtaaagtcgtaatgttatatggtttaattgatttgaataaatccaagttagaaccatgttttaggaatttaggtcccacgtttgcaaatggtccaaataataatgttctttcaccatcaatgtaacgtgtatctaagtgaggtaccgtcattggtggtgtaccaggtggttctttaccataaactttggcatcgtgttgttcaataacttgcggatttgtacaagcaataaattgaccactgattgggaatccacctaaatgtttactttctggaatgccagttttttgtaatagtggaattgcgccaccaccagcaccgataaacacataatcagtttgatgttcgaatacttgtccattatttagatttttaattttaactgaccatttaccattagacaaacgttcaaaatcaacaacttcatgtttgtattgcacttcaacgtttggtgagtttttaagattttgagccattttacgagttaattcaccgtagtttacgtcagttccttcgtctattttactcgctgccatgtagcccttatcttcacggcctttcatcattaatggaatccattttctcatttcttcaatatcttcagtatattcgatattatcgaacatagggaattgcttcatcgcttcataacgatcttttaagaatttaacgttatttttaccacgaacaaaactaatatgaggtaatggattaataaattctttaggattttgaatttctcctgatttaactaaatgaccccagaattgtttagaaatttcaaattgttcattaatttctttagctttttcaatatcaattgaaccatcaggttgttgtacagtatagttcaattcacataaagctgcatgtcctgttcctgcattgttacgttcatttgaactttcaataccaggacgatctagacgttcatataaatgaatgtcccaatcaggtgcaatcgttttcaacatagaaccaaatgtagtacttagtacaccagcaccgattaacacgacgtcttttttgtcagacatagccataatgttcacctcttgtgtagtagttatcatattgctttccagctaattagacgtcatcattcttgttatattactttataacctcaaaaccttagaaaagaatcaaatctaatagcttttacatatctatgttaaagcaagcactttgaaaagtaaattgttaatagtaaatttatgacaattttatgatatatatttttatgaacatttaacgtttagctaaaaacttttcaatataaaatgccgattcctctatcgatttatattctgtattaattaccgttgcatttaattttctaaaaacttcttcagcataagataattcttttttgatacgctctaaactattgtaattagattctgaagatagccctaatgtttctgcacgattacgtcgtatatttgcgatataattgggacttgctgttaatccaaatacctttaaattcttttgttgaaatacattatctggaatagccacttcagggactaaaggaatatttgcaatcttatatcctttatt

SEQ ID NO: 4178 - DNA, 3808 bp, Artificial Sequence
  Description of Artificial Sequence: synthetic nucleic acid sequence
acctaatgtttggccttcagcatcaataacataccatttgcgctcaatgtttgattcatttgccataaatgtttgacgcataataattgtcctcctaaaaataaatgcttcgttcattaattgcagtacgaataaatcacattcgaacctatgtttattgcactaacaactatcattattgttacgatttaaaagcgtaagatttcatttatttcattaactgttgttctgctttgcttatatatcttgtaacacaataagtttccggggcttatcgtggggtgatataaaacaataccgttaataatcatataatttcacagtacttttgtcaatgacaattagtgtttttccaacgattttttgtagtgtatttttacatctttcccatattcttgtatcaattcttctgggcttaaataaatcttttctaaatataatccgtcaggtggagctgtgagaggcacattatttctatttttgtcctctaagagcttagggacgtcattaggttcacgctttccttttcctacttcaattaagaaagctaccaatacacggaccatattataaaggaatccagaacctgttacgacataatcaaacccttctttagtagcaacaatttcactctgatatagtgttcttactttgctttcaacttctgttttctgtgaacaaaaaccggtaaaatcatgtgtacctataaattcttgagcagctttgttcattttatcatagtctaatgtttcattaacaaatgtttcagtaccactcttaaaaggatttcgatgattaccttgataaactttgtaacgatagcgtttgcctacgcagtcataacgacaatgaaaatactcgtcgacatttcgtacatttttaacgtaaatatcatctggtaaagctcgattcatcgcatattgccattgtttgttatcaatattcaattcggtatcgaaatgaaagaattgctgatacgcatgcacacccctgtctgttctgcttgagggatgaattcgtacatgatgtttatgcattcgtttaagaatcttttcaaattgttgttgaacagttcgtccttgttgctgaatttgaaaacctaaaaattggttaccttgataagcaatttcaactaatatacgcaatatttacactcctgaaaattttaaaataaataatatagtagcgataggtattaaaagtaagactgttaatgtgtctttatattgccaatgtaataacctatagcttgttcgtttgatgttaatatcataacctctgacttccattgctatagctagttcttctgctctttgaaaggcagaaataaataatggaatcatgatgggtataaaagctctaattcgtgttattaaacttcctgaacttatttctgatcctctagatttttgagcaagtataattttttctaattcgtccattaatgttggtataaaccttagagcaatagacatcatcatacttaattgatgtactggtactttaatcactttaagaggtacaaataatttttcaaaagcatctgttaaatcaatcggactagtcgaaagtgtcatgattgttgcaatcataactataaaaatcaatcttagtgatatgtaaattccttccataacaccatttgattcaatagtgataaacttccattgaaataatacgatacctccattagtaaataacacatgcatagaaaaagtgaaaaccaagaagaaaaagataggtgttaatcctttaattaaaaaccaaaaaggaatacgtgctaacttaataaataatattataaaaagaaacaaccatgcatatgtacctagtgaatgacagaaaaaaattaaaagaataaagaaaaagacaaatattaacttagctctaggatcaagctgatgaataattgattgcataggaagatatcgtccaatgattaatttattcttcatgatgccactccttatacaacttcacaaactcttcttcattcatggcaagctttggaaataacatattatattttttttcgatatctttctgtaacttcactactttaggcaactctatatgccactttaataattgcgttttttgattaaataaatttctaggatttgatttttctactatcgtccctttattcattactacaacttcatctgaataacgtgctacatcatccatatcatgtgaaacaagaataatcgttttattttcttctatttgtattttctttattaaagacatgacttggtgtttactattcgggtctaacccagcagtcggttcatccagaataattacttgtggatccatagccaaaatggaaacaatggctatttttctcatttgtcctcccgacatttgaaatggagaggatgacatcacatttcttgaaaaacctaattcaagaagaagttgaaaagctttgtctttaacattttttaggttcatattaaaatttttaggtccaaactcaatttctttttcaacgctatcttcaaataattgggattctggaaattgaaatactatacctacttcttttcttatgtgacgtaagtgcttgtctttagttttatttgtaacttctaaaccattaatgttgactgaacctgtagtgggctttaataaagcattcaaatgttgaatcagagtggatttcccacttccagtttgaccaataattgcataatacttgccctgttcaagagttagtgaaacgtttttaatagcttcaaattcataaggtgtcccttgttgataaatataactcacttgattaaattgtatactcataattttttaatcaacccttcataagttacataagttgaatcaaaacctaaaagtcgattcattttcaaaggaaatggtaagtccaatccaaccgatattagtgcctcttcgcacttaaaaatatcttgaggtgttccttgtttaaaaacagttcctttattcaatacaatgatttgatcagcatgcattgcttcatctaaatcatgagtgattgaaataattgtaacatgattatttactttaacttcatttacaaggttaagtaaagatgactttccatgaggatctagcatcgttgtcgcttcatctaaaatcagcacatcaggattaagtgcaagtaccccagcaatggcaacacgttgtttctgccctcctgaaagtgaatggggttcatcatcggctttatttatcatatctacttcagttaatacttgattaactttagataccatttctttataaggaacaagttggttttcaagaccaaaagcaacatcaaatttaactatagaacctacaaattgattatcggggttttgaaaaacaattccgatatgtttcctcacttctcgcttattttgagagtctactggtagattttgaaatagaatttgtccttcacttggttcttctatacctaccataagtttagcaatagtagattttcctgaaccattgtgacctacaatagaagtccattgtccagctggtattgagaatgaaacgcgatttaatgtgaaagcagcgtcactttgatattgaaatgatacatctttaaattcaatgataggatttgacccattcacatcaaccactcctaatatttttatatcactaaacattctacaataattcaaattgactgtatatcagatatgtataatttaatcatttgtaatatgaattataaaaaaagctatagtgttattaactatagcttaaataaaaaagcgcgcaccccatcaaatgttgagttcacgcttaaataattatttagttggat

SEQ ID NO: 4179 - DNA, 3636 bp, Artificial Sequence
  Description of Artificial Sequence: synthetic nucleic acid sequence
tggggtaattgatttatgtattaatttaaagaaaataataaaaaaatgatgattaaaaagtgattagaggtggaagaatgaaccgtcaatccactaaaaaagctttgctcataccgtttattttaatggtgctcactgctatagcacttgtcgccgtgtggtttatttttaaccaactagtggcaggtattgctacagctatacttattgtgatgattattattagtggcgtgttattgagaaaagcatttctaaaaatggataattatgtggatgatttaagtggtcacatctcggcaagtagtaacaaggcgattaagcacttgcctatagggatgattgtgttagatgaagataatcacattgagtggatgaaccaatttatgacagatcacattgaaacgaatgtgatttctgaaaatgtcaatgaagtcttccctaacatattaaaacaactggaaaaagttcaagaagtagaaatagaaaacaacaattattactatcatgtacgatattcagaaaacgagcattgtttatacttctttgatatgactgaaactgaacgtacaaacgaactatatgaagattcaaaaccgattattgcaacaatatttttagataattacgatgaaatcactcaaaacatgaacgatacacaacgttctgaaattaactctatggtgacacgtgtgattagtcgttgggcacaggattacaatatttacttcaaacgttacaactcagatcaatttgtagcttactttaaccaaaaaatattggctgaattagaagattctaattttgaaatcttaagccaattaagagaaaagagtgtgggttaccgcgcacaactaacattaagtattggtgtaggtgaaggtactgagaaccttattgatttaggtgaattatcacaatctggtttagacctcgcgttaggtcgtggtggtgaccaagttgcaattaagaatatgaacggcaatgtaagattctatggtggtaagactgaccctatggaaaaacgtacgcgtgtacgtgcgcgtgtgatttcacatgccctcaaagatattcttactgaaggcgataaagttatcgttatgggacataagcgaccagatttagatgctataggtgcagctatcggagtttcgcgctttgcatcaatgaataatttagaggcatttatcgttcttaatgattctgatattgatccgacattacgtcgtgttatggacgagattgataagaaaccggaactaaaagaacgctttgtaacatcggatgaggcttgggatatgatgacttctaagacgactgtcgttgttgtagatacacataaacctgaaatggtcttagatgaaaatgtcttaaataaagcaaaccgcaaagtagtcattgatcatcatagacgtggcgaaagctttatttcaaatccattacttgtgtatatggaaccttacgctagctcaactgctgagctcgtaacggaattactagaatatcaaccaactgaacagagattgactcgtttagaatcaactgtcatgtatgcaggtattatagtagatacaagaaactttactttaagaacaggttccagaacatttgatgccgcaagttatttacgtgcacatggcgctgatacaatcttaacgcagcatttcttaaaagatgatgtcgatacgtatatcaatcgttcagaattgataagaacagttaagatacaagatcaaggtgtagccattgcacatggttcagatgataaaatttatcatcctgtaacggttgcacaagctgccgacgagttgttaagtttagaaggcattgaagcatcttatgtagtagctaaacgtgaagacaacctgatcggtatctcagcacgttcattaggttccataaatgttcaattaacaatggaagcgttaggtggcggtggccatctgacaaatgctgcgacacaaataaaaggtgcgacaatagatgaagcaatagaacaattacaacaagcaattacagaacaaatgagtaggagtgaagacgcatgaaagtaattttcacacaagatgttaaaggtaaaggtaaaaaaggcgaagttaaagatgtaccagtaggttacgcaaataacttcttacttaaaaataaatatgctgtagaagcaactcctggtaatttaaaacaattagaacagcaaaataaacgtgcagcagcagatagacaacaagaaatcgatgatgcaaaagcacttaaagaacaattaaaagatatcgaagttgaagtatcagctaaaacaggtgaaggtggcaaactatttggttcaatcagtacgaaacaaattgccgaagcgctaaaaaaacaacatgatattaaaatcgacaaacgtaaaatggacttaccacatggtattcacgcactaggatatacgaacgttccagtgaaattagacaaagaagtcgaaggtacaatccgtgtgcatactgtagaacaataatttaaagatatgacgcgaggatagtacatgattactattataggtgcaattatataagatgtatgacttatataatttgttaacctctaaaatatctgtagtgtatctcgtgacaatatcagatgacgataaaataaaagatggattgaaataagaggtgtaagtagataatggatggaatgtatgagcaaaatcaaatgccgcatagcaatgaagctgaacaatctgtcttaggtgccattattatagatccagaactcattaatactactcaggaagtcttgcttcctgagtcgttttatagaggcgcccatcaacatatttttcgagcaatgatgcacctaaatgaggataataaagaaattgatgttgtcacattgatggatcaattatcaagtgaaggtagcttaaacgaagcgggtggccctcaatatctcgccgaactatcgacgagtgtaccgacaacgcgaaatgttcagtactatacggatatcgtttttaaacatgcgttgaaacggaaacttattcaaaccgctgatagtatagcgaatgatggctataatgatgaattagaattagatacgattttaagtgacgccgaacgacgtattttagaactatcttctacaagagaaagtgatggttttaaagatattagagatgtcttaggacaggtatatgaaaccgcagaagaactcgaccaaaatagtggtcaaacaccaggtattccaactggttatcgtgacttagaccaaatgactgctggttttaatcgtaatgatttaattattctagcggcacgtccttcagtaggtaagactgcctttgccttaaatattgcgcaaaaggttgccacacatgaagatatgtatactgtcggtatcttctcacttgagatgggcgccgaccaattggcgacacgtatgatttgtagttctggtaacgttgattccaatcgtttaagaactgggacgatgactgaagaagattggagtcgctttacgattgcggtaggtaagctatcacgaactaaaatcttcatagacgatacgccaggtatccgtatcaatgatttacgttctaaatgtcgtcgactcaaacaagagcacggtcttgatatgattgtgattgattatctacaattgatt

SEQ ID NO: 4180 - DNA, 4103 bp, Artificial Sequence
  Description of Artificial Sequence: synthetic nucleic acid sequence
acattatttaataatattatatattagcgaatatataaaggaaatatcgaatgtacaagacaattcgactttaactcttaaaaaattaaaaaaagcgaccgaatttgaattgcgtgtatttccacattttaacaacaagtcctaaaaataaaaatttgttacatagctactttaaaattagtcatcaatttccactacaataaaacacctgagacaattatttttgtctcaggttcttacattaaatattaataaccagatccaacttcttcaccatcttcgtcatattctgtaacataaccgtcgtcaatgtctaccgtgtacgatccagctaaatctccatctttatctaagaatgaaaaaccccatttaccatcaccggttttttcaggttctttatacgtatacgtatcagtatctagtgtatgtccttcatatgactctactttatcaattacattttcacgcgttacttcgccactacttgaatcgttatctgactcgtcatctgaatcatcgtatttttcatctaattttttatcgacatactgatcaatagcttcttcatcgaatttgactgtgacatctgtcacaccaccatctttttcgcttgcacttgctacattgaccgaatttgatttaaaagtttttccttcgtatgaaccttcagcgtgaacgataacttcttcatctggatcataaggaccatatgtttctgatgaaaaaccatcgcctatttctttaccattagcatatatttttacattatctaatatatatccgccttcagtatcaacattaaaacgtttttgtttaaacgattcatatgcaatactatcactttcactcatatcaattgtaatagcgcctttaaaatttttaccttccatgtcttttgatgcttttaaattataatcaccgataggaaatgttcctaattctttatcgtcatcttcttctacagaaatatgatgtttatccccgttaaattcataagtaatttcaccactatcacttgaaacgagcgtaattgttttttgaggaacattaaattgatagttatcaaaaaaaacatattttttcccgtctttagatatatttaaaatattattatcatttgcatctacagataaattgttatagtgattatttttaatatctttggtgttttcttcaactttgtcagcaacatgctttaaatcactttctgctttaatatactttaagtacgcacgtgcttcttcttcatttaaacgatgatcgtttgatgttaattgcttagataatgatttagcatcgtcttttttgatagcatgtgcaatgtgagtcgcttgtttttctggagacatttgatttttagctatagtaaagattactaccaaagcaatgataatggctaacactatagtaacaatcaaccaagtttttttattactcttattggaacgtggttgttgatgagaataacgttgttctgaatgtttataattaggtccatcatttctcacaggcgtaccacaatttgtacacacctttacaccttctcgaagaggttgaccacaattactgcaatatttcatattttaataagttcctccttcaaataaatcccctagttcttctataaaatcaccaaatatttgatggaaaaatgcctccccaaaaatacgaataaataagaacaaaataatgatataaataatcacaccataaaagctggatattcttgtttgattaccagtgctatacttcgcaattagataaataccagaagcaataaataataataaagacaataatgctatacttccgccaaagctgtatgattctgctaatattaaaattacagaaataattaaaattgctaacgaaacactattaattaacacatagtctgataatacttttttaaatgcaataggttgtctaactactaaacgtgtaagcccaaatattgcacctactatgacaaccaaaaatagaataataccaaaaatgatactcgttaccaaacttcctcttgtagtaccgaaaataccaatctcaactggtattacggaagcgagtaaaattgctaatacaataaaaccgattattaataatgataataataatttaaaactgaaaacatgattagtttgaatgattttatcaggtgcagtaaatgcacttttaaagaaacctttactttcatttgttacttgtttagcttgttgacctatttgactttgctgttgatcgtgattgtgttgattttgaggaatttctcgatgttgaggtctttgatggtatgtagagagatttgattgttgggtatcattatgtgactgcttagattgtaatgttgaatctgctacgtcattttcatttgatctagtctcatcatgagatgttgaatcaacattttgatgagtcgctgcgttgttttctttattatttgatgttatgttttgttcttcatcattcttttcagcttttgttatttcactttctgcatttctgactgactgtggatgtcgacttattttatgtccacattcaccacagaataaatcatcatcttctattggattaccgcaattcggacaatgcatataaaaccctcctataataaatattttgtaatcttttaaattatatcattttatttatattgttttctacaaaaatcctaaaaatcttatttatttaatcggacatagtgaattgtggtatatagattccatataaaggagtatatattttccgccactttttcaactcatatattctcaaattgatttatagtaatagtatgtatttctcttcattattatttagacatttacttcaaaacaatataattgaaataaaaaagagtctggacatccatctaccttgtgtccagactcttaatcatgctcatagtattttattgattcaatcatcatcttatttatatcttttcaaacctttttgatttcaaaatcgataatgacactatcacttgagaacgaattccatctcatttcttatacatttgatatcgtattttctttctcatttatcatttctataatttcattattttcatttaacacagctacttttggtgagtgatctaccatttcatcttcatttaattgtgcatatgtcataataataatgacgtctccaacttcaactagtcttgaagccgcgccatttaaacacatctttccactaccacgttctccagcaatgacatatgtttcaaatcgagcaccattattattattaacaatagcaaccttttcattgggtaaaatatcaaccgcatctaatatattggcatctattgttatgcttccaacgtaatttaaattagattctgtaactctagctctatggatttttgagttcataaatgttctaatcaatatagtcatctccaataattatattatctatcaatcttgctttagaaaatttaactgccaatgatatgaatattcgtccatgaatctttgattgttgtataagatttggataactataaatacccaaatcatcaatatgtccactaatatttttgtttaaatacgcagcgatttgacctataatctcattgctatctcgttcacccgcttcatacaaattctttgctaagcgtagactttgatataaatgttttgcctcttttcgttcttcagaggtcaagtaaatatttctagagcttttggctaaaccatctttttctcttacgatatcaataccgataacatgtacaggaagattaaagtctttaaccatcttttcaacaatagctaattgttgtgcatcctttttcccaaaataggcataatctggttgcacaatattaaatagtttgttgaccacggtcacaacaccttcgaagtgtccaggtctttgtgctccctctaatacttgtgccaagtgtccaactttcagatgaatacctaattcttctggatacatttcatctacactcggatggaaaacataatccacttgtaacttttttactgcagccacatcatcatcgagttgacgtggataagcatcaaaatcctcattaggtccaaactgcaagggattcacaaatatactaataaccgtgagat

SEQ ID NO: 4181 - DNA, 3257 bp, Artificial Sequence
  Description of Artificial Sequence: synthetic nucleic acid sequence
gtcctaaaagttattacagatacgttttaactggtaccccaattccaaatagttatcaagacatatttaacttcttaaatattttatataaagatgagtatgatacttattttggttggaatgttgctgatttacaaaatcctgatcctaatgaaattaatgacaagttgaacccttttttctggcgtacaaataagaacgatttggaagtgcctcaagcagaaaatgatattatattatgtgttaagcctagtaatattcaaattgaattagcaaaagcgatatacgaaaatgaatctgggatactagcgatttatataaggttactacaagcttcaactaacccagaattattgcaaaagaatattaattatagcgaactaggaatgttgaatgatgaattaaatttcgatttggataaagcattaaataaagaagaagaaaatcaagtaaaacaacaaatttataattcttttgatttaaaaaatgtaacttctccaaaattcgaaaaaggtattgaattgattgaaaacttagttagccaaggaaaaaaagttctagtatggggattgtttgtaggtacaatgaataaaatcaataagaggttactagaaagtgatattaattcaatattgatttatggagaaacacctaaagaagatagggtagatatgatcaataattttaggaatggaaatgcacaagttctaatatctaatcctaatacattaggcgagtccatatctttacatcagacagtacatgatgcaatatattttgaatataactttaatttaacgtttatgttgcaatcacgtgatagaatacatcgtttagggttaaataataatcaatatacaaggtattattatttgatgtctgaaggggatagagcccataaaggttttatcgataaagcagtttataacagactgaaggaaaaagaagatgtaatgttaaatgctattgatggaaatactttaaagccaatgattgaagatgattacttagaagatgttaagaaaattattattgaatgaaaaacgatacagaaaagctaatcggaagaatgcgtaagaacagtaaaaatatgcttttattcgtatttagtgggaagaattaaaagaatattttaatcatgaacagtcaaactaagtattctattgttttttaattagataataataccaatgaattaaatgatattaaatagagcattcctcaccgcaaagtgaaggatgctctatttttttataagtattataatattcactttgatagataatggttaataattgtctgtaaatcattattaagtacggttgctatagagtaatcattcataaaatcattatagattttatccaatatttcttagccttcgattactgtgaaatgacatactagacccttaatattgaaacgtattcatgcgatactaggcagctactagcaaccgtgtgtcagtcagtctgattgtgtagtcacatggttcatagataatcctccttttatttcaatgtccatttttggcgtgctttaggattgagtgggtgcatgatttcatttgttgctgggtttatgagctttttaattttctttttgtgaggcttcaacatttccatcacttgttcaacacgttcgataacaaatggtcgcttcgcataggctccataagctagaattactgtgtcactctcacttattgctttcattaagtgtctgtctgtatgtttatcataaggctctttaatatgtttgagattatctggggttttaatattcgaaaataaattcactaaatatacagcaccgtatcgttctgaattcgctaattgattgaggataagaacagttgtaagatcgagtgataatatgccgtctaaatgaggggacatcgttatcactgtacatgtgggcttcttttcattccacgtctttttaagtaagtatcggtgttgttcatcatcgctaaaaatcgcttctgtgtgtatcgtacttttgattgtattcatatttgttactccttttagtattcttctggtaaaagcatcacataataaaaagcgtccacgtcatcttcacgaatgacgtagactttttaggtaatgtatttttattttttacatagtttgcatagtgatattccaatttgtatgtgggctattcttgttagcttatttttagaattttattgtactacagatgttgcaatgtctcgatttaactatttattgtaaatatttaaaaaactttaaatttatatagtgttttaaggtcaaataaattagaatatttgtattaataataattaaaaataaagagcgcaatttaatggaatgtttagcttgtgggggggtaatgtaaatcgggatgataaattctgccaatatcgtggtcatgaaattgtaaatgagagtgacaagttttgcactaattgtggcatagacggtctttgtagtcgagagtaaaataaacaatcaacaagcgacgccaaaagaaaaacagttcaacaaatcaattgaatggtaaagttcaaaatgatatttataagactactgacagtctaaattctgttgaaaataacaaaaaataaagaaagtaaaatgactttaaaggaactttagtattgtttataaggacgaactacataaatagcaaagtaatttacaatggtaaatacactttgctattttaaattttttaaatgtcaaaatttaattatgaaagtcgttttgttttaatatgtggaatggataattaaaaaatcgcatcactatctgatatacagtagcatatcgtaagtgatgaggtttcatttattaattataaagggcaaaattaaatttgaattacatcttaagtatttattgtttggtaatatgaaagagtaatatgaagaagtttaagaatttgatttatatggtgtttacaaatatacgataaatagaaagatgtgaaaatgtgaaacattcgaaaaagttacttttatgcgtcagttttttaataataacgttttttattggtggatgtggaagtatgacaaaagaagataataaagaagaaaaaattaaaaaaatttttgagaaaacattaggtatgtatcctatcaaaaatcttgaggacttatacgataaagaaggttatcgagatgaagaatttgataaggatgataaagggacatggttactacactcggaaatggctatacaacgtaaaggagaagatttagaacctagaggtatggtgttgaaaat

SEQ ID NO: 4182 - DNA, 3304 bp, Artificial Sequence
  Description of Artificial Sequence: synthetic nucleic acid sequence
aatattgtattgatgacatggtttttgacagtaaaggcggattttatttcactgattttagagggtattctacacaacctttgggcggtgtttactatgtagatccagactttaagacggttacgccaattattcaaaatatttctgtggcgaatggtattgctttaagtacggatgaaaaagtgctatgggtaactgaaactacaactaatcgacttcaccgaatcgcattagaggatgatggcgtgactattgcaccatttggagcgacaataccatattattttacaggtcatgaaggaccggattcttgttgtattgatagtaatgataatttatatgtggctatgtatggccaaggacgtgtattagttttcaataagagaggttatcctataggtcaaattttaatgccaggacgtgatgatggaaagatgttacgtacaacacatccacaatttatacctggtacaaatcaacttataatttgtactaatgatattgaaaaccattctgaaggtggatctatgctttatacagttaatggttttgctaaaggatatgagagttatcaatttcaataaactcttgaaaaagcgtatagaataagttgttatgtataaataaaagaagtagaacaaaggttgaataaaactttatgttcctcactcgtatagcttaatttgaaaatttgatacaactcattgtattttctattaatgcaacgattgccataaataaatatgcctgagacatttaatgtgtcccaggtaacttcgcaaatgcctttgattctcttcgccgtgatacccatatgcttaacatactgccgaaaactataatagcaatcgatagaataatacttatgagtggtggtgaaacaatatgaatatcaacgttacttaatgtcgtgaagaaataatgatgcgtaataatataaacaattactacaacaataatcatacatactccgatgactcttccgatgagtccatgactaaaagcaactaattgattccatgacaccattaacgaccaagctaatataagagcgcttaatacatcatatgcatgtctatcactattcaaccaaaatattatcgctataagaatagctagtagacgaccaaatacaagccagccatatgattttttaacagatggaggcgtaggaatgttaaatcttttaacaacagaacccgattgtagaaataatgtcgctttaaacacaccatgcaatattaaatgtactatcgccgcagaatatgccccaagcgcacattgtactaacataaaacccatttgacttatcgtagaacctacaagttgtctcttgtaatcaacatgcacaagactgattccagaacccaacaatactgaaatacttgcaataattaataacagtgaaatggctatttcgtcattaaataccggagaaaagcgtgtaagaataacgccaccagcattaacaataccagcgtgcataatagctgaaactggcgtaggcgcagctacagattcaataagccagccttgaaatggaaattgtgccgccggaataatcacagctaaaacaataagtaaattgatacagagacgcattccataattgattgcattatcatctgacatattcgaataaatataccaatctcctgtagcgatatacaataaaatgacagcaatcaataacgacaaccatgccaatataaatgaccaagctgaaattcttgctgcttccctaggcaccttccataatttgttaactttaatgagccgtgttaacacaaataatgttgcaccccaaaacatggtcattaaccttaagtctccacttaaccatgccaatgaagcaaatgcagtaattaatgtaaaaaacggaaaatatttacggtaatgcatgtcgccaattaaataacgcatagaaaacttttgaatgataaagcctaaagtcaaaataaatgtcatcattaaccaagtaagatgatcaactacaaaaggtccaacattcgccctttcaccgaaaaatattaatccacttaatcccgtaatgataggtaaaacaagtaaatatatatgaaatttaatatattgaatgggaactcgatgattcaaaaatattaatccactcagtatagcaatgacaagtgtaataaaaaacataaacaaaattaactctgaacttaacattgcgtatcctccatctcaaaaaatatctaaaacaataataaaaagcctacaatagctaacctttcatatatgtcataatgaaagaatttaaactattgtaggcttcaatttaactcaagtgtttcgcacttttatcctcaatatgtatataaatcttacggagtataaataaatcgtacactttatttaaataagctgcctatatcattttgtagtaaagtaagaactctttcccctttatcaatcaaggttattcaacctaaaattgctaaagcaagacttagttattaccttttcgaataatactattaatatattttaaatgagcaagagtgtcaatggttacgcttctcaaaataagactcaattaatcatataataatgattattgaaagcttaattactcaaagatccttttgtaaagcttatgtaaacagtataaagacaaaataacacttaggaataactcactgttgagtgaaaaacatgaatcattcacttaagacattgatattttaatttagggactatgcacatatttaattcaaattccagttacactatagataacaaattagtaagggaggtcatttaaatggcagatgtaatcgctaaaattgttgaaattgttaaaggcttaattgatcaatttactcaaaaataatatttaaaagttacgtattttataagttagcttttgaatattcaacaaccatctctaaatacatttcccttttgaaaggaggtcatgaacatgagcatcgtatcaactatcatcgaagtcgttaaaactatcgtagacatcgttaaaaaattcaaaaaatagtctacattctacataaccaccatcttttacgatggtggtttttttatgtctatttattttcagctcgtttaaactcctttaaacatccaacatttacttctcttcattattggataacttttcaaaataaactattgtaatgaatatatttttacttataatggtatacacagtatcacgtttgttgaaaaaacgatgactattgattcatttgataaataacgacatcgaaaggaaggacaaaatgaagaagtgttcaatttccagtttattatcaattattgtcac

SEQ ID NO: 4183 - DNA, 3086 bp, Artificial Sequence
  Description of Artificial Sequence: synthetic nucleic acid sequence
acggatagggaccgaactgtctcacgacgttctgaacccagctcgcgtaccgctttaatgggcgaacagcccaacccttgggaccgactacagccccaggatgcgatgagccgacatcgaggtgccaaacctccccgtcgatgtgaactcttgggggagataagcctgttatccccggggtagcttttatccgttgagcgatggcccttccatgcggaaccaccggatcactaagtccgtctttcgaccctgctcgacttgtaggtctcgcagtcaagctcccttatgcctttacactctatgaatgatttccaaccattctgagggaacctttgagcgcctccgttaccttttaggaggcgaccgccccagtcaaactgcccgcctgacactgtctcccaccacgataagtggtgcgggttagaaagccaacacagctagggtagtatcccaccaacgcctccacgtaagctagcgctcacgtttcaaaggctcctacctatcctgtacaagctgtgccgaatttcaatatcaggctacagtaaagctccacggggtctttccgtcctgtcgcgggtaacctgcatcttcacaggtactatgatttcaccgagtctctcgttgagacagtgcccaaatcgttacgcctttcgtgcgggtcggaacttacccgacaaggaatttcgctaccttaggaccgttatagttacggccgccgtttactggggcttcgattcgtagcttcgcagaagctaaccactcctcttaaccttccagcaccgggcaggcgtcagcccctatacatcaccttacggtttagcagagacctgtgtttttgataaacagtcgcttgggcctattcactgcggctcttctgggcgtgaaccctaaagagcaccccttctcccgaagttacggggtcattttgccgagttccttaacgagagttcgctcgctcaccttagaattctcatcttgactacctgtgtcggtttgcggtacgggcacctgttatctatctagaggcttttctcggcagtgtgaaatcaacgactcgaggaaacaatttcctctccccatcacagctcagccttatgagtgccggatttgcctaacactcagccttactgcttggacgtgcactccaacagcacgcttcgcctatcctactgcgtccccccatcgattaaaacgatactaggtggtacaggaatatcaacctgttatccatcgcctacgcctgtcggcctcagcttaggacccgactaacccagagcggacgagccttcctctggaaaccttagtcaatcggtggacgggattctcacccgtctttcgctactcacaccggcattctcacttctaagcgctccacatgtccttgcgatcatgcttcgacgcccttagaacgctctcctaccattgtccaaaggacaatccacagcttcggtaatatgtttagccccggtacattttcggcgcagtgtcactcgactagtgagctattacgcactctttaaatgatggctgcttctaagccaacatcctagttgtctgggcaacgccacatccttttccacttaacatatattttgggaccttagctggtggtctgggctgtttccctttcgaacacggaccttatcacccatgttctgactcccaagttaaattaattggcattcggagtttgtctgaattcggtaacccgagaggggcccctcgtccaaacagtgctctacctccaataatcatcacttgaggctagccctaaagctatttcggagagaaccagctatctccaagttcgattggaatttctccgctaccctcagttcatccgctcacttttcaacgtaagtcggttcggtcctccattcagtgttacctgaacttcaacctgaccaagggtagatcacctggtttcgggtctacgaccaaatactcaacgccctatcactaattattatgtagatggtttcatagggatcattatattttttataatatttggattgttcattaataaagtaacatatgcttttaaacaatttgaacaattaatcatgagacgtagtgcggtagaaatattatttgctacaattggtttaattattggtttatttatttcagtgatggtttcttttatcttagaaatgataggtaattccatattaaatcactttgtacctatgataatcactattattttatgttatttagggtttcaatttggtctgaaaaaaagagatgaaatgcttatgtttttaccagagaatatggcacgttccatgtctaataatatacgaagagcgacacctaagattgtagatacaagtgccattatcgatggaaggatattagatattatacgttgcggatttatcgatggtgatatattgataccacaaggcgttataaatgaattacaggttatagcggatgctaaagatagcgtgaaacgtgaaaaaggtcaaagaggattagatattttgaatcaactttatgatttagattatcctacacgcgttatacatccaactcaatcccatagtgatatagatacattattaattaaattagcacaacagtatcatgcacatgtgattacgactgattttaatttaaataaagtatgtcacgttcaaggaattacagcactcaacgttaatgatttatcggaagcaatcaaacctaatgtacatcaaggcgaccagttaagtattttattaacgaagataggtaaagagccaggacaaggcgtaggatatttagatgatggtacaatggtggttgttgataacgcgaagagttacattggtcaacaagttaatttagaggtcgtaagtttgttacaaacatcatcaggaagaattgtttttgcgaaatttgttgactgaaattttatagattatctctgttagaataagggtttcatgtgaaacgtatcgtacgaatttaggtactatatttaagtggaatatttcaaattgattttatttaacaaggttatgcatattaaacatgtgacttatcaaagagttctttaagtgctacaatattaggtggattagaatattgtagca

SEQ ID NO: 4184 - DNA, 4114 bp, Artificial Sequence
  Description of Artificial Sequence: synthetic nucleic acid sequence
cattaaattgtaaagattgtcatattgtaacatgattatatgaagtgattacccagcgaatttaagtgtagcaatcacaagaacaagccaaccaattataaatagaacaccacctattggcgtaattgcacctaaaatacgaacttgtgttaaggctaagaaatacaaggaaccactgaaaaagacaataccaaagaataataaccaaccagcccaatttacattaattgatgttgtaccacttattaaacctataactaacagacctaatccatgatacatttgataagttgttgctttttcccatattgacatgtatttatctgataatttatcttccaacccatgtgctccaaatgcgccagtaccgacagccatcattgcatttaatgcacctaaaataataaaaactttcatcattttgaatgtactcctttatatttaaaaatcaaaaatagattcaccattaccaacttgatcatctgtaatcatcatattattagaagtatgatgctttttcattgattgtggtactttaccacccattgcttctatttcagctgcagttacatgatgtttttgtgaagactgttgtttcatctcataatcatctttgatattactattcattggtttagaatgatttaatttctctattgtagaacgactttgatgagaactaacaagagatgtgagcatgtgtatagcatacatatgcttttcaaattccgtatctgtctgagcttcatctgcttgtatcaattcttgctcaatcaattgtagaatctgttctttgttcattattctcacctaactttcacaccactgaactggtgttttccctttagattttaaatagttatttgtagttgaataaggtttagaaccaaaaaatcctctaaaagccgatagtggactaggatgtggcgatttaatgattaagtgtttagatgtatcaatgaatcgttccttttgttgagccggtcttccccacagaataaaaacaacatgctcacgataattagaaacagcttgtatgatttcatccgtgaatgtttcccatccaatatttcgatgtgaatgtgcttcaccttgtcgaacagtcaataccgtatttaataacaagacaccttctcttgcccagtcttgtaaatgaggcgaagttctatgacaccctatatcattttctagttcttgatacatatttcttaaagatggtggaaatttagcatgaggttgcactgaaaatgctaaaccatgtgcttgattaggaccgtgataaggatcttgccctaaaataacaaccttgatatcttcaaacggcgttaaatcaaatgcttgatagatattttgtatatctggatagacggtttgagtcgtatattctttttctaaaaagtcatgcatcgcctgaaaatcatggcgcgttgttatatcatgaaatacctctgaccatttcattcgttttcacctcaagctacattttaacatattcatattagaaaaatgactgattttataagcattaatttttgtaaacttttatatgattcaggtttacaataagcgcatttttatctatattacaattaatatagataaatttcagtagtttggagtgttatatatgtgtactgccatttctttatatacaaaacaacgttaccattatttagctagaacaatggactttgcatttgaatttaatggtatcccaaccattgttccacgccattatcactaccaatttgatctagattcagacatgcgtcttgaatatggttttgttggaacaaatttaaaagtaggacgttatagatttggtgatggtataaacgaaaaaggtttagctatttcgaaccattacttcactggtgaagcctcatacagtacccataaacgttatggttattttaacttagcacctgaggagtttattgtttgggttttaggttttaataaaagtattagcgaattaaaacaaaaggttaagaaaatcaatattatgaatgaaaaaaatacgactttgaatatcgttcctcctttacatttcatggtcactgatgaaacaggacataccgtagccatagaacctcacaatggcttattaatagttaaagataattatgttcataccttaacaaatgaacctaaattagattggcatctatctaacttaagaaattacgcttttttaacgccacagaaatcaaccaatcaattaataggtaaagtgctagtaagatcaatgggctgtgaagcaggaacaaatggcttaccgggtggttatacgtcaacagatcgttttatacgcgctacatatttaagacaccaactacgctgttcccataatgaagatgaaaatttaatgaattgttttaaagttctagaatcagtcagtatccctcaaggtgcagttatcgatgccaataaaatacattacacacaatatcaattagtgatggaaagtaaagaaagaagttattatattaagccttactttagcaatcaaattttcaaaataaaattaactgaagaccttttaagtaagaatgagatgacattcttacctattaatcacgaattaaagataacatcaatacaatagctaagtatgatgattgatttgcattttaaaattataataatttagcgtacgcgataaacatgatatgataaagacactagaaattaatgggagtgaatgaatgatggctttaaaaaaagtattaacgatagctggttcagatacaagtgctggtgccggtatgcaagcagatcttaaaacgttccaagaacttgatgtatatggaatggtcgctttaacatctattgtaacaatggataaagaaacatggtcccatgatgtaacacctattgatatgaatgttttcgaaaaacaacttgaaactgcaatatcaattggacctgatgctattaaaacaggaatgttagggacacaagacattattaaacgtgccggagatgtttttgttgaatctggtgcagactattttgtagttgatccagtaatggtttgtaaaggagaagacgaagtacttaacccaggaaacacagaagcaatgattcaatatttactacctaaagctacagttgttaccccgaatttattcgaagcaggtcaactctctggtttaggaaaattaacatcaattgaggatatgaaaaaagctgctcaagtgatttatgacaaaggcacacctcatgtcattattaaaggtggtaaagcactcgatcaagataaatcttatgacttgtactatgatggccaacaattttatcaattaactactgacatgttccaacaaagttataatcatggtgcaggatgcacatttgctgctgccacaacagcttatcttgcgaacggtaaatctccaaaagaagcaatcattgctgctaaagcatttgtagcttcagcaatcaaaaatggttggaaaatgaatgactttgtaggacctgttgatcatggtgcatataaccgtattgaacagattaacgttgaagtcactgaggtttaaaatacgatatatataaatactagtacattttacccctcatctatagtctcatttaattcctacaaacattgtaattataattaaatcaatatctatatagatgtggaaagcctggaacaaaaagttccaaaataagtaaataaagacaatttctattgaaataatataggaattgtcttttttataatttttttgatgattttcagctcgttgagctattacttttcttatattaagccacgaggatgtctgaattcatcgaattcagtatcgtgaattgtttctacaatatcatgtacatatcgtgaaatatcattcgcggggataagtactgaagtttctattggtagagtatgttaagtcatattataatctttatacataagacacctcgttaatttagtttagtggtatttattaaattatacgaaagcaccttatttttcaaagtattttaatataaaattacatataaacacaaagtattttggcgagactcttgagggaacaggacaagctgaagactacaggctgaagctgtcacctaagaaagcgagccaacaatacgaatt

SEQ ID NO: 4185 - DNA, 2208 bp, Artificial Sequence
  Description of Artificial Sequence: synthetic nucleic acid sequence
aagaaagagattgttacaacgaatgttaatccttgaaatacacctaacatttcaggtaaacgcttactgtaatatctattatgtatccacgttattattcctgagataatgattgcacctaaaatattggtatctaacgtttcaatacctgcaatcgattttaatcctgttgtgttttctacacctttttttaaattagcgccaaaagtatgtggccattgagttaaaattgcattgataaaagtattaaacattaaatatcccattagagctgctaaagctgcatgtcctggtgcttttttagcaagagataatggtaagccaactacaaagacaatttccatatgtgtaaatattacccaaccacctgattcaataacagaccaaaatttaaaccaaaatgtttgctgatcagctaatcctcccataatggttggatttttaaataatgtagcgaatcccaaaacaataccgaaaaaagcaaacattaaaacaggtactatcattgcactaccaaatcgtttaattgcattcatttttgaatacctcccacttcccttaattatgataactaatatatgtttatctttattgctctttatttaataagttattaccaatatatagtaaacgcttacataatgacaatgacgttgacgcactttgaaacatttttgtataattagattatattttcatataaagaaaatattttcagtgatgaggtgttaagatgattttagatgaacgtgtaaactctaatttcgatcaattaaatgataatgatatacaaattgcacattatgttaatacacatatagatgtttgcaaaaatatgaaaatacaagatttagcctcacagacacatgcttcaaatgctacgattcatcgcttcactcgtaaactaggttttgatggttatagtgactttaaatcctttttaaaatttgaagatagtaagaatcatcaacttccttctgattctatggagcaatttaaacaagaaattgaaaatacattcaactatttagaacgtattgattatcgtttattaactcacaaaatgcatcatgctacaacaatatacttatatggtactggacgtgcacagatgaatgtcgctgaagaagcacaacgtatactgttgactatgcataaaaatattatattgttacatgatgttcatgaactaaagatggtgttaaacaagacaattccagaagatttgtttttcatcatttcactttctggcgaaacacatcaacttaaagaagtcacacaattgcttcaactgagacaaaaatattttatttccgtaacaacaatgaaagacaatacattggcacaacaagctgattacaatgtctatgtttcaagcaataccttctatttaaacgatggtactgattattccagttttattagctatcacattttctttgaaacactactaagaaaatataacgaatataaagagaatcatgaattaacataggaaagtgagtcatcatatcattgaattcaattctaactctatttataaatactatttgtcaggttcattttcaacttagacactgacaattaaattattaaaaacatactaagattagctatgaagaaatctatgacgatagattttttcatagctattttttatagttatagagagaagtagactgtccagactcttggattttaaatccgtataaaaaacaagtcagctttactctcgccttttgaaattcgtttgtagtatgttgggttcttgaaaccgtgtataggaaaatgaaatgagaaaggttaagtaaagtttttagcttctcaattattcaaaggaggtttttttatcgattacttaggtgttgatattagtaaaagaagtagtgtagttgcacattataaaaatggaaaattccaaaaagagtttttcatccagaataataaaaatggttacaattatttactcaagtatttgaatgacttagaccacccacaactcatttttgaatctacaggtatctattcaagaggtatggaacgattttgttgtgtaaatcaaattaactatattcaaatgaatccgttagaagccaaatttaaaacgagcgctctaagatcatggaaaactgatcaggcagatgctcataagcttgcttgtttaggaccgacgcttaaacaaacagacagcttacctatacatgagtt

SEQ ID NO: 4186 - DNA, 3085 bp, Artificial Sequence
  Description of Artificial Sequence: synthetic nucleic acid sequence
agtggtctaactgcgcttttacatttattgcttgttttttaacttcctcatctatatcattcttttcaagaagtgggtgaatgatattttctgcatcttcaattgcttccatattagtgtcaatttcacgttcccattttttagtaaaaaagttgcggaagaaagtgaagaaatctttctctgcaataaaatgttgctttcggctaccacgcgtgaattgttgtttgacgatatcgtattcttgtagtttttttacacctgtactcatactaggtttactcatttgcagttgttgtcgcatttcatcaagtgtcatacttccttcaaaaaccataatgccatacaagttacctacactacggttgataccatacaaatccatggtttcaccgattgagttgataactaaatctttagcttcttcgatatattgactgtcattgttattataatccatcattgcacctccattttaatccattatttagcttaggtgggacgcaccagatactatgatttttatgatgatttgcctgtaaaggatacatctattactttgagttgtaactcgttcatgaatataaagcataattacattgaaatttcataatcaaatgttagttatcgatttgaattgttaatgtctatactacttttgactaaattcaatgctgcaatctataaatggctataaaaacctatgctatatgtcccatttctaataaatacacacgagaatcattataaagccttttatgaaaaaaagaaaagtaattttctgaacaaaaattatttcttaaacatagataagttcgattgtaaaatacaaacatttttaaagaaattgacactttttcatcaattatgataacataactctgtaaaattcgttaaataaaaatttaacaaacttaacggaggtcgtttgatggaacttgtagataaattatcaaatcgtcaatatattgatggagaatgggttgaaagttcaaataaaaacacaagagatattataaatccttacaatcaagaaacaatcttcactgtagctgaaggaactaaagaagatgttgaaagagcaattttagctgctagaagatctttcgaagacggtgaatggtcacttgaaacaagtgaagtcagaggtaaaaaagtgagagccgttgctgataaaattaaagaaaatagagaagagttagctaaattagaaacattagacactggtaaaactttagaagaatcctatgctgatatggatgatattcataatgtgtttatgtattttgctggtttagctgataaagatggcggtgaaattatcaattcacctattcctaatgctgaaagtaaagtagttaaagaacctgtaggtgttgttactcaaattacaccttggaactatccattacttcaagcatcttggaaaattgcgccagctttagcaacaggttgctcattagttatgaaaccaagtgaaattactccgttaacaacaattcgtgtatttgaattgatggaggaagttggtttccctaaaggaacaattaatttagtacttggtgctggatcagaagtgggcgacgtgatgtcaggtcatgaagaagtcgatttagtttcatttacaggtggtattgaaacaggaaaacacatcatgaaacaagcagctaatcacgtgactgacgttgcattagaattaggcggcaaaaatcctaatattatttttgatgacgctgattttgaattagctgtagaccaagcacttaatggtggatatttccacgctggtcaagtgtgctctgctggttcaagaatcttagttcacaatgatattaaagataaattcgaaaaagctcttatcgatcgtgtaagcaaaatcaaattaggtaacggttttgatcaagatactgaaatgggaccagttatctcaacagcacaccgcgataaaattgaaggttatatggaagttgcgaaaaaagatggagcaacaattgcaattggtggtaaacgccctgaacgtgaagacttacaagccggattattctttgaacctactgtaattacagattgtgatacatcaatgcgtattgttcaagaggaagtctttggaccagttgtgactgtagaaggatttgctgacgaagaagaagctattcgcttagcaaatgattcaatttacggtttagcaggtgctatatttactaaagatattggtaaagcacaacgtgttgcaaataaattgaaacttggtacggtttggattaacgatttccatccatactttgcacaagcgccatggggcggttacaaacaatcaggtatcggtagagaattaggtaaagaaggattagaggaatatttagtaagtaaacacattcttacaaatactaatccagaaccagtggattggttcagtaaataataatacattgcttatatacagtaaatgacttataaatacaaaatgctacatgaagtgagtactaactaaggtatagtgctcacttcaataaatgaaaccttttaagaaagagatgttaacaaacaaagaaaacaaatcaatttttggaggtctttaacgatgagaagaaaacgcgattcatacgattatgtcatcattggtggcggtagtgcaggttcagttcttggtgcacgcctttcagaggataaagataaaaatgttttggtattagaagctggacgtagtgactatttctgggatttatttattcaaatgccagcagcattgatgttcccatcaggtaatcgtttttatgactgggaatatcaaactgacgaagaaccacatatgggacgtagagtagatcatgcgagaggtaaagtattaggtggctcaagttctattaacggtatgatttatcaacgaggtaacccaatggactatgaaggatgggcagaacctgaaggaatggacacatgggactttgcacattgtctaccatacttcaaaaagttagaaacaacatatggtgcagcgccatacgataaagttagaggccatgatggtccaatcaaattaaaacgtggaccagctactaatccattatttaaatcattctttaatgca

SEQ ID NO: 4187 - DNA, 3657 bp, Artificial Sequence
  Description of Artificial Sequence: synthetic nucleic acid sequence
tataggcccattaaaacttgaatgctaataaacattcaaaactgaatacaatatgtcacgtcatccctcatcttcgtagaagatgttccgaatatatccttagaaaggaggtgatccagccgcaccttccgatacggctaccttgttacgacttcaccccaatcatttgtcccaccttcgacggctagctccaaatggttactccaccggcttcgggtgttacaaactctcgtggtgtgacgggcggtgtgtacaagacccgggaacgtattcaccgtagcatgctgatctacgattactagcgattccagcttcatatagtcgagttgcagactacaatccgaactgagaacaactttatgggatttgcttgacctcgcggtttcgctaccctttgtattgtccattgtagcacgtgtgtagcccaaatcataaggggcatgatgatttgacgtcatccccaccttcctccggtttgtcaccggcagtcaacttagagtgcccaacttaatgatggcaactaagcttaagggttgcgctcgttgcgggacttaacccaacatctcacgacacgagctgacgacaaccatgcaccacctgtcactctgtcccccgaaggggaaaactctatctctagaggggtcagaggatgtcaagatttggtaaggttcttcgcgttgcttcgaattaaaccacatgctccaccgcttgtgcgggtccccgtcaattcctttgagtttcaaccttgcggtcgtactccccaggcggagtgcttaatgcgttagctgcagcactaaggggcggaaaccccctaacacttagcactcatcgtttacggcgtggactaccagggtatctaatcctgtttgatccccacgctttcgcacatcagcgtcagttacagaccagaaagtcgccttcgccactggtgttcctccatatctctgcgcatttcaccgctacacatggaattccactttcctcttctgcactcaagttttccagtttccaatgaccctccacggttgagccgtgggctttcacatcagacttaaaaaaccgcctacgcgcgctttacgcccaataattccggataacgcttgccacctacgtattaccgcggctgctggcacgtagttagccgtggctttctgattaggtaccgtcaagacgtgcatagttacttacacatttgttcttccctaataacagagttttacgatccgaagaccttcatcactcacgcggcgttgctccgtcaggctttcgcccattgcggaagattccctactgctgcctcccgtaggagtctggaccgtgtctcagttccagtgtggccgatcaccctctcaggtcggctacgcatcgttgccttggtaagccgttaccttaccaactagctaatgcggcgcggatccatctataagtgacagcaaaaccgtctttcactattgaaccatgcggttcaatatattatccggtattagctccggtttcccgaagttatcccagtcttataggtaggttatccacgtgttactcacccgtccgccgctaacgtcagaggagcaagctcctcgtctgttcgctcgacttgcatgtattaggcacgccgccagcgttcatcctgagccaggatcaaactctccataaaaaattatgatgtttgattagctcataaatactaaatagtttgtaacgtttcgttactgtttattggaattaacgttgacatattgtcattcagttttcaatgttctttaacacttacaatacattattgtaacaaacagaatttattaagtcaagaattaatttgtatttcatttcttgtcatttcttaattaattcaacaaataacattttataatgtaatgattttaatttcaatagtcaaaattacactttattaactaaattttaaagttcttaactttttcttttcaattaattaatctgcttttgacgacttttatatagtatcaagatataaacgtaacgtcaatatttattatcgattttttaagttaaaatttacttaatgagtgaatatatatctacatatagtacattatatttatatagtgtaaatactttcgttttgtacatctgcaaaacgaagtcatatgtaaaaagaaagaggctgtacaaattattacagcccctactacttatatacgattatttatatgaaattgctaaacagtcatactatttcatcattactttatctcaataaaacttcataagagtatcaataatgactaaatttttattttgcttctattctacgaccttactttcttcaatttccttcttctttacattctttacatactccatatatttccatccgatgatgagtaacatcaaaatctgttacatgttgagctaattgctctacttcatctaattgtggataatggaagtcaacgattttaccacatttttcacatataatatggtagtgattatgtgtattaaaatcaaacctactagatgaatcaccatatgttaactctttgactataccaatatctttaaaaactcttagattattatagatagtagcaacacttatattaggaaatttaggtgaaagtgcttgatatatttcatctgctgttggatgtgaatgtgaagatataagataacgcataattgcttgtctttggggtgtaatgcgaacgcccgcttttcttaatgaagcaattgactcttcaagttcatgatcaatagattcaagttccgcactcacttatttcaccatctttctaaataataattattattacttaatattaatataactgttgctataaataaatgtcaataaatacttgctgttttcaattagtaaccataatctaagtctactttattctcaattacatcataattattgagaaaatgctcaagattctttttgaaaatgtccgtagcttctctattattattagaatcattacctgtaatatgagcagttatggtcacattatctaaatcatataaaggattgtccttactaagtggttctttttcaaaaacatctaaataagcatgtctgattaatcgatctttgagtacattgatgagcacttcctcatcaacaattgttcctcttcctacatttataaataaggcattattgtccatttgtatgaaatcttttctttttaataagtaaattgtttcttctgtttcaggtaatgcattaacaataatatttgccttttcaataacatcatctaactcttcaattgtataaacttcatcaaattgttcaacattttttcctgacttactaacccctattactttcattccaaaagctttggctaaataagcagccctttgtgcaatcgcaccagttcccaagaataataaagtctcttcgtttaatcttttaccagtaattctggagtcataatttttttctaattgatttctataggaagttttcatctttttataatcatgcaaaatgaatgtcattatatattcagacacttgtttagcttgtatacctttaccatttgttagaatgatatctcgctctttaatataatttaacggtaaattatttacacctgttgcaaaccatccaatccatttaaggttgatacaatgttcaataaaggtacgatctattttgcc

SEQ ID NO: 4188 - DNA, 3354 bp, Artificial Sequence
  Description of Artificial Sequence: synthetic nucleic acid sequence
cttaatttttgcacttcctggctcaactggtgcaattaaacttgcaatagaaaaattaattaaacctgaattgagtcacttagtgtttgaattaaataaagacattaggaattaagtaatttcaagatattagatataatgtacgaatctttaatttatacaataaatagaattatcaattttttctgtggaagtcgccagatttaccaccagatttagattctaagtacgtttctccaattatcatgcctttgtctatagcttttgtcatatcatagattgtaagtgctgtaactgaagcagcagtcaatgcttccatttcaacaccagttttacctgttgtagacacgaccgctgtaatatttaaacgatatgaatcatcattatttgaatcccatttgaaggatatatctatgcctgtaagtggtaatggatgacacataggaatgattgtagaagtgtttttagctgccataataccagcaatttgcgcagtattaagtacatttcctttactattagtattttgagtaatttgactataaattttttcattaactattatacttgagtgtgcttctgctacacgttttgtaatttctttattagaaacatcaaccattttagcattaccttgtttattaatatgtgtgaaattagtcattttttccctcctattaggagtaagtatatcatgaaaattaatattttttggagatgagtgtatgtctgtagagaaaagaacgccaatatcagttaaagaagcaattaaacgtattatgaaacaacatgttgaagtgaagaatatcaatattaatttagatgaaagtttaggacatattcttgctgaagatattgttgcgacctatgatataccaagatttaataaatcaccctacgatgggtttgcaattagaagtgaagattcacaaggtgcaagtggcgaaaaccgtattgaatttgaagtaatagatcatatcggtgcaggttcagtttcagaaaaaacaattgataaaaaccaagcaattcgaataatgactggtgctcaaattccttctggagctgatgccgtagtaatgtttgaacaaactattgaatctgaaacaacttttacaattagaaaatcctttaaacatttagaaaatatttcgctacaaggtgaagaaataaaagctggtgatattgtactacataaaggtatgcgtattaactcaggtgtgatagcagtcttagctacatacggttatactaaagtgcgagtggctcgaaaaccaactgttgcagtaattgctacaggtagtgaattgcttgaagtagaagatgagcttgaaccaggaaagatacgaaattcaaacggaccaatgattaaagcattagctaaacaatttggaatacaagttggaatgtataaagttcagcatgataatctcgaaaagagtattgaggttgtaaaaaaagctttatcagagcatgatttagtaattactaccggaggtgtgtcggtaggagattttgattacttaccagaaatatacaagtccatccaagcacagatactatttaacaaagtggctcaaagaccaggtagtgttactacggttgcatttgcagatggtaaatatttatttggcttatctggaaacccttcagcctgctatacaggatttgaattatatgtcaaacctgctgtaaataagctcatgggagctaaagcttgttatccgcaaataatcaaagctacacttatggaagattttaataaagctaacccatttacacgattgattcgtgctaaggcaacattaacaaaagctggaatgacagtaataccatctggatttaataaatcaggtgcagttgtagccattgcgcacgctaatgctatgattatgcttcctggtggcacacgtggatttaaagcgggcaacattgttgatgtgattttgaccgaatctaatagttttgaagaggaattgatactatgattttacaaattgtaggtatgaaaaattcagggaaaaccacattgatgaaccatgctatatcatttttaaaagaacgaggctattcagtagtaacaattaaacatcacgggcatattggtgaagaaattgaattacagtcatctgatgttgaccacatgaaacatttcgctgcgggcgcagaccaaagtattgttcaggggcatcatttacagcaaacagtgacacgtaaaaagaaacaatcgcttagagaaataatagaaaattctgttacaattgattgtagtatcattttagttgagggctttaaagaagcaaattatgataaaattatcgtttataaaaataatgatgaattaagaagtctacaaggactttctcacgtcatagggaaaatagaaaccaatcatccacgtgcaagtaatcaacttgagcacttactcaataaattaattaaggataagggaatgaattaaatgaagcaatttgaaatcgtgactcaacctattgaaacagaacaatatagggattttacgattaacgaacgtcaaggtgccgtagtcgtatttactggtcacgtaagagagtggactaaaggtattcgtacacaacatttagagtatgaagcttatataccaatggctgagaaaaaattagctcaaattggtaaagaaattgaagaaaagtggcctggaacaataacaacaattgtacatcgaattggtccattacaaatatcagatattgcagttttaattgcagtatcttcaccgcatagaaaagcagcatatgcagcgaatgaatacgccatcgagcgcataaaggaaattgttccaatttggaaaaaggaaatttgggaagatggtgctgaatggcaaggtcatcaaaagggaacatataatgaagcaaaaaaggggaaagcaagatgaaaattttatattttgcagagttaaaagagttgctcaatcgatctactgaaacaatacatttagatacgacattaactgttcaagaattcgagtcatatttattaaaacaccatagtgaacttaaatctaaaaaatttcaaatagctgttaatgaagaattcgtcagacaggatgatatagttcaaccaggagatacaattgcgctcattccaccggtcagtgggggttgatcaagatgaaagcaattattttagcaggtggagaatctagccgatttggtaaagctaaagcttttgctaaaattgataatcaatatttttatcaaaaaattatagaaacgttaaaatctacaaatatgtttaatcgcattatcattagcactaattcccaattagcttctcagtttgaatatgaatatgtgattattgatgacgaacatcatc

SEQ ID NO: 4189 - DNA, 2634 bp, Artificial Sequence
  Description of Artificial Sequence: synthetic nucleic acid sequence
gtggtccatgtatatatttaactcgcatctgacttggttgttctaaatcaaacggttccataaatgattgaataatatcttgctcgttcgttagagatgtcgttacctcttcaaaatcaggcgaaacatgtgtcgcaatacgttgtttaacttcattgtcatcaattacatattgtgttcgtaatatttcatgacgttcaatcaacttagataatgcacgttgcaattgcataacattaagttcagaagataatctccataagaatggaatgttatacactgtgtctttaggattgaccttccataaaagatacatacttttttgagacgcacttaaatcatattgatacgattcatttgctttgggaatcacttcatagacatcattttgcagttcttcaatttgttgtccaagttgctctacagtaggcgatttcattaaatcacctactttaagacgtttttttaacctttcttcaatacggtttacaactaatgttgctctaagagagtgtccacctagttcaaagaaattatctttaacacctacctgatcaacatgtaaaatctcttcgaaaatacggcaaactgtgcgttcaatatcgttacgtggttctacataatttctattattctttagattaatttcaggtaatgcacgcacatctaatttcccattcatcgtgataggtatacgatccaccttcataaaatgcacaggtatcatatattcaggtaatgtttcacttaaaatatcttttaattgacctgttgattttaattgcgatgcttcataatatgccactatttgtttatcttggtcttgctctcgaacgatgactacagctttattaatatcacgtatagcttctaatgctttttcaatttctgataattctattctaaaaccgcgtattttaacttgcttatcgatacgactaatataatcaatatagccatcttcttgaagacgaactaaatcaccgcttcgataaagcatttcattgttaaaaggtgactgaataaaacgttcagcagtaagtttaggttgatttaaataaccttttgctaaacctgcaccaccaatgcacaattcacctggaacacctacgccacaaatacgattaccttgcatgacataaactgtcgttccactaataggtaaaccaataggtatacgtgaaggcatctcttgtggaatcgcaaaagttgtagtaaatgttgtattctctgtcggtccataaccattgattatttgaggatgacactcacgcgaatttaataagtgaacccatttagcatttaacacttccccaccaataagtaaataagttaaagattctagtgcttcgatacgttcgctagcaatttgattaaataaagatgacgttaaccacatcgtgttgactttattttcagtaatagcttgatctaacaattgaggatttaacaacgtatctttagatgtaatgactaaccgtccaccattcaataatggaccatatatttcaaaggttgctgcatcaaaagctactgttcctgataataagacggttgtattttcgttcaattcgacataatttggattgtgtactaagcgatcaattcctctatgtggcaccagtgtccctttaggtttaccagtcgttcctgatgtatagatgacataagcgatatcttctgaacaattaatgcctctcgggttatcaatatcatgttctcttgaatcaactatcaattctatatccatttgaggtaaacctgattgaaatgatgtacgatatgttacaaccgctttaggttttgcgtcctcaataatataattcattctttcttcaggataatccggatcaattggtatgtagcctgcaccagctttcaagatccctaacattccaataatcatttctaagctgcgttctgctattaatgccaccatatcattaggttcaatctgatgatttaaacgcaatctatatgctaaaagattcgcacattgatttaattgatgatatgtcatcgatcgttgttcatattgcaacgcaatactatcgggatgttggtgcacttgacgttcgaatctttcaaccacggttttataagtgacctcactataattaatgtcattgttttgaagattgatgtcattatatttagctaaatctgagcgatcactgagttttatatctttaattaataatgatggattttgtgtaatttgcatataaatcccattaattaatttgactaacgtatttacagttaattcatcataaacgttgtcattataaactatatcaaaaccaccctgcacatgaggataaaactctaaatccgcgaatgatgatgcttcattgtatagacgatgtatatgatgacatatatgattaagctcaaattgttcttgtactttttcaatatgaatcatcgtttctacatctatttgtactgctttaggttgaacaacaaaagacgcaccacacatttgaagctcttcaagtagcgcggaacactcatccaccatatcttttacggcgtcactttgactaatacttaaattaagtggggcaatgtctgtgtttaaaaccatcatattctcagtatttttattatctatcgaaaaatggatgccta

SEQ ID NO: 4190 - DNA, 3370 bp, Artificial Sequence
  Description of Artificial Sequence: synthetic nucleic acid sequence
aattggtgttgtgcgcgctttagcagctgaacaagatattatattaatggatgaacctttcggtgcattagatcctattacacgcgatacattacaagatttagtaaaggaattacaacaaaaattaggaaaaacatttatttttgtcactcatgatatggatgaggctattaaattagcagacaaaatatgtattatgtctaagggaaaagtcgttcaatacgatacacctgacaatattttacgatatcctgcaaatgactttgttagagattttattgggcaaaatcgcttgattcaggatcgtcctaatatgaaatctgtggaaagtgctatgatcaaacccgtcactgttaaagcagatgattcattgaatgatgcagtaaatattatgagaacacgtcgagtagacactatttttgtagtcaataatcaaaataaattattaggatttttagatattgaagatatcaatcaaggattacgtgcgcgtaaagaattaattgataccatgcaaagggatgtctacaaagtacatatcaattcaaagttacaagactcagtgcgtactattctaaaacgtaatgttagaaatgtccctgtggtcgataatgatgaacatctcattggtttaattacacgtgcaaacttagtcgatattgtgtatgactcaatttggggcgaagaagattctgatagttatgagatcccaaatgaaagcttagatgagaataatcacgatttaccacaaaatcaaactgatacacgaacaaatataaatgaagatgtgaatgattatcatgatgctcaacatagaggtgaggattaataatgaaagcattcttacaagaatatggtagtcaacttttatcaaaagcagtagaacatttttatatttctatgtttgcattattgttagcgattgtagtagctgtccctttaggtattttattatcaaaaacgcaacgcacagctaatgtggtattaacagttgctggcgtgcttcaaaccattcctactttggctgtgctagctatcatgattccaatatttggggtaggaaaaacaccagctattgttgcattatttatctatgtattattaccaattttaaataatacagtattaggtgttaaaaatatcgataaaaatgtcattcaagctggtcaaagtatgggaatgactaaatttcaattaatgaaagatgtagaaatgcctttagctttaccacttattattagtggtattcgtctatcaagtgtatacgtcattagttgggcaacactcgcaagttatgtaggtgcaggtggacttggggatcttgtatttaatggattaaatctctatcaaccacctatgattattagtgcagcgattgttgttactttattagcattagttattgactttatactttcattagttgaaaaatgggttgtacctaaaggattaaaagtatctagataaatgggaggaattgacattgaagaagtatcttaactatacactgattctgattgcattgtctctcatcgtgttatctggatgcagtttaccaggtttaggtgatggaaatgcaaaagatgatgtgaaaatcacaacgactgaaacaagtgaaactaagattataggtcatatggaaaaattattaattgaacatgaaactgatggaaaaatcaaaccgacgttgattgggaacctaggttctagcattattcaacataatgcgttacaacgtggtgatgcaaatatgtcagcggtacgttacacaggtactgaattgacgagtgtattagcagctaaacctactaaagatcctgataaggccatgtctgaaacacaacgcttatttaaaaagaaatatgatgaaaagtattatcattcacttgggtttgcgaatacatacgcattcatggtgacaaaagaaacggctaaaaagtatcacttagaaaaagtatcagatttagagaaatataaagatgaactacgtcttggaatggatacccaatggatgaaccgtgcaggtgatggatatccagcttttgttaaagattatggatttaaatttgatagtgcacgtccaatgcaaattggtttagtatatgatgcattaaaaaataataaattagatgtagcagttgggtattcaacagatggacgtattgcagcttatgatttgaaaatattggaagatgatcgcaaattcttcccgccttatgacggtagtccacttgcaaatgaacaattaataaaggataatccagaaatcgataaggcactaaaaaaattagaaggtaaaatctcaacagaagaaatgcagaagttaaattatgaagcggatggaaaaggtaaggaacctgcagtgatagctgaagaatatttaaagaaacatcattactttgaagaaaagaaaggtggtcataagtaatgaaaggtaatttgttacattcaatcatcgaatattactcactgaactgggcctttcttctagaactgttcttcaaacatctattaatgtcggtatatggtgtgttgtttgcatgtataattggaattcctattggtattttcatagccaagtataaacgtttatcgtggccggtaattacaattgcaaatattatacaaactgttccagcaatcgctatgttagccatacttatgttggctatgggattaggaccaacaactgttgttgtaactgtattcctatattcgttattacctattattaaaaatacttatactggtattgtagaagttgatgaaaatattaaagacgctggtaaaggtatgggaatgacggggaatcaaatattaagaatgatagagttaccattatctttatctgttattattggtggtgttagaattgcacttgttgttgctatcggaatagtagcgattgggtcatttatcggtgctccaacactaggtgatattattattcgtggtacaaattcaacagatggaacaacattcatcttagcaggtgccataccaattgctttaatagcaattatcatagatataggattacgttatctagaaaaacgtttagatcctactcgtaaaaacaaaaaagattcaatgcaaaaacatcaagtacaaaaattacgttaattgatattaataaacttagttaatataaaaagaataggcagtgactgaaacagagattattttagtcaacagttgcttatacattaacaatgcctggaacattattttgtgttccaggcattgtttgtttaatatattaagttttcagggctattttagatatatttatagttttgggtaattataataagattggagcaaggataggaactactgctacaacaataacgccaacgatgacaactgc

SEQ ID NO: 4191 - DNA, 3075 bp, Artificial Sequence
  Description of Artificial Sequence: synthetic nucleic acid sequence
cctcaatagtacgttcttgttggctttctagtaacgtatattcatgtttttcacacactgggcaatctttatttttgagtgcatctacattcattgacttataattgatattaaatgcatcaatagtgattaattgctttgaaaatccttttcctgaaagataacgtacggcctctgctacttcatagcttgcaatcattgatataacagggggaattacgccattaatagcgcaactttcccctgtgtcaggaattgtttgcaataaacattttagacatggtccttggtgatctattccatatactgatcctttactaccaacagctgcaccataaacccatgggatttgatacttgtgacaaacctcattaatcaggtatcgtattttgaagttatccatgccatcaatgatgatgtctggttcgacattttttatcaaattttcgatatttgatgaagtaacttctaaatcataagttgttagattgacatttatattaatttgattaaccttatgcttgattgcttcaactttggatattaaagtatgtgcgtcttcttcatcgaagagtgtttgtcgatgtaaatttgaaatttcaacaatatccatatcgacgattgcaatatgatgagcccccatgcgtgcgagttgatctacaatatggcttcctaaagcaccagcgccaaaaataagtatttgagaggaggatagcttttgctgaccctcttctccaaatggtgcaaagcgtgtttgacgttcataacgcgacattttacaagaaccctaaaccttctgatggactagatgcttgtgcagtatacttaacaggaatgcgtccagcttcatatgaaagtctgccagcatttatacctaatttcattgcttcagccattttcacaggatcttttgccgctgaaatggctgtgttgagtaaaataccatctgcgccaagctccatggcatgacacgcatctttaggggaaccaataccagcatctacgattacaggtacactagcattttcgataatataacttaaatttaatgggttattaatacctcttcctgtaccaataggggatgcaagtggcataactgcgtgtacacccaattcttctaaacgttgagctaaaactaaatcgttagagatgtaaggacaaacagtgtaacctttttctaacaatactttgcatgcctcgtatgtttcgaatggatcaggtaataatgtttcgtcatcaccaatgacttcgactttaatcatgtcacatacacctgcgtgattagcaatttcagcaattctgatagcttcttgagctgttttggcacctgcagtatttggaaaagtgataaaatcttttaaattaacgtttgcaagtgggttaggtaggttacgatcatataaattcatacgtcttactgcaaatgtaagtacatttgtttcagatgcctcaattgcttttgactgaacctcttcattttcaaattttccagtacctaaaagtaaacgagattgtaattctaaatttcctattttaaacatattaaccgcctccaacaatttctagtaattctaatctgtcgtcttctcttacagtatattcttcatatttgtcttgcttgataagttctttgtttagttcaacaatcactcgttttgggtctaattcaagtgaatgtaaaacctcttgtatcgattgattctgatcgaaagtgaagaggtcgccattaatgatacacttcatgattattcctccttgtaactgtaaaacttgaataacgtgatggtttaataccagaaagtagccaattggcaatgtcacgaccgataataggtgacaataatattccgtttcgataatgaccacttatcacgtataagccatcatcaatttgatccatgactggcatttctttttctgtgtatggtcttactcctgaccatttcttcagtatatgactgtcttttagttgaggtacacgatgatatgcatggcgaagaagccaatccataccttcatctgtagtaccgacagaataattattaaattcactcgtcgcaccaattaaaaaacgattgggttgttttggaacgatgtaacaaccattagtcataaataatgtctcagtaagtgaaagatcgttattttctaataagataacttcacctttaacgccaatcacttgtcgttgtagatgatattgtgttaataattgcgaagaccatgcgccacctgcaacgataattttgtgcgcttcaattgttgaagattgatcggttttcactgaataatagccattatgccgttctattgaagtgacctctgtagactcataacgcttaatatctcttaacttcattgattctaataatgccagtgtgtaatgatgtgcattaatttgaccatcgtgtggtatgtgaatggccgcgtatgaaggtttaacttcaccatgtgtaagttgtagcaaatcatcatctgataattgtttgacactacggtcttgactattcagaaattgatattgtcgttttatagatgagatatcatcgtgttcattagcaattttgataagtcctgaatttttaaattgaatgtctatgcctgtttcatctaataatgatttacttaattgtggaaacatagcacgagattcgatggctaattgaaacaagtcactatcctctgtaaattcattttgtgcgccaagcatacctccagctttatatgacgcatgctttccaggtacatctctatctatgactgcaacatctaagtgtgttgcactgaggtgtctagcaattgacataccaataactcctgaaccaatgattagtacatcatgcatgagtagaccactcctttcttaattgtttaatttcttctagtgaagcattgttaaaatatgatatggcacatatacctttaaatccaggtggcatcttttgaagtgaatgttcattaataccaccaatagcataaatagggataggaacatttaatgcctgttgaatagcttctttagaacgcggtggtacatttggatgtgaagaggtaggaaaaatatgtccaaaa

SEQ ID NO: 4192 - DNA, 3757 bp, Artificial Sequence
  Description of Artificial Sequence: synthetic nucleic acid sequence
tgattggtgatacagctaaccatgaagttgttggtaaacacggtgagaaagtcactgtagatgttagcattgctgatgctaaaccagaaaattatgatgcattattaattcctggtggattttcacctgaccacttacgtggtgatgaagaaggtcgctatggtacttttgctaagtatttcactaaaaatgatgttccaacatttgcaatttgtcacggaccattagtattagttgatactgacgatttaaaaggacgtacaatcacgggtgttattaacgtacgcaaagatttatcaaatgctggtgcgaatgttgtagatgaatcagtagtggtagacaacaacattgtaacaagtcgtgtacctgatgatttagatgacttcaatagagaaattgttaaaaaattagaagcataaattgtatttataatgagctaatctgcactcattattttgattttaaattattgattaagactgttgttaaagtttttgactttttcaacagtcttttttatggcattaaataaatgataaaaaactgaattttgataggtaaatgatatcttggaaatgacaacttgagtttaaatgaataatttgtacttttgactgtacttaagtcttagaactattgctacaccttgggactgattttttaactttactatagctaaacggttaaacaattggtaaactcactttaaaagggtgagtttgagaaaaggagaaaacccatgaaaagaagcgataaatatacggatgattatattgaacaacgttatgagtctcaacgaccttattacaatacatattatcaaccaatagggaaaccaccgaaaaagaaaaaaagtaaaagaattttcttaaaagcaattatcactatattaattttattgattatattttttggtgtcatgtactttatttcttcaagagcaaatgtagatgatttaaaatcaattgaaaataaaagcgattttgttgctaccgaaaatatgcctaactatgtaaaaggcgcatttatttcaatggaggatgagcgtttctataaacatcatggctttgatataaaaggaacgacaagggcattgttttcaactattagcgatagagatgtgcaaggtggaagtacaattacgcaacaagttgtaaagaattattattacgataatgaacgatcctttacaagaaaaatcaaagaattgtttgtagcgcgtaaagttgaaaagcaatacagtaaaaatcagattttaagtttctatatgtactttgttgttgattgttattttcagccgcatctgcatgtgttgtgtgacctagaaatgctataccaagtccagctaccaatgtcgagattgttttgatttttttcataatatttaacgcctccaaaaattgtaatatttattagatgtactgcaaattgatttgaaaattattaacatgtttactcatttatgtgtgtgcatgtagttgttcttaacaacactgaatactttaacagatttaattgaaaatatggggattgttacttattcgtaaacaaaataaaaaaacttgattatctatgtaataaaagataaccaagattacgaactcaatttatattgttaatgtgcttcaaatcaagatttggagggtcataatgtaaataagttcaagtgttttattacaatgattctgtaataatgtaacttattttataaaaggtatcgtgagtgggatagtgtaagttttgccagacatatattttacgcaagcaataattgtacacacaaatgacattattaacaatgccaataagatgaagactaccaccagcagcaaaattaataataagatggctaaactttcacttatattcattaaaggaacaatcataaacatacatatcacgcctactgttgaatagatagtataagaaataaaatagttcagatacgttttcccagatacatcaataagtcgggactctttacgcttgagtaaccaaataatcaaaggaccaatgataccagtaaataaacttaataaataaattaacattgccattaaacgattatcttgactttcctcattttgaatagttgattggtggtgtactgtactgtcattcgataaattatctgatgaagtttgatcagacacattcttagattttaattcattgtaattcgtgtgtttatccataataggttttacctccatttgtaaaaaaaatcacttaatgcaactataattgtatcaataattaattattaattaaatgttaaatttaatttttatatcgattgacgaagtagtttgaaatatagataatttggttatatagtactgttgttattaataaaattttaagcgttatatataatagtaatgtaaatggtaaaattttatattataatgcagatctagtaaatattttaatcattacatacatgtggagaggcacatcgttcaatcaaattatgtttgaattgagaaccactccttttttatggcaagaatacaaaatatattagtgatttattgtagtataagcataaaaatttagtgaaaagaggtaaaaaaatgaaaatagctattgtaggttcaggtaatggtgcagtaactgctgcagtggatatggtagataaaggtcatgatgtacgattatattgtcgtaacgaatctattagtaaatttgatgtcgccctagaaaaaggtggctttgattttaataatgagggagaagagaagtttatagagtttactgatattagtgatgatatggagtatgttttagatggtgcagacattgttcaggtaattattccttcatcattcattgaatattatgctaaagtgatgtcaaaatttgtgacgaacgaccatctcattttctttaacattgctgcttcaatgggttcaatacgatttatgaatgtattagaagatcgtcatattgatgtccatccacactttgcagaagcaaatacattaacatatggtacacgtgttgactttaacaatgctaaagtagatttatctttaaatgttcgtcgggtgttcttttcaacatttgatcgtagtgagttaaatgaaagttatgaaaaggtatctaaaatttacgattatcttgtaaaagaagaaagtttacttaaaactaatcttgaaaatggtaacccagaagtacatcctggaccaacattattgaacgttggacgtattgattattcagaagagttttctttatataaagaaggcataacaaaacatactgtgagattattacatgctattgagatagaacgtttaaatttagggagaaaattaggttttgaattatcgactgccaaagaatcacgtattcaaaggggttatttagaacggaaagacgaggatgaaccgttaaatcgtctttttaatactagtcctgtgttttctcaaattccaggaccgaatcacgttgaaaaccgttatttaactgaagatatcgcatatggattagtattatggtctagtttaggacgtgtcattgatgtcccgacacctaatatcgatgctgttattatgatagcttcaactattcttgaacgcgatttctttgaagagggcctcactatcgaggaattaggcttagataaattaggattagagtaatttttagcaattaaaatttaagaaaagaggttttgtttcaaatcatactgaagggagcaaaagtatgactcaaaagtatagatatcctacttttttagaatctatttcta

SEQ ID NO: 4193 - DNA, 3041 bp, Artificial Sequence
  Description of Artificial Sequence: synthetic nucleic acid sequence
atatgaagcgatacgttttttaaccaaagatatgattaaagatagtaaaataattaaagactttctaaactataaatatagtcactgtgatcgacaaaaagattatcgacagttgaaaagtacgtttaaatgcattaattatggacaggaatttttaaataatgttgaaactttctcttcatctcaacatgtaaaagtgaagaaaattcatcgacatctcggtagtgaaaaacaaatagatatagcaagtcgtttaaaagagagtcgttggatgaatttaattagaaaaaataaatatttatttaataaatgtaaaacgtactatgaaaaaagaacgcatatgagctatatcaaaaatttaaatcaaatacctgtagacgacgattcaatatttatagagtctttccatggcaagaattttagtggagatcctaaatatattgctcttgctattaagagacagtatgatcataaaaaaatatatgtgagttcaaccaattcacttgttgatatggaaatcaaacgttacggttttacacctgttcgatttggaagcgagaaatatattaaaacgtttagaaagtgtaagtatgtttttatcaatggtaactcgtgggataaagtgtacaagtcttcagatcagatatttattcaaacatggcacggttttccattaaagaaaatggttaatgatttaaatgaacaacatgaaagacaacaacaactagaggcattcataccacgcatgaaaaaatgggattacattttgacatcatcagatattaatacgacgttgttggaatctgcttttatgctaaataaaaatccaaatcttaaagttctagaatacggcgcacctaagaatgaatatttaataaataataataatttacaagagcgccagcagttacagcttaaatatatgtataagatagatgatgataaaaaatatatattatattgtcccacttggagggaaaatcaaagaaaagaagtcactcagattaatttaaaagatttacttaaatatttaccagagaattatgagattattgtgaaacttcatcctaatgaaagtcatttaagaaccagatataatcaaatagataatcgaattcactgttatttcaatgaacttgttgatattcaagaactgtatattctgagtgaatgtatgattacagattactcgtcgaccatttttgactatatacatttaaacaagccagtctttattcttcaagaagacgagcaacaatataaacaaagtgttggtttttattttgatttgtttgaagtgggtgattttcttaaagcctctttaaatgaacgcatgttagctaaacaaatttgtagcactgattatataaattattcaaaagtggttcatcgtttgatgaaacaagatagttcgaaaagcagtgaaaagttaatggccgaaattcttggggaaccagaatatccaagttcatcaaactgcaaacaacagatttcttaaagaaagttgttatttaccgggaaataatataattatgggtactttgagacaagaatcatgtgactcttgtctcagtttcatatttttgggtaaacatttaacatatagcaatgataaccaatacaaatttaataagtatacaatctaactatttttatagaacattaaaacacattctaggggggagtgcatgtctaaaattttactaactggtgcatcaggttatattggtagccatctcaagaataaattaaaaaaagatcatgaagtgatagctatatccagaaatactcataataaaacggatgaagaaaatgtcacgtggaagtcagcagacttatttgatttggacgaaattacaaaagtaatgaaagatgtagatacagcgatatatttagtacactctatgatgccatcagcaaaattaacgcaggctagctttgaagatatggatgcattgttagcagataattttgcgcgtgcggcgcaaaagcagggtgttaagcatattgtctacatgagtggtttaataccagaaaatgatgagctatctgcacatttaagaagtcgacttgaatgtgaaaaaattcttggtgattacggtataccagttagcacattacgtgcaggtttaattattggtgcaaaaggaagttcttatccaattcttaaacgactagttaagagattgccagcaatggttttgcctagttgggcttacaataaaattgcacctgttgccattgacgatgtgatagatggtttagcagcattggtgaatcgaacacccaaagataacgaagcaattgatatcacaggtcctgaagtgatgaattataaaacgctgatacagcgcacagctaacgtacttgataagcgactgcctatgcttgatttacctattatacccattatcataagtcggtattgggtacaactgatttcaaatgtaccgaaagaaatggtatatccattaatgaatagtttaactcacgatatggtaccacatcgaaaacgcgttgtgtctaacttgtccgtaggaaatatcacctttgaagatagtgtgaaaagagcactaagagaagaacaaaagacttctaagaaaaagtcggattcgaaaaattctcaatcatttgggcgtatgcatcaagaaattaaagatgtacgagccattacacggtttaaaattccggaaggttattcgattaaagatgtgactaaagaatatgcaaaattcatcaataatatcacactacatctcgttaaaggtacgataaatgaacgagaatttaatatgaatttgcccttcattaataaatttattttaaaaatggaacgtgatgaagctgactctacagaagatatggtggtatataatattgtgggtggcgatttagcacattcaaatgatggtggaaatgcacgctttgaattccgaagaataagaaacaccaatgagggtattattgctttacaagaatatgaacctacattaccttgggtagtatataaactaactcaagctaaagcacacaagactgtt

SEQ ID NO: 4194 - DNA, 3643 bp, Artificial Sequence
  Description of Artificial Sequence: synthetic nucleic acid sequence
ttatatttatacattgatgaaaggttactattacagattgctttaatatggttagctcatattagtatggatagaactttaggtttcggactcaaatattcatcagatactgataaaacgataatacaaaagatgtaatcgtagtttctgaatagatatttcaagttatacaaatcaatggtattaacaaatctaatataatccagtaatggatagtgatcattaaatttgttgaattacttcattaaattagaaataaagagtgtgatattattatacttttaatttaattaaggactgttaataaataaaatcccctaaataataattattgtctaggggatttatcttaatagtttaaaatgtttttgaagtatgttgcatcaaagcattaaattcttcattttttatgttactttgtgtaagcgtaattaaatgattatctaaatctttaattgtcatttcaatagaattccatggtttttcttcaagatcttccacgatatattgagaaggtattcgttgttttaaaattcgaatatttggtacaagtatatttgtataaactgcattaccgacttcaaactgtttgccagaaattaacatcaaatcttgatattttgctaatcgtaaatgctccattaaaatttgattttgttcatttttaaatttaaaaatacttttaaaacctaaattctcttgataccattccgatgatttatctatgtcgttaactaaaaatttattaaacataggcatactatataattccatagttaatcctcctttattggattggtaagattaactttaatctattacgtaacgttaatgtcaaggacgataaaacaaatgaagtcggatagtattaacggctaattttagtctatttctaggaggtactgttgaagtatctttagtgatattttcaatacgattattctaataaatgtagttatgagtgattcattatggttatatctttaatccttaaaagttgggtattaaaggtaaggcatatatagtgacgtgactacattagtaataaataataacgtgtatgttaagatgactaaatgaaaaaaagctatacattaaatgatagattttatccgtctatacataaaacgttagctcttattttttcgctcaattaaaaaatttacgattgttggtaagtgtaattgctagagataactatatgcctaaatagtgtttagatacataatgaacgagatatcccattaagcataatacaccgagtgatataaaaactgcagaaaaatttctgcaatgacttttataagataatccttgattttgtgctaaaaagaaactaaaaatatatagtccgattcctattataaaaaagcctataattacgtataacatataaacctctttctatttagttgaactaaattgtaaattttcaatttttatactgatttttagaataattatttgcatctagaactttctgtgcgttatctcttcataattatcattgagaatttcgtcacgaatttgcatctcactagatgatagtctattccttgttttatttctccattcttgatttgacatgttcaaatatttgttatttggattgtagttaggttgttattgcgaattgttgaagttgtatttgaattttgattatattgagtatctttagaattattactttcatcaatagcttgttcttgagtttgaattgtattttgagagttttcagaatcataagtcactgtattaatgttcaatgaacttattcattgcaattcttctagttgagatgccttgtttttaatttgactcctcttttcaatattttttgtgttttatttagagtttagaccacatgccgttaagaatagtgatattgataagaaaaacaactaatgctttaactttcattagtaatttttcccaatattaaatttatataactattaatttgaacatcgaaccgacaatagcaaacgtattccatttattaattcttatataaatacagtatacaatttaaatttataaccgacaatattagtactaattgctactatattatagagaatataaaatgttgtcattaacatatgatttatcaaagtaatttaaaaaatagtttgattgtttattggtgtatgtaataagggaaatttaaaatcataaaagtatctatactatattgtttataacgttaggaaataaaatagttccaaatgaatgcaaaaatgcaattcttttggaactttgtttctcattgattatttatttaattgaatattatagaaataccttctgaccatttctataaccatcatccaaacaatgtgtccaaaaaattctgataggtgttctgaaaatggttgatcaaaagcattcggtacgacatgcataattggcattaagattaaatgaaaaacaatccaaataactataccaaataaagcaccataacctagtgtgatttttgtatatttctttgcgatataaatatagattattgcaatagcgatagaaaaactatagtgtacgataaaacttatccaaggtaatgcatgctcagaaaaattgtatgtgagatgggtaatatttgacggtattcctagtaattgtaagagttgttgaggtgggttagtggcatctctactaggtgttcggggtgggaacattacctcccaacctagtttgactacaccagataaaagtcctgctattatgccagctattagtagtttaaaaatgctatgttttaaactatctaatcgctcatttgcagtcgttaatgattgattgatatattgatgtttttcttcaagtatttttttattttttttagcatgacgccattgttcacgaacttgttgttgatattctaaatcgaagtcaagattatattctttttcaagttgcgtgagttggttttctaaatcattaatttcctgacttattgctgtgctataatctactgctttagatctagaaaaaatgatacctactacaaaaatcacagttaatagagcaaatattataccaaaaataagatttgcagtgaaaaaagaaaaaatagaaagtgctgctgatagaatagtcaaaacaataaatcctattctcaaaaacttttgtcttttatttttttgtgtttgttcttcttcaaaagtttcttttaacttttcatacaagttctctttttcatgtaattctaaaacttgttgtgtatattcctttttcttttcaaaggtttcgtcaggaacaagctcattctcaacttgattaatctcattagaattagagtttctttcaattttattttcttcaagtccacgttctaactgattgatataagcaatttgttcttgcttgcctaatactaaatcactcatatgacttttcatcgcttcagtactgtctgtgtcgtaaaacacttcttgccaacctatattagattgaagagcttctagttcacgttgcttatcagcaatatctttctctattgaacgtaactcaaattctttttgtttaatttcagtctcttgttgataaaggctattaaacgaatcaatatacttttggtctactggattgatggactccgcctctttatttaatatgcttaatctttcttctcgcaaac

SEQ ID NO: 4195 - DNA, 3328 bp, Artificial Sequence
  Description of Artificial Sequence: synthetic nucleic acid sequence
atttaataaataattatttctaggatatcctacaggtaatatatcaattttttgactaggaaacgctgattcaaagtatgtttttgattcttctgaatctacaattaaataatcttgttgtgtccatttattatattttcgagctcggtagttatatatatttaaattttggtgtggctctttactatctaaaaatagttttttaataggtgtcccatgccataattggatgattttaccattagggtgaatgtcgtcaggaatatagctttccgtaatgacaaaagtagctgtttcaatcaaattcttcacattttcatcgttagttgaaataaaatgtggtcctgttctctcatctgttataaagtaagactctatcataggattgtgtttaacaaagtaattaaataaatacttagagtttcctcgatagccgaaatcaaatcctagaaaaacgacgtggttcttaagttttgatgaatcctttttataaatatagctaatctctttgtgttttttaactgaataattcttaataggagtcactaaccatcttggagctttaaatttagtactaagtagtactgaatcataatatctaatactatcgtgatcgttaaatggtacacgcgtaaatgggattctttgtttatgtgcataagcgatggtgtttaagaagaatttatctctataagttaaatcattacggtcaaatgagcgccaaaatcccttgctcgtttttaatggtcctttaaagtctaatacgacatgaccttcaactgcgatatgccctttaagaattgttaataatgctaaatcaaagatattttcaacttcaaatttatcaataagttctaatgttgaattaatttcataaataacatttggatataaattaatatttttaacccagtcctcaaaatcaacaaagtccaacccgaagtatttacaatcgtttaaataataattgttaattgtatagtcaactataaatgaagtcttaggtaaagtgatagctttaatcatggactgatgaatttgaatttcatttgaataggggatgacatgcgtatagccgtcgctaagtgcacgttccatttgctcttttaatttgtccatatttgaaatatttatttgctttatcataaatcttccttcaatctcttaacgatatttgttagcttttattttatcatggtgcataatataattcatgtaaacataacataaaaattaatatatatgtttttaacctgagaaattaaagcgcttaactactataaatattaaggtttattaattgttaacacccctttacattcatgtcacaccattgtaaattatataagaaaatgttatatttttcttgtgaaaatggtcacgatatgcttgtggggatcgtactgatttaataggtatttatcacatattaataaggggacagtatgcgtctacctagtcttcatgactaaagatttaatgaggagagttcaatatgttagtagaatcttttaatccatttggtaatttactattatcatctttaattgcggcaatccctatcattttatttttactgtgtcttacagtatttaaaatgaaaggaatttatgctgctatcacaacccttgtggttacattattaattgcaattccattctttaaattaccagtaggaattgcctctggagcagttgttgaaggtttcttccaaggtatcttcccaatcggatatattgttattatggcagtattattatataagattactttgaaatcggggcaattcgcaactattcaagacagtattacaagtatttcacaagaccaaagaattcagcttcttttaattggtttttcatttaatgcattcttagaaggcgctgcaggatttggtgttccaattgcaatttgtgcacttttattagcgcaacttggctttagaccattacaagcagctatgttatgtttagtagctaacgctgcatctggtgcatttggtgcaattggtattccggttggtgttgtagatacacttaacttacctggtcatgtagaagcgatgggagtttcacaaacatcaacattaactttagcaattattaacttctttattcctttcttacttatctttatcgtagatggtttcaaaggaattaaagaaactttaccttcaattcttgttgtttctgtcacttatacagttttacaaggattacttacagtgtttaatggtccagaattagctgatatcattccatcacttgcttctatgttagcattagctttattctctaagaaattccaacctaagaatatctttagagttcaaaaagatgttaaaccagaagcaccgaaaaaacttaaaggtaaagaagtcttatttgcttggagtccattcattatcttaactgtcattgttatgatttggagtgcaccttcatttaaagcattatttgcaccaaaaggtaaattatctgctttagttgcaaactttgacttacctggtactttcagtaatatttcacacaaaccaattactttatcattaaacttaattggtcaaacaggtacagcaattctaattacaattattattactgttttaatggctaaaaaagtcaactttggtgatgctggtcgcttatttgttgaagcatttaaagaattatggttaccaatcataacaatttgtttcatcttagcaatttcaaaaatcacaacatatggtggtttaagtaatgctatgggacaaggcatctcaaaagcaggaagcgtattcccaatattatcaccaatccttggttggatcggcgtatttatgactggttcagttgttaataacaactctttattcgcgccaattcaagcttctgtagcacaacaaattggtacaagtggttcactacttgtagcttcaaatacagcaggtggggttgcggcgaaacttatttctccacaatctattgccattgcaacagcagctgttaaagaagtaggtaaagaatctgaactacttaaaatgacattacgttatagtattggattacttgtatttatctgtatctggacatttatcttgtcattcattctgtaaatcaaaatttattgaaatgtatttttcatatacaaagcccgaaatgaagctataaagtcattcatttcgggctttcaatattttgcttttggatgtcgagagtttaggtaatcttttaaaatgatgtaattgttatataaattctcatttgaaaaataggagtgagacagttcgttttaaatgaactaagtctcactcctatttttatttaaacatagacataaataattg

SEQ ID NO: 4196 - DNA, 3737 bp, Artificial Sequence
  Description of Artificial Sequence: synthetic nucleic acid sequence
ccctagaaatgacttttaaagtaaataactctccgtttgctggacgtgaaggtgattatgtaacagctcgacaaattcaagaaagattagatcaacaacttgaaacagatgtttctttaaaagttacacctactgatcaaccagattcatgggttgttgctggtcgtggtgaactacacttgtctattcttattgaaaacatgagacgtgaaggctttgaattacaggtttctaaacctcaagttattttaagagaaatcgatggtgtgttaagtgaaccatttgagcgtgtacaatgtgaagtgccttctgaaaatgccggggcagtgattgagtcattaggtgcacgaaaaggtgaaatgttagatatgatgacgaccgacaatggtttgacgcgtttaatctttatggtacctgcacgcggtatgattggttatactactgaatttatgtctatgacacgaggttatggaattattaaccatacatttgaagaatttagacctcgcgttaaagctcaaatcggtggtagacgtaacggtgcattgatttctatggaccaaggtcaagcaacatcttatgcgattattaacttagaagatcgtggtgttaactttatggaaccaggtactgaagtatatgaaggtatgattgttggtgaacataaccgtgagaacgatttaacagtaaatattactaaagcaaagcatcaaacaaacgtacgttcagctactaaagatcaaacacaaacgatgaatcgtcctagaattttaacattagaagaagcgttacaatttatcaatgatgatgaattggtggaagtaactcctgaaagtattcgcttaagaaagaaaatacttaataaatctgcccgtgaaaaagaagcaaaaagagttaaacaattaatgcaagacgaacaataatttaaatatattacaaacatactaagattagctatgaagaaatctatgacgatagattttttcatagctattttttatagttatagagagaagtagactgtccagactcttggattttaaatccgtataaaaaacaagtcagctttactctcgccttttgaaattcgtttgtagtatgttgggttcttgaaaccgtgtataggaaaatgaaatgagaaaggttaagtaaagtttttagcttctcaattattcaaaggaggtttttttatcgattacttaggtgttgatattagtaaaagaagtagtgtagttgcacattataaaaatggaaaattccaaaaagagtttttcatccagaataataaaaatggttacaattatttactcaagtatttgaatgacttagaccacccacaactcatttttgaatctacaggtatctattcaagaggtatggaacgattttgttgtgtaaatcaaattaactatattcaaatgaatccgttagaagccaaatttaaaacgagcgctctaagatcatggaaaactgatcaggcagatgctcataagcttgcttgtttaggaccgacgcttaaacaaacagacagcttacctatacatgagttaatattctttgaattaagagaacgcgtccgttttcatctagaaatcgagaatgaacaaaatcgacttaaatttcagatccttgaattactccatcaaacattccctggtttagaaagattgtttagtagtcgatattcaatcattgcactcaacatcgcagaaatctttactcattcagacatggttcttgatatcgacaaggaggtactgattacacatatattcaattctacagataagggaatgtcaatggataaagctacaaaatatgcacttcaattaagggtgattgctcaagaaagctatcctaatgtcgatagacattcctttctagtcgaaaaattacgcttacttattcaacaattaaaacaatctattcatcatctcaaacaattagatgatgccatgattcaattagcacaacaactcgattattttgaaaatattcattcgatacctggtattggtaagctaagcacagctatgattattggggagattggtgatattaagcgatttaaatcaaataaacaactcaatgcttttgttggcattgatatcaaacgatatcaatcaggtcatacacactgtagagataccatcaacaagcgtggtaataaaaaagcgagaaaacttttattttgggtgattatgaatataataagagggcagcatcattatgacaatcatgtcgtcgattattactacaaactaagaaagcagcctaatgagaaacctcataagactgccatcattgcttgtataaatcgattattaaaaacaattcattatcttgtaatgaatcataaattgtacgattatcaaatgtcaccacattagccaaacgtacaatcaaatatagtttaacaccttattcaaaaaaattaaaatgaacggtttagttaagtaatgcttattttaattataagtacttgactaatcgtaggaaagagcctgagacataattcctagcaaaatagccagtaaatgagttttcataaattcatttactggcttctttatttacaatacttcgtattgttggctcgctttcttagaggacagcttcagcctgtagtcttcagcttgtcctgttccctcaagagtctcgccaaaatactttgtattcatatgtaattttacattaaaatactttaaaaaaataaggccctttcgtataatttaataaacatcactaaactaaattaacgaggtgccttatgtataaagattataacatgactcaacttactctaccaatggaaacttcagttcttatccccacaaatgatatttcacgacatgtaaatgatattgtagaaacaattctagagactgaattcagacatcatcgtgatgcaatatcataccatccaaaaataatgttaaaagtagttttatatgcctatacccaatctgtgttttcaggacgtagatagaaaaaatacttaatgataatattcgaatgatgtgtctatcataaaatcaaaagccttcttatataacaattaatcgattcaaaagcaaataaaaaaataatgaaaaattataattgggaatattttaaagtccaaattattaaaaagttttcagaaccaaaaacaaaaagcatctacagtcaagaaaaattgatgtggagcctgtttttggatttatgaaggctattttgggttttactcgaatgtccgttcgagggataaataaagtcaaaagagaactaggatttgtgctaatggcacttaatataagaaaagtaacagctcaacgagctgaaaataatcaaaaaaataataaaaaagacaatttctatataatttcaatagaaattgtcttttttatttatcttggaactttaagtcccacactctttatttatgtgagatagtttgaaatttccaatatatcattttaatctcgtttgctttgtttaggtgtatcgagtctacttttacaatcatcgcacatgaaagtgcgtataggattattttttaagcgtttagcctcgactgtatgttcatcaataaaaactttagtatcgcaaataatacattgaacctttctcatattaaatcacctctatatgtgtgacatacttaaattgatgagagtatccttcttcaggaatatatatgaaactatcaacagcattatcactatataaacgtttgccattactagaaaattgaa

SEQ ID NO: 4197 - DNA, 3029 bp, Artificial Sequence
  Description of Artificial Sequence: synthetic nucleic acid sequence
aagaagagtcatcataataatattcttttctatgaagttggccgtataagttatattgatggcgctcatatttcaatcctgatgtgggagaaatgaagtcctcaatttgtgcacctataacacttgaaataatgagaatgatagaatagccccaagccacatgtccttgaaagatgtgccctattgaactcatcacacttgaaaagaaaatcatcatcatacttgtgcctactgcaacatgtggtggaaatctaaagacgatgagcataagaggggtcatcaatgcacctccacctatgccaaacagtcctgttaatagcccaataaataacgttgttataaaagcaaacaggggtggtacactataacggtatgttttcccttcagcatcaacatatgtacgcgcatatttaggtttgtcaaaaattttaaaaggtttgattttgtgacgaatcatcagtaatatcgacacaaatatcataaacacgccaaagtataagttaaacgaatcaagtgtaaggtatctacttaaaaaagaaccaaccaaagatccaggtagtagtccaaatagaaatatcgaaccattttttatatctacttgtttggtttttaaatatcctaatgaggaagataatccagtaacaatcagaataactgaagaagtacctattgcaatttgcgtcgtaataccatgtagaagatgatggttaacgcctaaataaacaagtgtggggacgatgatgattccaccaccaataccaacgatagatcctaaaatcgctgataatccccctattaatattaatagaataattgttaataacatgacattcgcctcttaaaatagttttaattgttgcggtgctaaaccttcataatcaatgtctaaaatattttgatactttttagcattattagctgcatgaccgccagagttattattaaaaattacatatactttcttagccttttgattaagtatttcgactttacgagccaagtcagctaactcatcatcgctataatcatataaatatcttacatctcgccattcttgatcagtcatatcttttttagtccaaccataatgattacgtccatgataacgtacaaaagcaatttcactagtaatcctatttactaaaggaacgctcccctctttaacttgaggttcatctaccactgcatgaatgatttgatgttgtgttaagaaggataaagtttgttctttatactgattgtcaaaccatgattgatgtctaaattcaatgctcatcggaatatcagttaattgttttctcacatataagatgtaatttatattttggcgttacaatcaaaccaaggtggaaattgtacgagcaccatcgccaatttattatgctcttttaacggattgatcatttctttaaactgtttaaataatatatctctcgactctgcataatctctatagtcagcatgcaatgttaatgcttgatgaattttaacaacgaattgaaatctattcggcgtttcatttatccatttaattatatttcgctctggctgtatcgcataatacgaagcatccaactctactattgggaagtgactagcatacgtttttaacttatctgttttacgctctaaatcctcatataatgtatcatggtcaccccagccagtaagacctatttctatcatatttatcaccaacaacatgataccacattacaaatcattgattcacttgagttaagttaaatttacatattctttaatatacatatatcttatagttaaacaaaagtacatcttgtggtaagagattacttaatgcgtgaattaccgtttggttctgatggcgtatttacaccggaagcctttgttgaaagaacaaattacgatcttgcgaatgatttaggtaatctagtgaatcgtactatctctatgataaacaaatatttccacggcgaattacctgcataccaaggtccaaaacatgaattggatgaaaaaatggaagcgatggcgcttgaaactgttaaatcattcaatgataatatggaaagtttacaattttctgttgctttatcaacagtatggaaatttattagtcgtacaaacaaatatattgatgaaactcaaccttgggttcttgcaaaagatgaaaatcaacgtgagatgcttggtaatgtaatggcacatcttgtcgagaacattcgtttcgctacaatcttattacaaccattcttgacgcatgcacctagagagatatttaagcaacttaatattaacaatccggatttacatcaattagatagtctgcaacaatatggtatgttttagctatttttttacctttaatgtcttgttgtacagttttactattaattggatttgaaccattacctgttaaaaaattataacctgcttgggaatctatttttctcatcattgctgtcgcttgaatattatccatagattcgttgattaagttaacacttttaacattatgcttgcgtagaaacatgatattttcaatatttttatttatgttatctttttgatttcttgaaaaatcatttactattaatgaacctgttgaaaaatcactatgatctaaagtatcttgaatacctttaaaaacatcattcaagttagtttgtcgaatatgtttatttaaagtgacgttacctaaataggtgatacgaatgctatctttgtctctcgtatcactttttacaggttctacttgtattgatttaacagcaaatatgagtagaactaacgctactaaaagtacaattgccgtgtaaagtgtatttttccttttatgtcttttagattgtttaagcaaccactcactaggcgataaacgttttttctttgtcattagtacgcgctccttgttcgtgattaattaataaaactatataaaaataagatgatatatgtaatacatgttaataacattgttgtagaaagtgtaatgactacaccttgtttttgaattgtattcgcaataataccaggaatgacaacac

SEQ ID NO: 4198 - DNA, 3145 bp, Artificial Sequence
  Description of Artificial Sequence: synthetic nucleic acid sequence
ccaatatgtaagtctcctgttggattagctgatacatattctaataaaatgttagtattcttagattgtgttgcatatccaaatcgatcaccttttgtgatagcttctggaataatgtctgttaaatattgattatccagataaaagttgatgaaacctggcccagcaatatcaacctgtttaacgtgtgctttgcttgtatctaaatgatcgacaatagcttgcgcaatttcacgtggattacgcttagcaatttttgttaaaaccatagcaatattagaagaataatctccatttttagtatctttaggtatttcaattttaatttctggaatatcttctgcgaggttagcttttctaatactagcttctatttcttctattagcgtctgtttaacctgatcgattatattcattcgcttatctccttataatttatttcatattgataagaacccatcttttgttcatcttgatataactcataatgtattttaagtttaccgccattatgagtaacgaaatgcataaggcttagtgttttaacagttaaaggtatttttccggtaggtacatcatagagtgttgtcgtctcatgtccttcgacgaaatgtaagttcatattaatgtcgcctttacgaattaactttacaccgctatcttcaattttaatcgtaacattaactttagcatcttcaatttgttcttcgtaacgtataaaatctgcaaatttttgttgccaagaaccttttgtagtaaactcaaatctctgcttttcaccattctgtttcaaaacttgacgggtttgaatgttaatatttttattcaatttactactcaccttaacccttacaataataaatgtcattatagcataaaactgctattgcttgtagtactcaagacatgtgttcatgtcaaaaatttacacaatatgaaaagaacctgaaacattaatcttgtctcagattcttttcacatattcacaattcataactgaggtgaaagtggtgctttcctattctagatattgttgccacagagaactcacacatttaatataaatgtcacctatcacttcaatcagatttacaattattcaacatcaataatgtcaatttcatatttttttaataaaaatctatatttatcgaaatatacgatgccgaatatcattgctgcaatgatgaacattgtctttttcatcttttaacctcatattcctcaaaatatttttaaatctataatatattatagcattatcaaattgtatttctataaaatattcaaggttagagttagttttcaatcatatattttagaggaaatgcccatcttcaaatataacacgctcttttttattttgaataaagtaattaaaattattattttgaaaatcacttaaaagagctttagatgtactatagttaaacataaaatcctctgtctcaataaacatttttttaaaaagcagtccgtcttttaaagtgatttttttatatcattataatcgacttcatctactttaatatattcaaaagtgttaaaatttacatttaaaagagccaagaatttttttccaaaataataaacgtgtaatggttgtctcttattttgcccaataaggagacgacctttttcaaatgtttgttgtggaaaatttaaatctaaaaattctaaaatttcatcttcttttaatttaaatcgcataattagcccttccttttttacattcacaaatcaaaagatagtttaatttctaaatattatattatcttttatccatttgctccaataactaaaatactcatttcaaacgtcctccttcaaaaaatcgtacttagtatttaccacttcaagagaatattaaacgttagtttattattgacatatttcaatcttctcattatattaatatatgaacaaatattcatatgttggagtgtgaattttcaatgagtggatatcatattaacgttgaaagcaatcaggatacattgattaaagtcactcatattttcaaagctttaagtgattttaatcgtgtgagaataatggagtttcttgaaaacggtgaagcaagtgttggacatatttcacattctttaaatatgactcaatcaaatgtatcacatcaattgaaactacttaaaagcactcatcttgttaaatctaaaagacaagggcaatcaatgatttattctatagatgatatacacgtttcaactttacttaaacaagccattcaccacgccaaacatcctagtgaaggtggaatttctaatgacaaatcataatcatcaacatcatcattctcatgcacacggacacgttcatacagataataaaaaggtactcatgttttctttcattatcattagtctcttcatgcttgtagaaattataggtgggtttttagcaaatagtctagcattattgtctgatggttttcacatgctaagtgacgctatatccttaggagtagctctttcgatccaacatcaaatgatacttctgaaatggaagtattacagaacaaaaccactacaagtaaatattatcaaaacgcaaaacgtattttagacggattaggtggtaaagaaaacattattagtttaaatcattgtgcaacaaggcttagattggagcttaaagataattcgattatagatgagcagaaaattaaaaatgctggagctattggtataactcaaaatggacaccattatacccaagtgattattggaacacacgtacaacaagttgccaatgaaatggatcaccaaatgaattagtttgtgaaaggggtggctcgtaaggagtttgcccttttttattgaaccatgtaatatagttatatcagaattttctgaaatgaaaggggtaaggcatgaaggctatattatttgatgtagatggcgtatttttaagtgaagaacgatgttttgatgtttcagcaattactgtagctgaacttttatcgagtccagattttttaaattgtgacatagatattcattttgatggtaatttaactgaaaatgatataaacaaaatacgtagaaacgtatttaataatgaccgaatattaaatcaactaaagtcacttggtttaaattcaaattgggatatgctatttattgta

SEQ ID NO: 4199 - DNA, 3604 bp, Artificial Sequence
  Description of Artificial Sequence: synthetic nucleic acid sequence
ccactagttgcctgggatttgaatatggggggacttataaatacactcgaagcagcaagaaggtatcaattaaaatattttacgccaagttcaataggagcttttggtatttcgacacctaaagtaaatacacctcaattaacaatacaacaaccaacgactatgtatggtataaacaaagtaactggggaattattatgtcagtattattatgtcaaatttggagtagatacacgtagcgttagatttcctggtttaatttcacatgttaaagaacctggcggtggcataacagattatgcagttgatatgtattttaaggcagttagaaaaggacattatacaagttatattaatcgttacacttatatggatatgatgtacatggaagatgctattgatgcgattatcaaattaatggaagaagacagtgttaaattaaaaacaagaaatggctataacttaagtgcgatgagtattgaacctgaaatgctaaaacaagctatacaagtatactatccagatttcaccttagattatgacattgatttagagcgtcaagatattgcattaagttggccagatagtatagatacgagctgtgctcaggaagagtggggatttgatcctaaatatgatttaccaactatgactaaagtgatgttagaggcaattgagaaaaaacaaaaagaatgctgagcccataccgattttttaaagtatatagctatcttttaaaactttaataaaagatactgcatcaaaaaattggatgacaagtgaagttagaagcagtttttcgcgtaactacattacacaaattgtctgatttatatatcatctcatacagatgttttttggctcatatggtcaaattgaatgataatatatagggtaaagaaaagtctattttagttccaagtctacttttaaagaagctaattttcgatgagaacacaaatttaattacggaaaaaataggtgatgataataacataacttgtaacttaataaaggtagtgttttacttatactgtatacataataaaattaatatctattttgaatatttagaaaattcattgaatagtagaatcacgattgatataatttagtgtatctatttaattggaattatattaggaggcaacagtcatgtcagaaaaagtaaaattcgaaaaaagagagtctttaaaagaaaaacctgatacagcaaacttaggatttggacaatatttcacagactatatgttaagtgttgattatgacgctgatcaaggatggcatgatatgaagattgtgccgtacgcaccatttgaaatttcaccagcagcgcaagggttacattatggtcaggcagtttttgaaggccttaaagcctataaacataatggagaagttgtattattccgcccagatcaaaacttcaaacgtattaataattctttagcacgtttagaaatgccagaagttgatgaagaagcattattagaagggttgaagcagcttatcgacgttgaacgagattgggtacctgaaggcgaaggtcaatcgttatatattcgtccttttgtatttgctactgaaggtgttttgggtgtacgttcttcacatcaatataaattactaattattttatctccgtcaggcgcttattatggtggtgacacattaaagtcaactaaaatttatgtcgaagatgaatatgtacgtgcagtacgtggaggtgtaggtttcgctaaagttgcaggtaactatgctgccagcttactcgcacaaacaaacgctaataaattaggttatgaccaagtattgtggcttgatggtgttgaacaaaaatatgttgaagaagttggtagtatgaatattttcttcgtagaaaatggaaaagtagttacgccagcattaaacggtagtatcttgcctggtatcactagaaagtcaattattcaattagctgaagatttaggttatgaagttgaagagagaagagtttctatagaagagctgtttaacgcatatgataaaggtgaacttacagaagtatttggttcaggtacagcagctgttatctctcctgtaggtacacttcgctatgaagatagagaaattgttattaataacaatgaacctggtaaaatcactcaaaaattatatgacacatatactggtattcaaagtggcaaattagaagataaatacggatggagagtagaagttcctaagtattaaaaatagagttttcaattatttgttaactatcatctatagtatatttattatttggcagattgatttttaaatttcaatctgctttttaaaatccttttatataaaaatattttttaattaattattcatttcatatttttgttgtgtgtggtaaaatacaattgatataaaatgaatataaattaattagatttagacagagaaacttttttaacgtatgttttttctgtctttttttatttacacaactaagaataaggagagataaaatgatttatgcgggtatattagcaggtggtattggttctagaatgggaaatgttccattacccaaacaatttttatcattacaaggaaaacctattattattcatacagtagaaaaatttttaatgtataaggactttgatgaaatcatcattgccacgcctcaaaagtggatcaattatatgctcgatttgctaaacaattatcaattagacgataagaaaataaaagtaatacaaggcggagacgaccgaaatcactctataatgaatattatagaaagcattgagcaacataaaaaattaaatgatgaagatataatcgttacccatgatgcagttaggccatttctaacaaatcgaattattagagagaatgtggaatatgccagtcaatatggtgcagtagatacggttgttaatgctgttgatactatcatttcttcaaatgatgcacaatttatttctgggattccaataagaagtgagatgtatcaaggacagacgcctcaaacttttaaaataaaagagttaaaggatagctatttatcgttaactcaatctcaaaaggaaatattaactgacgcgtgtaaaatactcgtagaattgggtaagccagtaaaattagtcaaaggagagttatttaacataaaaataacaacaccatatgatttaaaagttgcgaattcaattattactggagctgttgataatgattaatcaagtatatcaattagtaagtccacgacaatttgaagcaacatttaaaactattgatttacataatcataatagcaaagttattgttcgacccttatatttgtcaatttgtgcagccgacttgagatattattgtggaaatagagatagcaaaattttatctaagaaattacctatgtcattgattcatgaaagtgtaggtgaaattgtatacgactctgaacatcgactgaaaaatggaactaaggttgttatgattcccaatacaccgtctaaatcgcataatattattgcagaaaattatttaacttctagtcattttaagtcaagtggttatgatggttttatgcaagattatatagtaatgaaacctgatagagtagtca

SEQ ID NO: 4200 - DNA, 2976 bp, Artificial Sequence
  Description of Artificial Sequence: synthetic nucleic acid sequence
gtggtacgttatactttttagcaacttctcctaatcgaatgagttggtcagcatctgtaacaccaccgcgcatttgaggaatcactgagaaagtaccatcattttgtatatttgcatgatatctttcattagcgaagcgagaatctttttcgtctcgatgttcaaaaggataaaccatatttaaataataattaattgcaggtcgacatttaggacaaccatctttatctttgaaatcaagaacgtgtcgtacttcttttgatgatttgagatttttagccctgatttgagttacaatttggtctcttgttaaatcagtacatggacaaatacctgttggttttgcagcaataaagtcgtcacctaatgtatattgtaataactcaccgatttgacctttacacttaccacatgaattacctgcttttgttgctttagtcacttcatctacagacgttaaacctttacttgtaatagcattgacgattgttcctttatcaacaccattacatccacaaatcgtttcatcatcagacatatcagcaatagatgtccccgcatcttcatcacctttatgcaataaagaaacaagtgtataatcttcaagcgtttcatgttttttcatcatattataaaatcgtgatccatcatcagtatcaccatacaagacagcaccaacgacttgaccctgacttaaatacacttttttgtagatattgtcgacactattaaaaatttccacaccatggacatcttcatcttcaacaatttgccctgcactatataaatcacaaccagatactttaagtgaagtgaaagtagtagatcctttataaccttttgtttctttaccagttaaataatctgctagcactttgccttgttcataaagtggcgccaccaatccataaactttcccatcatgttcggcacattcaccgactgcataaatatgagaatcagatgtttgcatataatcatttacaacaatacctctattgacatctaatccactatctttagcaacttcagtataaggtctgataccaacagccataactactaaatctgtttcaatcacccgaccgtcagctaatttaatagcttcaacatctttatcaccaatgatttctttagaatttgcttgaagttcaatcttcataccttgcttttctaaatccgctttaagcatttctccggctttacgatccaattgcatttccatgagccaatcagctaaatgaagaactgtcacttccattccttgatctagaagtcctctggcacactctaagcctagaagacctccaccaatgacaactgcgcgttttttcgtttgggcaatttcaatcattttatttgtatcatcaattgttcgccatccaatgacactaggaagatttgaacctggtataggtaatacaaaagcttttgatccagtagcgaaaatacaaatgtcatactctacttcaatacctttagaagtagtaactattttgttttctttatcaactttttccactggatcattatttataagttcaatattattctcttgataccaatcataaggattcataattgtatcttcgacggtcattttcttctgtaaaatattggataacataattctgttatagttcggataaggttctttcccaataatagtaatatcaaattgtgattgtgaacgttctaaaatctcttctatcgttcttaaacctgccataccattaccaatcattacaagtttttgttttgccatactttaatgccccttttatcaatataaatttttaatacaaaacacaatgtaactttataaaaggtcagaaatttaatcattttgtatttctcttttcaagttcatcttataacaaaacttcagttttttgtgatgtaattcacatttaaaattaaaatcggggatttccctaatggcatggatatggttttctaggatgaaattgaggccaaaattaaaatatattattaactattttataatatatgttgcaattgaaattacactttacgctgtcattttaaaccacaaactattttataatgagctgcattcattatagaaataatatcatcaaatattaaggggaatgttacaatgaattgtgttacattccccaaccttaacgaatcatatcatttattttttgtaaattcgtttaaaataattgaaatatattaaatatctaacgcttcaagtctttctctaataattaatcttaaaattggatcaaagttaatcgatggcgtaatgtgtaattgactatgcaatgtcatttcacctaaaagacgttttactttattcaccaatctaccatcaaataaaaataatgggacaatgactaactcgtcatattgctctgagattttatctaaatcatttttaaatgctaatgtcccatataaagctcttgcataaacaggatgatgactatcaagcgttttaacaaatgcttttaattcatcatgtgctttcgtaaaacgtccacttccatttccatgggcaattactatagttgctttggttgaaccttcactgactttttcatcagcaattctattttctactaatgttttcatatatggatgtgtaccaagaggcgcactcattttactatcaatttgtggatatcgagctttcatctctttaagtatttgtggaatatcactgatataatgcattgcactaaaaatgagtaaaggtacaatacgaaattttgtaattccttgcttaatcatcttctccattatgatttcaagattttgtgtttcactttctaaaaatgctaactcataataatattgctcatcttttaataaagttccgataaattcttctaaagcttcattctgatttccttttctcatgccgtgagcgactagaatattacctatcataattatcccacccttttgtattatcattattacgaataattaaatcacatttgt

SEQ ID NO: 4201 - DNA, 3099 bp, Artificial Sequence
  Description of Artificial Sequence: synthetic nucleic acid sequence
tcatttgatggtaaaattaacattaaaaatgattcagatgtaggcgaagggcaacctattttgcaattaatttcttcaaatcctcaaattaacgcaactatcacagagtttgatattaataaaattaaagaaggcgatgaagtaaatgtcactgtaaatagcacaggtaaaaaaggaaaaggaaaaattcttaaaatagatgaacttcctacaagctatgatacaagtgacgatagtacagcatcatcggcacaagcaggggcacaaggtgatagtgaagaaggaactgaaatgacgacatctaatcctacaattaatcagccaacaggtggtaaaagtggcgaaacatcaaaatataaagttatcattggtgatttagatatacccgtgagatcaggcttctctatggatgctaaaatccctcttaaaactaaaaagctaccaaataacgtgttaacaaaagataataacgtatttgtcgttgataaaaataataaagttcacaaacgtgaaattaaaattgaacgtaataatggtgaaatcattgtgaaaaaaggattgaaatctggcgataaagtccttaaaagtccaaaaggtaatttaaatgatggagaaaaagtagaggtgtcatcatgattgaattgagaaaaatcaatcgacactttaaaaatggaaatgaatcaaatcatattttgaaagacatagatattcatattgatgaaggtgaatttattgctatcatgggtccgtctggttcaggtaaaagtacgttaattaatatcttgggatttattgatcgtggatatgaaggagaatacttttttaacaatgagaattatcaaaaaagctcagataataagctcgcagaaattcgaaatcatactgtaggtttcgtctttcagaattttaaattgattcaaaataacactattttagaaaatgtaagtattccgctaatttataatggtttgagtaataaagcgagaaaaagcaaagttttagacggacttcatgacgtcggtctcaaaggtaaagagaatctcttaccaaataaattgtcaggagggcagcaacaacgtgtagctattgcccgggcaattattaatgaccctaagtttattattgccgatgaacctactggcgctcttgattcgaagacatctcaagatattatggagcttttcgtaaaactgaacaaagaacagaatacaactattattatggtaacgcatgatcgtgaagtggcggaaaaagctgatcgtattatccatattttggatgggcgtgtgcaagaggaagaggtgttgacacgtgaataacttttcaaatgtcatatcagttgctattcgttccattttaaaaaacaaacgacgtaatatctttacgatgattggaataattattggtattgcatcagtaattactatcatgtcgttggggaacggttttaagaagtcaacgactgagcaattcaatgatgctggtgctggtaaaaatcaagcttcaatttcttacatgacagaaaatatggaagcgcctaaaaataatccatttaagcaagaggatatgagtgttgttgaacaggttaatggtgttaagagtgctaaagtaaaagaggataaggatagcacatattcagtcaaaattacgaatacacatggcagtagtgatgctagtttaaaaaaggttgataaactgacagatgtagatgaaggaaaaggatttacgaatgatgataatgaagtgctagaaaaagtagccgttatagataaaaaaattgctaaaaaagtattcaataatcaggcaatgggtcaatctatttatataaatggagaagggtttaaagtcgtaggcgtctctgaaagctcagaagtcgatgaaagtgggatgcctattgagtcattaattcaaataccttcaaaaacatttaataaatatatgggcaatttgacacaaggtatgcctcaattattagttacagttgaaaaaggttcagataagaaagacgtaggtaaaaaggtcgaaaaagtgttgaataaaaaaggaactggcgtatctgaaggtcaatatagttatgaagataatgaagcggtgatgaaaacgataggttcagtcttagacacgattacttactttgtcgcagctgttgcgggaatatcactctttattgcaggtattggtgtgatgaatgtcatgtatatttcagtcactgaacgaacagaagagattgcaattcgtcgtgcatttggcgctaaaggtcgagatattgaaatacaattcttagtagaaagtgttgtgttatgtctcataggtggtatcatcggattaattctaggtattattattgctacattgattgatctcgtgacacctgaaatggttaagagttccgtcagtctaggttccgtcatcctagctgtaggtgtatcaacattgataggcatcattttcggttggatacctgcacgttcagcttctaaaaaagaattaattgatattattaaataatctatagcatagaatgatttatcgtaaggtactatatggtcgaaattcttgttaacacagctattagtgtttatattgttgcattatatactcaatggttaagtacacgcgataatttgaaagcatagtagttattagcctttatcacctataccccctcactgttacaagtagagggggttaatatatatgtgaatacttatttctgactatctatcaatcagttgaagaatgtaaaaaattttttcatgaattgaataaaaaatataaaaagcagtatatgtattaactaaaattatcacgatctttaattaatttataatatgaatttaaaatatggatatggaaatataaagtgtttcaacattatatgcgtaattaattattagaaaatattgatgtagattaaatttttatagaagagtatttataattatttgcaggaaaaataaaaaggttaatgtagttagcttactatcagcgcacgaatagtggttgatcaatagaaaaaattatagatgcaaagtaaaccatccgtttgtacgggtggttttgattttgtaaggtaaaaactcattattgcaggatata

SEQ ID NO: 4202 - DNA, 3254 bp, Artificial Sequence
  Description of Artificial Sequence: synthetic nucleic acid sequence
ctctattctctatgacatggttaaacgtgtcggtggaaataaggtcgatgttcatagcatcgttccagtaggacaagatccacatgaatatgaggttaaacctaaagatattaaagcattaacagatgctgacgttgtattttataatggtttaaacctagaaactggaaatggttggtttgaaaaagcacttgaccaagcaggaaaatcaacaaaagataaaaatgtgatagcagcatcaaataatgttaaaccaatatacttaaatggtgaggaaggtaacaaaaacaaacaagatccacatgcatggttaagtttagagaatggaattaaatacgtaaaaacaatacaaaaatcactagaacatcatgataaaaaagataagtctacatatgaaaaacaagggaatgcatatatatcaaaattagaagaacttaataaagatagtaaaaataaatttgatgacatacccaaaaatcaacgtgccatgatgacaagtgaaggtgcatttaaatattttgctcaacaattcgatgttaaaccaggttatatttgggagataaacacagaaaaacaaggtacacctggtcaaatgaaacaagccattaaatttgttaaagataatcatttaaaacatttattagtcgaaacaagcgtagataaaaaagctatgcaaagtttatcagaagaaactaagaaagatatttatggtgaagtatttaccgactctataggtaaggaaggtactaaaggtgactcatactataaaatgatgaaatctaatattgatacaatacatggtagtatgaaataacatggtaaaaatagccctaaatgatatgttaataagaccggattcgttttgaattcggtcgctaatggcaacgaagactttagttgaagcaacttattataagccaactttcaactcagtcatcgtctgccattatattgaaaaattttgagcagaggattactcctttatactcatcatactatataactagtagtcccatatcgtgtggttttatattaccctcctataatataaacaacatcttttacacacgatatggtggtattagttagctgtgcattatcataataaactgaagccccaccctctccgtaaatggtgctttaaataatgatgatgtaccaatacattacttcatatttttgagcgataaatgtgaataatgtatatacaatgaatatctaattacttgtgtcattatatagtaattagtatttataagttctattcaatttttgaatagttactaaagccacaaataatcactcagttatctccgtggtatccattatcctccccatggagaggttagttgcactaatcagttgatattagtgcaactttttcattttaaataaaattttaaactacatgaatacgatctatacaaatatgtttaaccgagcaatatattctaaacaaccatttcctttaaaatgagaaaagcttccaaatcaactttagtttaagaagtcatttggaagctttgcttatatattattttttattcattatgtcatactatctacaattaccatttcatcataattaatggattctcttaattttaatgcagtaccttctgttatctcatcattttcaattagttctcttagaatacgacgttgttctcttaaagcatttaatttaattttggtaagtgtatcttcatgtctggaattaaagaaattgtttggtgttaagttatctattctcatcagatatccatcgcaaatcatacctacttctagtttattatcagtagtagcttctttggctaaacgacttacgacgttataatgaacaagcttattgattttacccaattctaataagttatcagtaacactaagagatgatgccgaattaatttttgtttttacacgacgtttcaatagcattcctcttaaaccaacaataattcgtcttaataacgaagcttgtttatacacttctgttcgttcagcgtaacgcatatagttttcaagaacactctcagtaatttcgccatcatcaaccaatttctctagcgtttttgtttctacgttaaatgcaatcttttgaagtcgttctagttctttggagttttcatcttccttttcaaccgtttttaaaaatgtgagtttatcgtggtaatctttaatgacgtttccataacggtaactcgtttcaaacgtcgatttttgatttaggtaatcgataacatgttctaaaatgtagattctcgcctctttaaatgacatattacctatcttcacttcagggctatcaggcgttactaaaggcagaatgacttgtgcaataattaaacttaatattaccattccggaagcaataaataataaatcatttcgataagcaaatgtttcatgatttgctaataaatatggcaaggttaaggcgattgcgagtgaaatggttccatgtacaccacatagagtcatgattagtgcatataagctacgcttaggtttactctcagtaactttatcttcatcatttttagaaatcattttttggaatggactctctccaaataaggtaacataactctgcaatctgtcgattatcactcgttttcgcttttctaatcacatttgactccccttttagatattgatagctaaagtttatactcaatttctaaataaaaaataaatacgacataatgttgacatcttaaaattaaacaatcactataaattgaaaccttcactttatatcataacatcttctttaatacttttactttgataaactaaataattatctgtaaaaataaagataagactaaaaactaaaataaccatacggaggtagacataatgaaagttaacaaaacaatttatattatagttgcattgattttaggtggtctgggcgtgcataaattttatgccgaccaagttggacaaggtattctacatctcgtctttttctggactggcattccaagtgttgtcgcaatcattcatgctatcattgttatttttactaaaaaagcagatgaatacggctacataacttttgataaaaaataacatctaaaaatatttcttcatattttccaaaaaaacaaattttacttttagctcctacaaaaactgggtataaaatatcaaacaaaatataaggggagttaacatgcagaatattattaagagagttattagaattttagtttccggttatattgtcaaaatgatacgaaaccttt

SEQ ID NO: 4203 - DNA, 4089 bp, Artificial Sequence
  Description of Artificial Sequence: synthetic nucleic acid sequence
ataaagtgagtggtcactcattttatcggtgtgaggaggaacaatttatgatagaggtaaaaaatgtaagtaaatcctttggtaaacaacaagtggtagatgatatatctatatcatttaatgctggtgaggttgtgggtctaatcggtccttcaggtactggaaaaacgacattaatacagtgcattttaggcatggagaaaattgatggtgggcaagtcactattcaagaacatacaatgccgaatagaaagatattatcaaatattggttatatggctcaaaatgatgctttatataatgatttaactggacgtgaaaatttaacgtttttcgcaagaatttatatgcgtgataaagaagatattaaaaaacgtgtgaacctatgcagttccatggttcaattagacaatgatttagataagaaagttgaaatgtattctggtggaatgaaacgacgcttatctttagctattagctttttacaaaatcctaatatccttatattagacgaacctacagttggcattgatcctaaattgcgtcagacgatttggaaggatttaactaaagcaaaggctgaagataaatgcattatagtgacaacgcatgtattagatgaagctacacgctgtgataagctcgtattaatgaatcaaggaaagatattggcaacgggtacaccagatgaagtgaaaaaacaatatcacacagatacgattgaaggcgtatttctgaatatggagggataaaatgaattcgttgcacatagcaggacgtattttcaaacagacgattcgagatgtaagaacattggcactgttacttattgcacctatattactattgtcgctactatattacatttttacagttgccgataatacgaatggcgtaacagttggggttcacgatgtaccagattcattaatgactgaattacatgataaagatattcacgttaaacattataaaaatgacaatgatataagtgataaaattaaagacgacaaattaacaggatttttgcacagtgatggtcaaaaagtatcagtgacttatgctaacgataatcctacacaagcaggagaactaacaggtgcaaatcaaaaatggttaatgagtcataacatgaatgccatgaaagataatactaataaattgcatcaagcgttaactaaaatacaacaaaaaatgcccggggatgggggagacacgcctcatcaagatatggctaaaccatataaactaacaacgcactatttatatggttcatcagattctacgtattttgatatgataaatcctattttaattggattttttgtctttttctttacgtttttaatttctggcattggcttattaaaagagcgtacttctggcacattagaacgtttacttgcctctccaataaaaagaagtgaaattatttttggttatgttttcggttatggtagttttagcgttatccaaacaatagttgtcgtattatatgcaatttatattctgcatatagacttagtaggttcgatatggttcgtactattaacggcaatattaacagcgcttgtcgctgtgacattcggtatattattatctacctttgcttcctcagaattccaaatgattcaatttataccattagtcatagtgccacaagtactatttgcaggcattataccaattgaatcaatgaataaaggattacaatacttttcacatatcatgccgttattctataccggccaaacgatgcaaaatattatgatcaagggttatggattcaacgatatttacatttatttaattgtgttattcgcatttttcattttcttattgattttaaatattataggcatgaaaagatatagaaaagtttaggaggtcaatatgaaccaagatattaagtcattagttgaaaccattgtgcctcaacttgaatatttaagcgataaacaaagacgtgtcatagaaagtgctattgcattattcagtgaacaaggatttgataaaacgagtactaaagaaattgcgcagcgtgcaaatgtcgcagaaggaacggtatttaagcagtttaaaagtaaaagaatgttattatacgcaggattaattccaattttaagagatcatatcgcacctgtagctgttaaacaatttacagatgaattaaacgaagtaacccattttgatgcatttataaatttatttgtagaaaatagatctaaatttatttatgacaatagacgtattcttaaagtcatcttaaatgaagctattactaatgaagattttcaaaatatattagttaatattttcacccataaattaacgagtaaattaaaagataaaattgaatggtttatcgataatggtgacatgcgcaatgttaaacctgagttttttatacgtacggtcgtcgcacaaattttaaatttaaatatcccaataatagttaataatgactatactaagggtgaaaactatcagcagtttgcgttattcgtaaaagagggcttatataggatgtttaagcgagaatagacatcatgcaaaatatgaaataagagagtaagggacataatttctagagccaagaactttatgtcacagactcttaaaaattgtgaattaatgttactcatttggaaattatttacaaagatgaatttgaggacttaatgaatggcaaagattagggattatgttacagaatatgcaaaaaaagtagttaatggcgatattatagctagtaaaaaaaacgtgaaagcctgtcaacgccatttagatgacttgaacgattcggaactcccttatcattttgatgtaaagaaagctaatcacattattaagtttcttgaaatgttgccagatcctaaaactggtaaacaattatcgttaggcggttttcaaaaattcattgctggtagcttaaatggttggtacgacagacatgggtacaaaagatttacaaaagcctatatatcaatgagcagaaaaaatggtaaaacattattgatctctggaatggcattgtacgatttattgatgggtaaagatccgttgaatgaacggttgattggtttgagcgccaattcaagagaccaagctggtatagcatacgatatgacattggcacaactgaaagctattagaagcgtttctcctaaggttaaatcgatgactaagataacgccaagtgcaaaagaaatattgaatattaatgatcgaagtaaagttaaagccgtttcaaatgaagctgcaaatttagaaggtcatcagtttagctacgcaatcatcgatgaatatcatgaagctaaagataaaaagatttatgaaacgttaagacgtgggcaagtgctactgcacaaccctatattaattattatctcaacagctggaactaatttgaatggtccgatgtatgaagaatatttatatattgataagatacttgacggcatagcaaaaaatgaaaactactttgttttctgtgctgaacaagatgatgagaaagaagtatatgacgttaaaacttggattaaatccaatccacttatggagttgccagaaatggcacaattgttaactaagaatattcaaccagaagttaaaactgcaattgatagtggttcaggattaaatgggatattaataaagaatttcaatatgtggcgtgcagcaagcacagaatcttatttagatttcaatgattggaagaaaaatgaaatagactttgatataaatggctctaaaacttatatcggtttagacttatcgcgtgctgacgacttaaccgcagtatcgtttgttcatcttgatgaagataatcaagagtattatgtaactagtcattcgtttgtggctactaaaggtggattagatggcaagattgatagagactttattgattacagacaacttgcagaaagtggttattgtacgattaccgatttacaaagtggaattatcaatactgaccaagttttaaattacattgagaattatatcgaccaatataaattagacgtacaagcgttatgttatgatccttactcaatacatggtgttattgcagaaattgagcgt

SEQ ID NO: 4204 - DNA, 3399 bp, Artificial Sequence
  Description of Artificial Sequence: synthetic nucleic acid sequence
aaataagaataatgagtagtgtaacaccacctaatattaaattcttagtatcgccatagtttttcgctccttcaccacctgccaagtaattcattgcaactggcattaaattgattccaataattgtcacaacacttcctgttacaacaggtggaaagaatttaactaaataagagaaaaaaggtgcaattaaaacaactaagataccggatattaaaagcgaaccatataaaacatcaagtcctttcgtttgaccgatgagtatcataggtgcaacggcagtaaacgtacatcctagtacaatcggtaatccagtccctgtgactttatttgcttgaagaaatgtcgctaccccgcacataaatatatcaacagtaactagataagcaatttcttcagctgaaaattttaagcttgtccccacaataataggaacaagaatagcccctgcatacatcgctaacaaatgttgcacacttaatatgaaatttttcattacgcttcacctaaaagagttaccttattgctcaaaagcgataaggggtatttctattttacgtaataaatttagaaaaaaagtattttcaaagcgctctggagctacatataaaaactgaatggcaccacgctttatttgctcttcaatctctttttgttgtttatgagtcaaactactattcaaatatgcagcttgaattcccattgcttgtagttgatcaacttggtctttcatcaaagaaataagtggacttataacaatagttgtgccaccctgcattaaacctggtacttgatagcatatcgatttaccgccaccggtaggtagtacccccagtgtatgctgatgatttaatattttagttataatttcttcttgtcctggtcgaaatgacttataaccaaaataatgcgataaagtctcttgcatgattacattccccttattgttctttaatttcctcaagctcactccatctcgtgatgtctgcttcataggttgcttcaagttgctctttttcctcattaagttctttgattcttgcataattatcacttgcattaatcatttcttgttcaaggtcttctaaacgcgtttcagtcatttctatacgcgtcataattgtttcgtattctaacttctctttataagatagtcctgttttcttttttggttgatgcttatgtttattttgttgttcagtttgtttagatagcatggcttggcgttcatgttcctttttaaaagattcataatcttcaaatgatccaataattttttcgattttaccatcatgaataaaccaatattcttgtaccactttatttaagaaataacgatcatgactgaccgtaatgacagaaccaccgaaatcatcaatgtaatcttctaaaatcgtaagtgtttcagtatctaaatcattagtcggttcatctaaaaggagtacattaggtttatgaacaagtaaacgcaataaatacagacgtttttgttctccacctgagagtttataaacttttttaccgtgtgtagcgctcggaaataaaaatctttctaacaattgtgtaactgaaattgaggtaccatctttttctttagccatttcactttcttctcttaggtagtcaatcactctaatatcacggtcaagtgtcttttctgtttgcttaaaataagctaccttaacagtctgaccgattttaagctcaccctcatagtcctgatcttcattacttaaaatattaagtaatgttgtttttcccgctccattaggtcctacaatacctatacgtctaccactttgaataatttcagtgacatcttcaaataaaactttattattaattgattttgataaattctttaattcatatacttgtttacctaaccttgaatatgcaagattaagttcacccttatcttgtgtatgttgcgtcttaacgtctgattctagttgattaaatctattgatacgtgcctgttgtttagtagttcttgcctttgctcctgctcgcatccatgctaactcttgtttatacaatgctttttgtttttcttgttgtttttgttctactaattcattttctgcacgcattactatgtaatcttcataattacctggatatgtttttaacttccctctatccagttcaataattcgcgtcgatacataacaatgttattaaatatactacaaactaaattgaccatcacttaactaggtgctctgttaaacttttgttataaattaaagatagaagcaacctattcatataaagtggtatctcttgacaattttactcgtttataagatgttataattatgtagtgtataaggaggcatacaagatgactgaagaattcaatgaatcaatgattaatgatattaaagaaggtgacaaagtcactgttgaagttcaacaagtagaggataaacaagttgttgtgcatattaatggtggcaaatttaatggaattattcctattagccagctttcaacacatcatatcgaaaaccctagtgaagttgtaaaagtcggtgatgaagtcgaagcatatgtcactaaaatcgagttcgacgaagaaaatgatactggggcatacattttatcaaaaagacaacttgaaactgaaaaatcttatgaatatttacaagaaaaactagataacgatgaagtgattgaagctgaagttactgaagtagttaaaggtggtttagtcgttgacgttggtcaaagagggtttgtacctgcttctctaatttcaactgatttcattgaagatttttctgtattcgatggtcaaacaatccgtattaaagtggaagaacttgatcctgaaaacaatagagtcattttaagccgtaaagctgtggaacagttagaaaacgacgctaaaaaagcttcaatattagattctttaaatgaaggcgatgttattgatggtaaagttgctcgattaactaactttggtgctttcattgatattggtggcgtagatggtttagttcacgtttctgaattatctcatgaacatgttcaaacaccagaagaagttgtgtcagtaggtgaagcagtcaaagttaaagttaaatctgtagaaaaagattctgaacgtatttctttatctattaaagacactttaccaacaccatttgaaaacattaaagggaaatttcacgaagatgatgttattgaaggtactgtagtacgtttggcgaactttggcgcattcgtagaaattgctccatccgtccaaggtttagtgcatatttctgaaatcgatcataaacatatcggttctcctaacgaagtattagaacctggacaacaagttaatgtaaaaatattaggtatcgatgaagataatgaaagaatttcattatcaatcaaagcaacgtt

SEQ ID NO: 4205 - DNA, 4218 bp, Artificial Sequence
  Description of Artificial Sequence: synthetic nucleic acid sequence
tcccaattattttagccattatttcagctatatctatattaactacaattgctattttatttacacttttaaccgagacgattacgtttttcacacgagtgccattatctaaattctttttatctggtacttggaacccaactggttcatcaccagaatttggaatttgggcactcatcatcggcacattgaaaattactgttattgctacaatcgtagcagttccgattggtttaggagcagctatctaccttaatgaatatgcatctgatcgttcacgtagaatcattaaaccaatattagaaattttggctgggattcctacaattgtatttggcttctttgctttgacatttgttacacctatattgagaaatctaattcctaacttgggagagtttaattcaatcagtcccggtattgttgtgggtataatgattgtccctatgattacaagtatgagtgaagatgcaatgtcatctgtacctgataaaattcgtgaaggtgcatttggattaggcgcaactaaatttgaagtcgctacaaaagttgtattaccagctgcgacttctggcgttgttgcttcaattgtattaggtatatcaagagcaataggtgaaacaatgatcgtttctttagctgctggtagttcaccaacatcatctctaagtttaactagttcaattcaaacgatgacaggatatattgttgaaattgctacaggtgatgcagcatttggttctgatatttactacagtatttacgctgtaggttttacacttttcattttcactttaattatgaatttattatcacaatggatctctaaacgattcagagaggagtattaatatgtctacacattcaaatactgctaacaaaacattgattgataaagatgccgtagaaaaaaaaatttcttctcgtgataggaaaaactcggtaaacaaatggttatttttattatgtacattaattgggctcattgttttagtagcactattaattcaaactttcgttaaaggggcgggacatctaactcccgaatttttcactaatttttcatcttcaacaccagcagatgctggtattaaaggggctttagtaggttctatttggttaatcttaagtattattccaattagtatcattttaggaataggtacagcaatttatttagaagaatacgcaagagacaatatttttacacaaatcgtaaaggtgagtatatctaatttagctggtgttccttcaattgttttcggtttactaggttatacattatttgtaggcgcggcaggtttaggtaatagcgtgctagccgctgcgcttacaatgtcactactaatcttgcctgttattatcgttgctagtcaggaagctatcagagcagttcctagttcagtcagagaagcatcatatggtcttggtgctaataaatggcaaacaattagaagagttgttttacctgcagcattacctggtattttaacaggtttcattttatctttatcacgcgcattaggagaaacagcaccacttgtaatgataggtatacctacgatacttttagcaacaccaagtggattactcgaccaatttctctgcgttaccaactcaaatttatacatgggcaaaaatgcctcaagcagaattccaaaacgttgcatcagcaggtattatcgttctactcgttatcttattattgatgaacactgtagcgatacttcttcgtaataaatttagtaaaaaattctaatcaaaattataagggaaatgcatttttataaataaacgttattgacctataacatcacatctaggtctcaatatataaaggagtttttaattatggctaattcacaagtagcagaaaaagagaaactagacgcacaaacaaataatcaagactcagttgccacaatagtaactactgaaaacaataagaaaaatacaattccagacagtgaaaagaagattgtttattcaactcaaaatctagatttatggtatggagaaaatcatgcgttacaaaacattaatttagatatattggaaaataatgtaactgcaataatcggaccttctggatgtggtaaatctacatacatcaaagctttaaatagaatggtcgaattagttccatctgtgaaaactgcaggtaaaattttgtatcgtgaccaaaatatatttgatgcaaagtattctaaagaaaagctacgtactaacgttggaatggtctttcaacaacctaacccattccctaagtcaatttatgataatattacttatggccctaagactcacggtattaaaaacaaaaaaattctagatgaaatcgtagaaaaatcattacgtggcgctgcaatatgggatgaattaaaagatagattgcatacaaatgcttatggattatcaggtggacaacaacaacgtgtttgtatagctagatgtttagcaattgaaccagatgtcattttaatggatgaacctacatcagcattagatcctatttctacgttaagagttgaagaacttgtacaagaattaaaagaaaattactcaattatcatggttacgcacaacatgcaacaagctgcgcgtgtttcagataaaactgctttcttcttaaatggatatgtcaatgaatatgatgatactgataaaatcttttcaaatcctgccgacaaacaaactgaagattatatatctggtcgttttggataagatgcaatggcaattattagacaaaaatatgaaggtcagctagatggattaattaaagatttacggcgtcttggtcttcgtgtatattttaatattaacaatgcactagtatctttaggggaagaaaagaaatcattcgcaagacaaaccattgagaaagacaaagaaattaaccatttagatcatgaaattaacgagaaggtaatcatgctaattacgagacaacaacctattgccaaagatttacgtatgatgatggcagcactcaaaatctctactgactttgaacgaatgggggataatgctgctagtatcgctcatatacgtttaagagttaaaataaatgataactatgtgtttacacgtttaaaaaccatgggtaaattagcgatgctcatgttagaagatttaaataacgctattagaaataaagatttaccactgataaaagaagtcattgagagagatgaagatattgatgatttatacgttaacatcgtcaataccagttacttaattgataatgacccattcgtagctggtcaagcacacttagcagctagacacttagaacgaataggtgatcatataagcaatattgctgaaagtgtttattattatttaacaggccaacattttgaaacttttgattaaattatcaaatcctattgtatatctataatgagcaaccccacctgaattttatgccacaatttcaggtggggtttgatatttttctttaactttttatgaattttcttttatttgatatgttaatacttctaattcatctactaaatttgaaatatagttaattgtctcttttaaaggggcgtcagtcgtaatatcaacgccagctatttgcgccaattcaattggagattgactaccaccagcttgtagcgtttttaaccagcgatcaacagcaggttgaccttctttcttgatacattgtgatacaactgtaccaattgtcaatccagcagagtacgtatatgagtacaatcccatataataatgtggttgtctcatccatgttaattcaaccccatctgtcatttcaacagtgtcaccgaaaaatgctttataagtgttcaacattatttcatttagcagtggggcagttaatgactctccattgtcgactcggctatacacttcacgttgataagctgcttctaaaaggtgggtaaccatattatgataataagttcgagataaaatcgaaccaataacccaacgtttaaatcgaggattattactactattaaataagtaatttgccatcaacatttcattcattgtggaaggtgcttctacaaaatacatagacgcttcagattccaacaaattttgatgattctgcgctaatgtaaaatgacctgcatgtcctaattcatgcgcaagaacgaatgtttcagccattttcccagtccatgaaataaatacatatgaatgtgtaatgtatggacttgcacaatatgctccagt

SEQ ID NO: 4206 - DNA, 3118 bp, Artificial Sequence
  Description of Artificial Sequence: synthetic nucleic acid sequence
acatgtattaacataatatatagcaaatactaagattttttgaagacaatactaaaatcgtgcagaatgtgttcaaatttagtttcgttaccttgcaaccatacttaataaataatgaacactttataaagcaaatttacgacaaagcatggtattgtacgccttatttatagtatttaaatacaataaatggtacacttcttttccttttacaatgcatgaaaatacgttacaattattataaattttaaaaattaacggagggtggctataaatggttactcaaaataaaaagatattgattattactggatcatttggtaacggtcatatgcaagtcacgcaaagtattgtcaaccaattgaatgagatgaatctcaatcatttatcagtcattcaacatgatttgtttatggaagctcatccaattatgacttctatatgtaagaaatggtatatcaatagctttaaatattttagaaatacatataaacgattttactatagtcgccctaatgagctcgataaatgtttttataaatattatggattaaataaactcatcaacttacttattaaagaaaagcctgatctcatattattaacatttccaacacctgtgatgtcagtgttgaccgaacaatttaatataaatatccctattgcgacagttatgacagattatcgcatgcataaaaattggattacaccatattcacaaagatattatgtagcaacaaaagatactaaagatgatttcattgaagctggtgttcctgcttcatatattaaagtgacgggcattcctattgctgataaatttgaagaatctattgataaagaagaatggttatcgcaacaacatttagacccttcaaaacctactatattaatgtcagcaggtgcatttggtgtttcaaaaggctttgactatatgattaataatattttagaaaaaagtccaaattcgcaagtggtcatgatttgtggacgtagtaaggaacttaaacgttcattaaaagctaagttcaaagataatccaagtgtaataatattaggatatacaaatcacatgaatgagtggatggcatcaagccaactaatgattacaaaacctggtggtatcacaatttccgaaggacttagtcgttgtattcctatgatttttttaaaccctgcacccggtcaagaacttgaaaatgcatattactttgaaagtaaaggatttggaaaaatagcagatactccaaatgaggcaattgatattgtttctgacttaacaaataacgaagagactttaaaggttatgtcatctaaaatgctagaatcaaaggtaggatattctactagaaagatttgtaaagatttattagatttaataggtcactcatctcaaccggatgaaatctatggaaaggttcctttgtatgcaagattcttcgtcaagtaattactcaagtaacagaaactttgttatgatgttggtaattctgtttctgatggaatttgcaagaggtatgtacatactaagttatataaactttttacctacagtgacctctatcgcaatagcaatcacatcatttgctttttccattcactttatcgcagatgctgcaacaaattttgtcatcggctttttacttaaaaaatttggttcaaaattagtacttacatctggattcttacttgcttttataagcttgtttttagtgatatggttcccggcatcaccattcataattattttcagtgctattatgttaggaattgctgtgagtccgatttgggttatcatgttatctagtgtagatgaaagaaatcgcggcaaacaaatgggttatgtctacttttcatggttgctaggtttattggtgggtatggttatcatgaacttgcttattaaattccatcctactcgttttgcatttttaatggccttggttgtgcttattgcctgggtactatactattttgttaatatcaacttaacaaattacaatactaaacctgtgaaagcacaattaaagcaaattgtagatgttacacaacgtcatcttattctatttccgggtatcttgttacaaggagcagctatagcagcacttgtacctattcttccaaaatatgcaacgcaagttgtgaaagtatcaaccgttgaatatacagtagcaatcattattggtggcataggctgtgctttctctatgttatttttatcaaaaatcatcgacaataatagcaaagggtttatgtatggagttatttttagtggctttatactatatacaattcttatattcgggctatctacaattacaaatatatatatagtttgggccataggactttttattgggctaatgtacggtatcctcttaccggcttggaatacctttatggctgggcatattaatcctaacgaacaggaagaaacatggggcgtgttcaacagtgttcaaggcttcggttcaatgataggcccactagtcggaggtctaattactcaatttactaataatttaaataataccttttacttttcagcgatgatttttcttgcacttgcagtattttacggatattactttattaaaacaaacagaagggttaaaccttaaaatctataaatcgtttatataaagattagttgtatatattaatgaaacgtcattcatatgcatttgaaatatgaatattcaatataaaacgtacattaatctttttgaatgattaactatacaatataattatgtttcatataaaaacgccaaatcccactgaaacacaataggatttggcgtttttagttgattaagcgctcttcacgtatttaacaataatgattctgtaaattcaatttcactttacaattttgaactttttatcctaatgtaaaagtttcaataatagtccatttgtcctcttcttcactatattgaagtaacgatagttcttcaattatttctctatggtctacccctgctaattttacttgaccatatatatcttcaaattcttgacttgttagaccttgggcaattgtaaaatgtggtacaaaaggatgttcagctgtaccgtaaaaatcttctgtattaaattgattaaataattgatc

SEQ ID NO: 4207 - DNA, 3054 bp, Artificial Sequence
  Description of Artificial Sequence: synthetic nucleic acid sequence
atattagcaatcactttaagttgttgtgccctgagaaatacttcttcatcaatatgctcactcaatgtgatcacacatgctgttgcatcttcaacgttagcaagaaatgattctctagacatgggcgttaaatcgtgttcccacatgacaacttgtcctatttttttaagttgctctacgtagtgttgtggaatttgacgtgttacgagtattttattcatatgcacacctctattaatttcaaaaacagatagatgatattttatttttctaattctgcaatagctacatttaaatctttaaatgaatacgtaggcggtatttctttagattgaatatcttcatacgtactcacaccagtttgaacatgtatcgtatcaatacctacgttaatacctgacataatgtctgtgtcatataaatcaccaaccattgcaacttctgatttttctaatccaagtatatctaaagacttagacattataattggttcaggtttaccaataaactctggctgaatgccagtagagacactgaccacactcgtaatagcaccattaccaggtaaaaaacctctctctttaggtatggatacatctggatttgtagatataaatttagctccattacgtacagctaatgttgcgattgataatttttcatatgttaccttttcatctaaaccaataactacataatcaacatgttcatcattctttattgaaagtcctgcatcagttagtgcagttttgagtccatgaccaccaatcatatatacagttgcatttggatgctgttcagagatataatccgctgttgccaatgctgaagttacaacttcatctggtttagcatcaatatgcatctcacgtaacttctcagtaacttgaacaggtgtctttgtagaattattagttacatatagatgcgggatatgattattatttaaataatctataaattgtgcggcaccgtcaatttcatctgtgcctttatacattgtcccatctaaatcgattaagtatgcctgataatgtttcactagttattcgctccttttccaaatgcggtaattggtacattttcattttctaaaaattgtcctacttcttgaataaattgcttatagtatggtagtgcatcatcaaataacggctcaattttattcatatttaaatcgatatagtgatgtgcaaactgttttctaacatcaatagttcgattgatatgtgattgtgtttcttttgaaataacattttccaattctaaaatatctattacatctttataattaccaggatctcttaaaataaacccatctataatcatattgccaatatctacagaagattcaattaacatttgaccaattcgttcaaaagcatataggttccttttattatcattgtaatcttcagtgagcttttgtaagtaagtgattttctgagttagtttatctttatctacaaaatacattcgcttgtcacctcttcatacatctaataagttaatcataccatagttttgcagtcatcatcatttgtcgttatacttaagtgtaatagttttcgcaatataaaggagcgtcagagttatgatagatatgtacttatatgatgatgaagaacaaagccaagtacagttcgtcggctttgttggtgagcatagtcgttacgacttaatgcttgtacaaacggatagacattatggtaaaactttagttttaaatatgcagacaaatcaatttggcattataggttcagatgatatagaagaagaaggttacatttctcatattttaggagtatcaaaggaagaagcggatgaaattattgaatatttaaatgaagttattcaatagaagagatatgttataaaagtccacttaaattgagatgacgctctcaacttagtggacttctattgatctatagcttgggtatgtttttctgtgtcttgaatagtaggttgaatcttaacatcatgtaatttatcaatgatatcttctttatcatctatttcttcaataaattcatttggtgacaatcgtctgactacaaaataaggacaaccaaaattacaatattctagtatataatcttgtatacttgaaaatcgtttacttatttctgcctttttattactatctttataaaatccttttaagcgtaattgatcgtaaccatagtcacctacgacataatcatatttgtctaatatatccgaatacctagctgaaaatatttcctcatcaaaacattctctatattcttctatcaattcaaaatattgttggtcgactttaatcatattttcaccttacaaaaaaatgaaatagaggcactaagtatcaaaaataccataaatcacttaccgatatcttcaatacacacatttatcaaaatataatgaaattttatgtatcacataaattatagatactcgataagcgaggcacttatgcctctatttttaatagtttttaaaaattattacttaattgagttgttcttcaccttggcgttgtttctctttagctgcttcattcacttgctcatcagcatgatatgagcttcttactaaaggtcctgcttgacaatgtttaaatcctttttccattgcaatctttctcattttaccaaattctaatggcgtataatatttctcaactttcaaatgttttcgagacggttgtaaatattgacctatagttaagatatcaacatcattagcgcgtaaatcatccatcgtttcataaatttcttccatcgtttcacctaacccaaccatcaaacttgattttgttggaatatcaggttgtaattctttagaacgacgtaaaaattgtaaagttctatcgtaagttgctcgagctcgaactcttggtgttaagcgacgaaccgtttcaatgttgtgattaagaatgtctggtctagaagccattaatgtttcaagggcttcataatcgccacccatgtcagatggtaaaatttctattgttgtaaatggatttctttctcttactttacgtactgtttctgcatacacgtttga

SEQ ID NO: 4208 - DNA, 3555 bp, Artificial Sequence
  Description of Artificial Sequence: synthetic nucleic acid sequence
cttgttaattcgataactttatctttggctttttcgctcgtaaacggtggactatgaaaatgtattgcttcaacagttacaccacgtttcattacttctattcccgctacaggagaatcaataccaccacttaacataagtaatgtcttaccacctgtaccgactggcagtccacctgcaccagcgattactttttcataaatataaatagcatccattcttacttctattttaatttcatagtcaggatttttaacattcactgttatattattattttcttttagtattgctccaccgacttgacgttgcaattcgtacgtatccaatcgaaatgacttgtcaacgcgttttacatcaaccttaaaagttgaacctttttcaaagtcatgagataactgtattgctgattgattaattttctcttcgtttttatcaatttttataactggactaattgattttataccataaactttagataagcgttgaatgatttcatttatgtctgcttcaggggataattctatgtacattctatccctctttcctttgacatgataaccacttaatggaataagcgcgcgtttcacattatctttaagttgattaacaaacatttttctattcgtacctttaagcgtaagctctccatatctaactaataaatgatcatattgcattactttaacagctccttaatttccttatatacagattcaaatgcattcataaaacttaatatatcgttttcagtcgtatgtgcccctaaagaaattcttatactaccttctatttttgactctgcaatttccattgcaagtaaaacctcattcaatttattcatcttagaagaacaagcgcttgtagttgaaaccattacgttttgtttggaaaaagcattaacaagtacctcacccttaacacctggaaatcctatatttataatatgaggtgatgcattttgaggagagttgataaatacatttttgtattctgctaaaaatgaaagtaatttatttttataattgcttaaacgtaaattaagctcttttgtttgatcaactgcattctttatagctctaaccatagagatagccattggtagattaattgtaccacttcgtagcccatattcttgcccaccaccatgtactataggttctatgttttgaatattttttaaaagtagtagtccctgacctttaagtccattaaacttatgaccacttaaactcaaactatcaatatgattaatttgcataggcactttacctaaagcctggactgcatcaacatgaaagtgtgcacgtgggtaattttttacaatatttgctatttcttcaataggttgaatttgtcccataatattattgacatacatacatgtcacaagtcctactttatctgtcattaatgattttaagtgttctgtgtccaacttaccttcttttgtcacatcaacgtattttaatttaaaacctttttccctttccaaatacctcattacttccaaaactgaaggatgttctaagactgatgtgataatctcattagcagtttcttttttcatatacgcaataccttttagcagtatattattcgattcagttgcgccacttgtaaaaatgatatcaaactgattatttaagtttaatatacgattgatttcactttttgcttttaataataattgttcagcttgaacccctgcatgatgaggactatttggattgaagtataatgtttggttcactttcacgaatgaatcaacaacatcttgatcagctttggtagtggctgcattgtctaaataaatcactgataacacttctccttcaaattttaattaaatcttgttttaataatgaattgtttcactataaattaacaaattaggatactcaagcattatactattttctcacaaaattaaaagagtatgacaatgaattttaattcactactagtagagcaataaaaaacctgagacattcattattgtctcaggtaattttgattcatgcacagtccatgactgtaaaaaaatacatttatactaatctttgactctattaattatgattaaaataagatagtaaatctcatgtagatttaactcacatttgtataatatttatacacaaattactattctttaatcacttgctcttcaatatgtttggtaataccaggttcaacactttctaatgcttcttcagctatctctatcgcacgtttatatcggttatttttaaataatcgttcagcttcatttaagcttttatcaacatgatgatggtccttacggtatctattaccatattgaataagcttttctgcgtatacagcatttacaagtacatcgttagcttcatcttcaaatgtattcatttgaataacaatttttgctactttatcctttagttgtttaacatgaattggacgttcgctaaattgttcatttacttctcttacttcattatcaatttcatttttcatgataataaaacgttctgggacgctagttaaattagaagctaataaacgtcgataaacttcttctttcttagattgcactctcaataaattatcttctgcttcagcttcatcttcgcgtaattggataagatgattttgaagtttatcttgttctttgttaatcacagatacatgatcttcaaggtactgtaaattatcttgtacttcactgtaacgtaccgcagatttagaagtttcttttaaaatatcatcataaactgagatgagactttgaatttcattttcaaattgtcttacactttgagcatctgattcattaatatagtagttttcacgaacatattcaatttcggtttgtaatgtatagttcatatctttggccttaaataagtcatcagtaatgatatctttcgtttcttcaacttcatttttggcttttacttcatattcaataagatcatacatttcatctaatttatcattaatattttcaagtttattattagcttcatctaattctaatcgactaatcattggttcaacaaaacttaattctgtcttaagactttgtattgtaccatcgactttgacatggtctaaatcatagccttcaacctttaagtctctacatccatattttaaatcttgaaactgtcctggtaattctttttgagtttctcgaattaattctggaatttcatccatataagattttaaatttttaatttgatcttctaaagcagcaatgtgattatgagcttgaacataattaccttcactttttaaattctcatattcatttaacttgggctcataattttcgatttcattttcaagtggttcagctgcttcaccaaattgatgacgattggctaatacatcacgtttcatttcacgatagtcaactttacacttttcatacaatgcttcattttctttatgtaagtttataatgtcgtccacttgagttacttgatgctgataattctcttcgtattgatccattaattcgtgagcatcatcaatttcagtttgtgctgccgtgaatttaaa

SEQ ID NO: 4209 - DNA, 3301 bp, Artificial Sequence
  Description of Artificial Sequence: synthetic nucleic acid sequence
tcattaataggtatcgcaaaagccattccttctacattatgcatatcaatttttaaagaaactatacctatgagtctaccgtctctatcgaccacagcaccacctgaatttcctgggttcacaggcgcatcaatttgaaaagctttcatcaaagcatcataattatcatttttatcaatgtccacaggtacatgacgattgagtccagacacaataccttgagaaacacttcctttaaagtctgtgcctagaggattgcctataactaaaataggttcagccaatttaatattattagaatcccccatagtcattggtttaatattttcgtcagcaactttagcttttacaactgctaaatcagaccatttatctttaccaattaccttacctgtcacagatttatcattaccatatgttactttttgtttttcttgatcaccgacaacgtgtgcattagtaaaaatataaatagagtcgcccacttttttgtagacgacacctgatcctatctcattatcagattcatttttgttatcagacacagtcgtgtcattagacaaatcattctcgacagttacaactgacttaacagagttttcagcaattttcatcgctgttgtttcatctttagctgtaccgttaaatgcactatcatttgtatgatcatttttattaactgtagtgaatatggcatttaatattaaaagtaatactataataccgataataattaacattttaggccagtgttctttaaagaaagctaccaccaattgtttaaattcattaactttttttatattttcggctctgttacgttgtttgtcttcttttttaagaaattgcgcttgttgagtattatcgttgtctttatcttttggttgtgaatagctatgttttgaagaatatggttgtgtacttcttgaatcttgctcagtatgattagaatttacgcctagcatagattcctttgaagtcaatttagtatgttgtttactttcgtttccagaatcatcatagtcttttattgacttattttgatgcggtaaagtggaggtatcacttgaaactcgcacatcatgtagactttcttctccaattttattatcgtcgtctttagatttattcatttgattattttgatttaaagttttttgtttataacttttatcatcacgttgttgatgtatttcttcttgtgtcagcttctctattcttgcttttctcaaattatctttaacacgttcctcattgactttagtttgatgttgttctcttttagcttgattttccttctctattttctcacgtcttatgcgctcttctcgctctacgttatgaaagtattcacgtcttttacgtcgatattgactgcgtggtatgacttgttttttattgttatccactagaagaccactcctatagtttctttaactcattctttatctgtaaaattcaagttattttaatactatatatcatcatcattttaaattcgtttataatctaaagtttaatattttaactataaaactgcaatgttctaataaaaattaaaataaaaagaacctccacttaaattattattaagcaaaggttctagcatatcaatcaaattatttttgattaccttttttcttgttgccaattgctgaagttaaccatcctattaaaactaagccaactaatactacccagaagattgtttgccataaagcactatgtggaaatgcttctggtaaaacgccaatatcaggatgtgcaagtaccattataacaagtttaatacctacccaacctacaattgcaaacgcagcaccttcaagtcctggatatttattcaacaattctacaaaccaagttgctgcaaatctcatcaagatgacacctatcattccaccaaggaacataacaataaattggcctaagtccataccaccaaaatgtatgccaacttttggtaatgtaacggctatggctaatgcggcaagcatcgaatcaattgcaaacgcgatatcagcgaattcaactttaaatactgttccccaaaaagatttagggcctacttctttttcgttgcctgtttcatcgaaatgatgttcgtctcctgtttctttatggtgtttttcatttgactgatggaaaaattgccataaatttttaatagacatatagattaagtaaacagcacctgctgcttgaatccaccagaagtttgcaataatacttattaaaaataaagcaataaatctaaaaatgaatgcacctaataggccataaaaaagtgcttttttacgttgtttaggtggtagatgtttaaccattaccgccattacaattgcattatcagctgctaataatccttctaaaaatacaagtactaaaagtacccataaataaggtaaaatcaaactcggatccattgtggacaactccttttagtttaaatacaaataaagagacctatgctaatttaatagcaaaggtctcacttagcaatatttttgcccactttaccggaagacttatcttcgtaatgacgacaaagtgttgaatagttattatcggtttaaatgcattcaataactattctcaagttactcccctctgacagttttgtcataggtatttatttgttattttcagttgccttaatccatcaataccacttgaaaagtctgcaaattgcttaacaaacttagcgtgtcgatcaacaccataatttaacatatcatgatacactaacacttgcccatcagtatcttttcctgcccctatacctataactggaatagtgagttgctgactaatttctcgagctaaatcactaggtatggcttctaaaaccagtactactgcaccagcagtttccatagctttagcatctttgataagttgcatagcggctgtctttgtatccccttgaagtttataccccattacacctacactttgaggtgtaagacctaagtgagaaacaacaggtatacccattttagttgctttttgaataaatgatgtaagatgagccccttctactttgacagcgttagcattcgtgttttgataaagcttaagtgcattttttagatcttcttcatcacttaaaccaacagtccctataggcatatcaacaactataaatgtatctgaagcacctcttttaacagccttaccatgatgaatcatatcgttcaatgtaacttgaacagtactatcatatcctaacactgtcattcctaaagaatctcctaccaaaatcatgtcaatttcagcttgttgtgcttgcttagcacta

SEQ ID NO: 4210 - DNA, 4019 bp, Artificial Sequence
  Description of Artificial Sequence: synthetic nucleic acid sequence
tggactaccgtcataaggcgggaagaatttgcgatcatcttccaatattttcaaatcataagctgcaatacgtccatctgttgaatacccaactgctacatctaatttattattttttaatgcatcatatactaaaccaatttgcattggacgtgcactatcaaatttaaatccataatctttaacaaaagctggatatccatcacctgcacggttcatccattgggtatccattccaagacgtagttcatctttatatttctctaaatctgatactttttctaagtgatactttttagccgtttcttttgtcaccatgaatgcgtatgtattcgcaaacccaagtgaatgataatacttttcatcatatttctttttaaataagcgttgtgtttcagacatggccttatcaggatctttagtaggtttagctgctaatacactcgtcaattcagtacctgtgtaacgtaccgctgacatatttgcatcaccacgttgtaacgcattatgttgaataatgctagaacctaggttcccaatcaacgtcggtttgatttttccatcagtttcatgttcaattaataatttttccatatgacctataatcttagtttcacttgtttcagtcgttgtgattttcacatcatcttttgcatttccatcacctaaacctggtaaactgcatccagataacacgatgagagacaatgcaatcagaatcagtgtatagttaagatacttcttcaatgtcaattcctcccatttatctagatacttttaatcctttaggtacaacccatttttcaactaatgaaagtataaagtcaataactaatgctaataaagtaacaacaatcgctgcactaataatcataggtggttgatagagatttaatccattaaatacaagatccccaagtccacctgcacctacataacttgcgagtgttgcccaactaatgacgtatacacttgatagacgaataccactaataataagtggtaaagctaaaggcatttctacatctttcattaattgaaatttagtcattcccatactttgaccagcttgaatgacatttttatcgatatttttaacacctaatactgtattatttaaaattggtaataatacatagataaataatgcaacaatagctggtgtttttcctaccccaaatattggaatcatgatagctagcacagccaaagtaggaatggtttgaagcacgccagcaactgttaataccacattagctgtgcgttgcgtttttgataataaaatacctaaagggacagctactacaatcgctaacaataatgcaaacatagaaatataaaaatgttctactgcttttgataaaagttgactaccatattcttgtaagaatgctttcattattaatcctcacctctatgttgagcatcatgataatcattcacatcttcatttatatttgttcgtgtatcagtttgattttgtggtaaatcgtgattattctcatctaagctttcatttgggatctcataactatcagaatcttcttcgccccaaattgagtcatacacaatatcgactaagtttgcacgtgtaattaaaccaatgagatgttcatcattatcgaccacagggacatttctaacattacgttttagaatagtacgcactgagtcttgtaactttgaattgatatgtactttgtagacatccctttgcatggtatcaattaattctttacgcgcacgtaatccttgattgatatcttcaatatctaaaaatcctaataatttattttgattattgactacaaaaatagtgtctactcgacgtgttctcataatatttactgcatcattcaatgaatcatctgctttaacagtgacgggtttgatcatagcactttccacagatttcatattaggacgatcctgaatcaagcgattttgcccaataaaatctctaacaaagtcatttgcaggatatcgtaaaatattgtcaggtgtatcgtattgaacgacttttcccttagacataatacatattttgtctgctaatttaatagcctcatccatatcatgagtgacaaaaataaatgtttttcctaatttttgttgtaattcctttactaaatcttgtaatgtatcgcgtgtaataggatctaatgcaccgaaaggttcatccattaatataatatcttgttcagctgctaaagcgcgcacaacaccaattcgttgttgttgccctcctgacaattcagctggataacgatccaaatattcttcaggtaaatctaccagtttaataagttctttagctttttcatctttcttctctttagaccattttaaaagtttaggtactaaaacaatattttctcgaatagtcatatgtggcatcaaaccaatttgttgaatgacataaccgatacttctccgcaattcaacaggattcatattacggacatcttttccattcatcataatctgtccatctgtcgcctcaatcatacgattaatcatgcgtagtgcagttgttttaccactaccactcgtcccaataaaagcgataaattcaccagattgaatatccaaagaaatattatctaccgcttttttattccctgaataaatcttggttaagtttttaatacttaacataattgttttccccttcctatataaagaatgtcttgttccatgacctaaaaaaagacctctgatgcaattgttaaacaaataatgactaaagttaaacaaaagacaaaggcctttgcttatatatttttacgttaaattaatagtcttaaacattaaccataaatttgctatacatgaaaacagagacagatattaatatatacccaatgagttgaaaataaacacttttcacagaatttttataattttttctatgttaaaaaaattataaattaagaaatctacggttatttatgcaaatgattcactatctatgaattaaaagtttaatttttataatattgtgaaaaatatcacattatatgtcagtgtcctcttgaaaatagagcagtttagtattatgctcaaaatgtaataagaattattacatcacattaaagactgatattcatattttgcagtcaaatttatatttaaggggtttttattatgaaagcagcagtatggtatggacaaaaggatgtacgcgttgaagatcgcgaacccaaagcaataaaagacaatgaagtgcaagttaaagtctcttgggccggtatctgtggtactgatttacatgaatatttggaaggacctatctttatttcaactgatcaaccggacccactacttggtcaaactgcacctgtgactttaggtcatgaattttcaggtgtcatagaaaatgttggtaaagacgtatcacgttttaaaaaaggggatcgtgtggtagttaatccaacagtgtctaaaagagaaaagccggaaaatgttgacttgtatgatggttattcatttataggactaggttctgatggtgcatttgccgagtttactaatgctcctgaaacaaatgtttatcatctaccagataatgtttcagcacgagaaggtgctcttgtagaaccaacagccgttgctgtccaagcagttaaagaaggcgaattattattcggtgatactgtagcagtatttggcgctgggccaattggtttgttaactattgttgcagcaaaagctgctggtgcaagtaaaatatttgtctttgacttatcagaagaacgtttagcgaaagctaaaagtgtcggtgcgactcacgtgtataactcaggtaacgtcgatccagtacaaacggtttatgaacacactgacaacggtgtagatgtgtcatttgaagttgctggtgtaggtattactttacaacaatctattgaagtaacacgtccgcgtggtactgctgtcatcgtatcaatcttcggtcatcccgtagaattcaatccattattacaaatgaataaaggtgtcaagttaacaactacaattgc

SEQ ID NO: 4211 - DNA, 3211 bp, Artificial Sequence
  Description of Artificial Sequence: synthetic nucleic acid sequence
attcaatcatgttaattgcaattatttcgtttgtcagttcggtctcaatttcaagattcatcggggaaggacgtgtcttcaatggaaatcataaaagacatcgttagtcttattgcttcgatacttattttcttaggaagtattattgcattaattagtgcaatagggattgtaaaatttcaagatgtctttctaagaagtcacgcctcaacgaaaagttctacattgtcagtattactaactgtagttggtgtactgatctattttattgtgaattcaggttttttcagtgtcagattattattatcactagtttttatcaatcttacatctccggttggaatgcatttgataagtagagcggcctaccgtaatggtgcatatatgtacaggaaagacgatgcatctagacaatctactatcttattaagccaaaaagagtttaatacgccagaagaattaaaaaaacgtgcaaaactacgagaagaaagacgagaaaaattatactataaagaaaaagaatatattaataaaatggacgattgattgtttaagcttttaaactactagcatataaaagatatatcttttatatgctagtagttttttgtatatctgaggtgaagatattaatgatataaaagctatttatttaagaatctggttaataaatgataaaattgtaaacaagaataattgtgaatgacagttgtcactaattttttcaatgaaattacacataagcattttctcgttcgaagaagcgagcttcataagttaatttaaatgttcatgtttgatttcactgataaagaaaataattgagttttgaatagtatatttgtggcatgattgagtgttaatagttatgtccttacaggaatgactctattgttattatttcacttcttcagtgttgcagtagataaccttgcaactttttattgttttgatgactaaatttgcaattaaaaattaataaagaggtgaaagtgtggagatatttgaaactctactcatatttgtcgcactagttattgtgagctcctttgtacatactttcatacctaaagtacctcttgcatttatccaaattttccttgggatgattttatacctcactcccattccagttgaattcaattttgattctgaattatttatggttacattgattgcaccactactattcgttgagggtgttaatgtttcaagagtacatttaaggaagtatatcaaacctgttatgatgatggctctaggtcttgtcataactaccgttataggcgtaggattgtttattcattggatttggcctgaattacctataggtgctgctttcgcaattgcggctatactttgtcctacagacgctgttgcggtacaagcaatcacgaaaggtaaggttttaccaaaaggttcaatgaccattcttgaaggtgaatctttacttaatgatgctgcaggtatcatttcatttaaaattgccgtaggtgtattgattactggaactttttccatttttgatgcgattcaacaatttttgattgcctctattggaggtgctattgttggtctaattataggcatggctttagtgagatttcgtttaacattaatgagacgtggcattgagaacattaacatgtttacatttatacaattgctgacgccgtttgtcacttatttgattgctgaattattccatgcatcagggattattgcagcagtagttgcgggactcgtgcatggatttgaacgtgaccgtatagctcaaacgagaacacaattacagatgagctataatcacacatggagtattttaggctacgttttaaatggttttgtgttttcaatcttaggttttttagtacctgaggtaatagtgaaaattattaaaactgaaccgcataatttattattcttaatcgtcatcacattgctagtcgctcttgcggtgtatctctttagatttgtgtgggtatatgtactttatccttatttctatttatctgtcagtccattccaaaaaatgatttctaaaaatgatgaagataaagttactgagagtaaacctaagcgtagcttatatgcactaatcatgactctatgtggtgtacatggaaccatttcactcgcaatcgccttaaccttgccatatttattagcaaatcatgaaacatttgcttatcgaaatgatttattatttattgcttccggaatggtaatattaagtttaattattgcacaagtcattctgcctttagtaacgcctgatagccctgaagtgaagataggtaatatgtcatttaaagaggcgagaatctacattttagaacatgttatcgattacctaaatcaaaaatcgacgtttgaaacgagttaccgttatggaaacgtcattaaagattaccacgataaactcacatttttaaaaacggttgaaaaggaagatgaaaactccaaagaactagaacgacttcaaaagattgcatttaacgtagaaacaaaaacgctagagaaattggttgatgatggcgaaattactgagagtgttcttgaaaactatatgcgttacgctgaacgaacagaagtgtataaacaagcttcgttattaagacgaattattgttggtttaagaggaatgctattgaaacgtcgtgtaaaaacaaaaattaattcggcatcatctcttagtgttactgataacttattagaattgggtaaaatcaataagcttgttcattataacgtcgtaagtcgtttagccaaagaagctactactgataataaactagaagtaggtatgatttgcgatggatatctgatgagaatagataacttaacaccaaacaatttctttaattccagacatgaagatacacttaccaaaattaaattaaatgctttaagagaacaacgtcgtattctaagagaactaattgaaaatgatgagataacagaaggtactgcattaaaattaagagaatccattaattatgatgaaatggtaattgtagatagtatgacataatgaataaaaaataatatataagcaaagcttccaaatgacttcttaaactaaagttgatttggaagcttttctcattttaaaggaaatggttgtttagaatatattgctcggttaaacatatttgtatagatcgtattcatgtagtttaaaattttatttaaaatgaaaaagttgcac

SEQ ID NO: 4212 - DNA, 3555 bp, Artificial Sequence
  Description of Artificial Sequence: synthetic nucleic acid sequence
ttactattaattagtactattacaatcattagttttattggtttaggcgctatcattcacaacacaatttatcaaacattaactagtaatcaaattaaaagcttagatagtgaagctcgtaattatgttaatctctttaataataataaagagaaagaaatcactaatatagctcataatgaaaaaaatatcatattaataaaagaaaaagataaagataaaattatttactcaagtggaaatattaaagatattgaccatagaattgataatgaagctaatccttcgaaattaatcaataaaaacacaaaactcggtatgcgttacacctataagaatacaatagatgataaaacaatatacataagtggaattaataatgaaattattgatttacaaaaagatttatggaaatacttgtctattgttggagtcattgtattatttacggtttatttagcaagtagaagtatcaatcgaacatatattagacctatcaatgaagtaacttatgctacatcacttctagcagatggatattaccatgttcgtgttccagaaagtaatgtgaaggaaactagggcattatttgtgactacaaatgacttagcacgacgattgcaaaaattaaacaatagtcaaaaaattcaatccaatagattaaaaactaccttagaaaatataccgagttcagtactgatgattgataaacatggagaaattgtagttgctaatcatgcttattatcaggtgtttaaccctgatcaaatggtagaaaataaaagttacattggtttcatagatgatagtattgaaaaattaattattgaaagttttagaactgaaaaagttatctatgaacaattagaagttgctattaataacgtacatactaaatatttcgatgtatcttgtatccccattttaactaaatctaaaaaaaatttacaaggtatggtggttgtgcttcatgacattactaatttgcagaaattagaaaaccttagaagggaatttgttgcaaatgtgtcacatgaactaaaaacaccgattacttcaatcaaaggttttgcagaaactctgattgaaggtgctaaaaatgatgaacaatcgcttgatatgtttttaaatattattttaaaagaatctaatagaatagagtcattggttacagacttattagatttatcacatatagaacagcaaaaagaacttgaaataaattacatgaatttatctgaattagctattaatataatagataatttgcaaacacaagcatacaataagagaatcaaaatacaatctgaaattgaaaaagatgtcatcattgaggcacatgaaaataaaatagcgcaagttattactaatttgctatcaaatgctataaattattcttcagaagataataaggtaatagtaagagtatatagaaatgacaataaagtttatttagagattcaagattatggtattggtataagtgaaacagatcaaaagcgtatatttgaacgtttctatcgtgtagataaagcgagaagtagagattcaggtggtacaggacttggtctgtctataacaaaacatattgttgaagcacataatggtagaatagacgtgaaaagtgcacctggcaaaggttcgatattcaaagttctatttaatgataattaaatttgagggcactacattgtcggtacagacaatgtggtgtcctttgttgtagtgattatttagaaatataatgttaagacttatgctattaattaaaatcaaaatacatcttgtcattgacagacataagatgagtggaaattttttaagaaacatttaacttaatatttctttagcatttataagttaaatattagtaatagctaatgcgtagtgaatactaaactcgcttactcgttatgtatttgtatatatgctaaaatatatgtaaatctgttctggaggttacgtattttgaataaattagtattaatagatggtaatagtctaagctttagagcgttttatgctctccctttactttcaaaccatgcaggtattcatacaaatgcagtttacggctttgctatgctcttagaaaaaataattaaagaagaaaaaccgaatcattttttagttgcatttgatgcaggtaaaacgactttcagacattctaagtacagtgaatataaaggtggtcgtcaaaagactccacctgaattaagtgagcaatttccatatattcgtcaacttttagatgcgtatcatattaaaagatatgaacttgataattatgaagctgatgacattataggaacattaagtagacaagctgatgaagaagattttgaaaccattatcattacaggtgatagagacttaactcaattagccactgataatgttacaatatattatacaaaaaaaggtgttaccgacgttgatcattatacacctaaatttatagcagagaaatataatggtttagtgccgaaacaaattatcgatatgaaaggtctaatgggggatacctctgacaatattcctggcgttgctggtgtcggcgaaaagacggctattaaattacttaatcaatttgagtcagtagaaggggtctatgaacatattgaggaggtcactgcaaaaaaattaaaagaaaaactcatcaatagtaaagatgatgccttaatgagtaaagatttagcaacaatcaatgttcacagtccgattgaagtatcattagaagatacaaaattaactctacaagacgacactacagaaaaaattgaactatttaaaaagctagaatttaaacaactattagcagatatagacacatcctctacgaatgaagaagtcatagataaaacttttgaaattgagcaagactttcaaaatgtagatttgaatgatttaaacgaagcggtaatacattttgaactcgaaggcactaattatcttaaagacactattctcaagtttggtttttatacaaatcatcaacatgtagtgataaatgctgaggatgtaaaggattataaacatttagttcaatggcttgaagataaaaatacaactaaaattgtctatgatgcaaaaaaaacttatgtatctgctcatcgattagggattaatatagaaaatattgaatttgatgttatgttagcaagctatattattgacccatcacgttctattgatgacgttaaatctgtggtaagtttatatggacaaaattatgtaaaagataatattacaatatttgggaaaggtaagaaacatcatatacctgaatatccctcattttaatctttttaaagatactattcaataactttttagtactttaaagcgtaattgttaaatttttctgatatttcttatatttttctatcaataactttaaaataagtttatttgctatcggaaaagggtttaattaaaatagatactacatagtaatcaatattaaatataaaagtgagggggagcttgctatgtcaaaacaggatggaaaattaactggactttttggtgcgccagtttcggatagagaaaata

SEQ ID NO: 4213 - DNA, 3767 bp, Artificial Sequence
  Description of Artificial Sequence: synthetic nucleic acid sequence
atgaatcttgttcaattagctctctaaatggtgtttttgtttcccaagattccattgctttaggttgaactttatcataagcttcttcacgtaccatgcctttattaattaatgctagtagtacgcgttgtgagaagattaaaccatacgttttatcaatattatttctcatattatcttcataaactgttagtcgatcaacaatattcgtaaatcgattaagtgcataatctagagcaattgtaacatctggtaacatgatacgttctgcagaagaatgagagatatctctttcatgccataaaggtatattctcgtatgcagtagtaatatatcctcgaatcacacgagatatacctgtaatattttcagaaccgattggatttcttttatgtggcattgctgatgatcctttttgtccttttgcaaatgcctcttcgacttctctagtttcagttttttgtaaattacgaatttctactgcaaatttttccattgatgtagcaattagtgctaatgtagcaatgtaataagcatgacgatctctttgtaatgtttgagtagaaacagctgcagtgtctattcctaaatgttcacatacgtaagcctcaatttcgggtggaatattggcaaatgttcctactgctccactcattttccctacttctatttctttacgcacttctttaaaacgcttaagattacgtttcatttcagtataccaaagagccatttttacgccaaaagttgtaggctcagcatgaactccatgtgtacgccccatcatcaatgtatattgatattttttagctttggcagctaatacatctataaatctttctaaatctttttcaaggatttcgtttgcctgtttaattacataacttaaggcagtgtcaactacatcagtggaagttaatccataatgtacccacttacgttcatcacctaaagtttcagaaacttggcgtgtaaatgcaactacatcgtgtcgtgtttcttgttcaatttctttagcgcgttcaacatttaccttggcattttcacgaattttttttacatcttctttaggaatataacctaactcactccatgcttcacacgctagaatctctacttctaaccatgcttcatagcgattttgatccgtccaaatactagacatttcatctcttgaataacgttctatcattctttgtaaactcctatcgtatgtattatagctcctacaaaaactgtacattatcacattttttataagaaaagttcgtttctaagctttcatctatagtttaacagaacttgattaaaatgtataagtgtttatctagttattactattttatttgaatcaatctagaaacacaatctggtaaaaactatagttagatgtaagataatgctttatttaatttttagtataaaatttccgattcgtttcgcctgtaaaatttctagagtaactcatttcagttgaattaccaagtgtctaaaagcaatttatataagaccggcattaacattattatcagtaatcaatgcataaaaatacctaggacaatagtgagtgtcctaggctttatcattctatagttaatcatatttattggattaaagcacctacaaatataatatcctgttttaaaatctctatactgccatctttattctctttataaactggtttctcaatacgacgtattggcataaacccttcttttttcattctgtcgagacaatctgcaattgtttctttatcttcaactctaaactttttgctcatttgagctaccacctactatttcttcgtgatctactacaacttccagttgttctggttcataagctttcagtttacgtttacgtacacccttaacccagaatcctccgtgaatatttcttggttcatacgctataataaatgccttgagatctaagttcttgacagtatccattaactttaattcatattttcttggtgttaatatttgcattaccattcgacttccatctctaccaaatgcttcgtagtgggttacaccataccctaaatttcttaattcatttggtaaatctaactcatattccgatgaagtaacattgacaactgtataacctaacgcaagtttttcctcgattttcattcctactataataccgactgagaatcctaatgcataagcaaaaatattttggatttggtctaggctagacattactaaccctaaaccaacaacataaactaagacttccataaaactaactactgctgcaacataacgataacctttcaaagtcaatatcgttctcattgttaaaaatgtgacataacatacattaattataaaaattgctaagaccattaaccatggattttgagcaattgctgacatattattcctcttttcttacttttaaatccagattattttatcagtcgccaatcattttgtcacttataaattttcatttgttatatttaggccatgaatatcgtgtataagcaagttcacgcttatgtgcatttctaacataatgtttttcgattgtttcacgagcagttgcaggaatttctttaccttctaaataatcatcaatatcatgataagatacgcctagtgcttcctcgtctggtaactgaggtttatcatcttctaaatcagctgttggcactttttcataaaggtgtttaggtgctcctagataagctagtaattgtttaccttgtcttttatttaacccaaagataggcgcaatgtccgcagcaccatctccatatttagtgtaaaatcctgtaatattttcggcagagtgatcagttcctaaaactataccttgagtattagaagcaattgaaaattgaactttcattcgttcacgtgctttttcattacccttttgaaaatcagtaagtttgatgcctgcttcactaagtgattgaacactctgatcaactgctggtttaatattaactgtatatgttgtgtcaggattaataaactcaagtgcatcttctacttcatgagcgtcttgttgcacaccataaggtaatttcactgctataaatttacagttacgtccctcttctttcaattcatttactgctaattgtgctaacttacctgttagagtagagtcttgaccacctgatattccaagaacaagagtttgtataaatgaatgtgattttacatacgctttaataaattgcttaatttcctggatttcctctacactgtcaatttgtttttttactttcatttcattaaccacaacatcttgcaatctactcattttcatcctccatctctttaacgtgttcagcaacttcaaaaatacgcttatgcttattttcccaacatttagtgcttaaatctactggataatcttgcgggttaagatatcgtttattttcttcccataaaatacttaaattatttttaagatagtcctgagcttcatattcatctggaagatggtatacaagtttgccattttcaaatatagattgatgtagattaaccgctttaaatgatttaataaacttcattttgtaagtgtgaacaggatggaacattttcaatggagattcgtcattaggattttcaccttctagcgtaatatagtcgccctcagccttgcctgttttattattaataatacgataaacattttttttgcctggtgtagtaactttctcagcattatttgataatttaatgcgatcactcattgtgccatcatctgtttcaatagaaaccaattta

SEQ ID NO: 4214 - DNA, 3816 bp, Artificial Sequence
  Description of Artificial Sequence: synthetic nucleic acid sequence
tgactttaacaatgctaaagtagatttatctttaaatgttcgtcgggtgttcttttcaacatttgatcgtagtgagttaaatgaaagttatgaaaaggtatctaaaatttacgattatcttgtaaaagaagaaagtttacttaaaactaatcttgaaaatggtaacccagaagtacatcctggaccaacattattgaacgttggacgtattgattattcagaagagttttctttatataaagaaggcataacaaaacatactgtgagattattacatgctattgagatagaacgtttaaatttagggagaaaattaggttttgaattatcgactgccaaagaatcacgtattcaaaggggttatttagaacggaaagacgaggatgaaccgttaaatcgtctttttaatactagtcctgtgttttctcaaattccaggaccgaatcacgttgaaaaccgttatttaactgaagatatcgcatatggattagtattatggtctagtttaggacgtgtcattgatgtcccgacacctaatatcgatgctgttattatgatagcttcaactattcttgaacgcgatttctttgaagagggcctcactatcgaggaattaggcttagataaattaggattagagtaatttttagcaattaaaatttaagaaaagaggttttgtttcaaatcatactgaagggagcaaaagtatgactcaaaagtatagatatcctacttttttagaatctatttctactattttagttatggttgtcgttgtagtaattggttttgttttctttaatgtcccgatacaaatattattattaatttcttcagcttatgcagcattgattgcacatagagtgggattaaaatggaaggatttagaagaggggattactcatcgattgagcacggcgatgccagctatctttattattttagctgttggaatcattgtaggaagttggatgtattctggaacagttccagcgttaatttactatggacttaaatttttaaacccaagttatttattagtatctgcatttataatcagtgcaatgacttcaatcgctacaggaacggcttggggatcggcatctacagcaggcattgcactcatatcaattgctaatcaattaggtgtgccagcaggtatggctgctggtgccattattgcaggggcggtttttggtgataaaatgtctccattatctgatactacaaatttggcagctcttgtaactaaagttaatatttttgctcacattaaatcgatgatgtggacaacaatccctgcttcaataataggattggctatatggtttattgttggattacaatataagggagacgcaaatacacaacaaattcaaaatctattaaaagaattaacaacaatttataacttgaatttttgggtatggatcccacttattatcatagttttatgtttaatatttagaatctctacagtaccgtcaatgcttatctctagtatcagtgctttagttattggaacattcgatcatcaatttaatatgaaagatggttttaaagcttcttttgatggatttaatcatacaatgctacaccagtctcatatttcagataatgctaagacgttgattgagcagggtggtatgatgagtatgactcaaatcattgtaactatattttgtggttatgcttttgctggtattgttgaaaaggcaggttgtttagacgtaattttagagacaatagctaaaggcgtaaagtcagttggaacactaatattaataactgtagtttgtagtattatgctagtatttgcagctggagttgcttcaatagttattattatggtaggcgtacttatgaaagatatgttcgaaaagatgaatgtctcaaagtcagtgttatctcgtacacttgaagattcaagtacaatggtattgccactcattccatggggcacatctggtatatattatgcacaccaacttaatgtttcagttgatcagttctttatatgggcaatcccatgttacttatgtgcattcattgcaataatttatggctttacaggtataggaattaaaaaaataagtagaaaataagtttaaatattattgtaagtggaatgtagataatagttgaaacattaacttacgatataaattgtagctatagtatcataaggcgtttcaagtttgttaatatcctttaagtacatgtaaaattagatactggtatgggccgaattggaatgaaagatatagatgaatataaagaagtggttgatttaattaataaaagagatcatttagtttttgaaggggttttcacacattttgcgagtgctgatgaacctggaagttctatgaatgaacaatatattttgttcaaagagatggttaatcaagttgagaaaccaatttatattcattgtcaaaattctgctggatcactactcatggatggtcaattttgtaatgcaataagattaggaatctctctttatggatactatccttcagaatatgttaaagataatgtgaaagttcatttaagaccgagtgcgcagttagtatcagaaaccgttcaagtcaaaacgcttaaagttggggaaactgttagttatggacgtacatttattgctgatgaagaaatgacaattgcaattttacctattgggtatgccgacggatatttaagatcgatgcaaggtgcattcgtcaatgttaacgggagtcaatgtgaagtcattggacgcatttgtatggaccaaatgatagttaaggttccttctcatgtaaaaacgggtgaaaaagtaatacttatggataatcacgttgattcaccacaatcagctgaagccgtagcaaataaacaaggtacaattaactacgaagtattatgtaatttatcaagacgtcttccaagaatatattattatgataataatgaagaggttactaacgaattgttaaaatagtatagtcactgattaggaaatttgttattataaaactaaatcgatgctaatataacaacttttggaatcagatggaggttcttttcatgttatcttttaatcaaaatagaaaccacagtcttgaacaatctttaaaagaaggttatgcacaaatggccgatttaaacctctccctagcaacagaagctttcccgatagagtgtgaagcttgtgattgcaatgaatcacatttaatatctaattcaaagaatgaatgattagaagaggagatgtttatttagcggatttatcaccagttcaagggtctgaacaagggggagtaagacctgtagttatcattcaaaatgatactggtaataaatatagtccaactgtaattgtagctgcgattactggtaggattaataaagcgaaaataccaacccacgtagaaattgaaaagaaaaagtataaattagacaaagattcagttattcttcttgaacaaattagaacactagataaaaagcgtttaaaagaaaaattaacatttttatcagagagtaaaatgatagaggttgataatgccttagatattagtttgggattaaataactttgatcatcataaatcttaaataattatatgcagtaaacataaaaaaatattgaaataaaaggcaataactttataataattaagtgtttaagtaatattaggatatttaaacacttatatagttgtcgatatgtctatttatatttgatttaagacgtatcactatagttattatgaaaatgtatttattataaaaggatgtcttgagtttttaaggctttaggttatccattccc

SEQ ID NO: 4215 - DNA, 3039 bp, Artificial Sequence
  Description of Artificial Sequence: synthetic nucleic acid sequence
cttgcagtaacaatggtaacgatattcaataataatttcattatcatgggcgttaccgttattttactcattgcaattttgttccaatttaatcttgcccatgtagcaacacttgcaagcgtaactgcacttataattatggggcaacacactggttctttctatgttgtcgcattttttagatttgtactagtgatgattggtgtattgagttcttctgttgtcaatctaatttttttacctcctaagtttgaaacaaaaatttattataattctatgaatatttcttctgatatatttgtttggtttaaacttgtactcaatgacacatcagaatttcataatattaaacaggatggtgatcaactaaactcacgcatcaataaattagaaaagattttcgactattacaatgaagaaagaccattaacaaaaaaacatatttatcaacagaatagaaaaaaaatactatttagagaagtagttagaacgaccagacaagcatatgaagtgctaaaacgaatgtcacgatatcaaaatgatttatatcaactaaataatcaattacttttacaaatcaaattagaacttgattcattagttactttacatgaacaaatatttaagagtctatcaaaaaaagctagatatgatgtcactcaattagattatgaagttgacaatcctcagaagaaaaacttgatggatgcttttcagcaagaattaattaaaaacccacatcagacgcaatattcttatagcaatatgatgcaaattattgctgaaattgaagaatacagatatcaacttgaacacttagatagaatccgtttaagtttctttacctatcaccgttctgatactgatatagacatttcaaatgaggactttgacttataataaaacggtaaatcagaattttattggattaatcagtgaaattctcctagttagcagttttgattataggtaaaatagttcttatttttaataactgccaacagtacaaaaatgcctgagacaataacagtctcaggcattttcaatgttataagtgctttataaattttgaatactataaagatgctcataagcaccacgtttattaattaattgttggtgtgtgccagtctcaacaattcgtccattttccattacaactattctatctgcatgagtaatggtagatagacgatgtgcaacaattaatgttgttctatccttacttaaaacatcaagtgcttcttgaataatagcttcactctctaaatccaatgcacttgttgcttcatctaatattaaaacaggaggattatttaaaaagatacgtgcaattgacaacctttgtttttgtccaccagataatttaactcctcgttctcctacttcagtatcatatccattcggtaaatttgaaataaaatcatgggcattcgccatttttgcagcttctacgacttcatcatcagtcgcatcaggcctacccaacaaaatattctccttaaccgtatcagaaaaaagaatattatcttgttgtactaagcctatttgattccttaaactaccagttaggaaatctttaacattatgatgatcgataagtatttcaccttgagtaacatcataaaatcttggtataagattaatcaaagtagattttccaccaccactcatacctacaaatgctacagtttcgcctttgttaattgttaaattaatatcgtgtaatacttctttttcattttcattatatttgaaactcacatgttttaaatcaatttgacccttactgattttaattggctgtgctccaatgccatttttgatgtcgtaatcctcatccattaactgaaatactctgtccatagatgcaaaactttgtgtaagtgtagtaaatgaagatactagtcttctaagtggtccaaataattgttctagataaccgacaaatgctgctagagttccgacagtaatcgatcctgtaattgccaaatatgaacccacgccaatcacaattattgggcctaaatctgtaacagtattaatagcagcaaaagaatatgcgttccatcttgtatgttggaaggctcgttgtaaaaaattcttgttatggttatcaaaatttttagcttcattgtcttcaatagcaaaacttttaataacagacattccttgaacccgctcatgtaagaaaccttgtacttctgctagagcttgtgagcgcacacgtgtaagttttcgtaatcttccaaagaaaaaataaacagttaaaatataaaatggaaaaataaaaattgcagcaaacgtcaattttacatcaaggaagaacataatagaaagtgcgataataatcgttatacagtcaagccagatattcatcaatccagtaagaataaagtcttttgtttgttcgacatcattaatcactcttgaaatgacttgaccgacttgattatttgcataaaagcgaacacttagtgcttgcaagtgattatacaattgtttacgaatatcatatagtattttattacttgtccattgagctaaatattgtctaataaactcaatcggcgggcgaacaattaagaaaataaataatgcaattcctattgctacaccaaggtgactaaatttttcttgatttgtaagcgaatgattattaatcacgccatctatagcatatttaatcaataaaggtatgagcatgggaataccgaatttaataatccctactataattgttgcaataatacgatatctataaggttttacaaactttaaatatcgttttatcatgcgccttccctcctaataatttgaaaatgaagagaggttggcacattgcatttgtatacactttaaaaataaaagatacaaatgttaatgtctcaacctctaatacacgaagacactctattagatattaagttagaaagatgaactaacaaattaccgttgttgttacacttcatttatgaatttttatagattacttttacaatataaaatattttattcttatttacatctattttgctt

SEQ ID NO: 4216 - DNA, 3598 bp, Artificial Sequence
  Description of Artificial Sequence: synthetic nucleic acid sequence
atagttgcttgttcaatttcatgagttaatgcttctttttgagcttgattgaggttatctaagtgattgactgcaaaagtttttgaatttttattgtcattcaattcacgttcaccatgaagtgcatctttagaagtttttacatttgatgttgcacgttccacctctaaaggattcatagttggattagatgtttgattgattatttgttttacacgatcaacggcattgttatatgcagtttgattaccaacagtttcattgatgtagttacttgtttgtttaacttcatgttcatcagtaatactttgacgtaaagtattcattgaatcatttaaagcttgtgctttattaattacttgatgtacttcagaacgggtttgagtttgttgaatttcttgatttaattgttctttttgagcttggtttagaccagtcatttgattaatagtattgatggactgttgttgagcttgttctagtttttgtacgccatgtaaatcatttttagcttcagtaattttatcagcaatagtgttaatattagttggagacatatttggatttgtttgttcagcaactatgtttttacctctatctgtatactcatcaaagttaacttgttgagaagtatcttcattaatataattactcgtttgttttattgcgtcattaccagttaaagcatcatctaattttttcatcgcatcattaagttgatttgctaattgaactactttttgtacttctggtctagaattagagttttgaactttagtttcaagattacctctttgcgcttgatttaagtaatttaacgcatttaatgttgcttgggcatctgtcttgtcgttagcaagtttttgatcaccatgtaaattatctttagtttgtttaacttcatttaggacactttgaatctcatcatttgccattactggtgttggttgatcattaattatatttttagctttatttacggcttgattataagcattttgttgttcagaatcttcattgaagtacttactactttgtaaaatttcattattatcagcaatagaatctctaagtgctttcattgtattatttaattgtttagcacttgcaattttttctcctacttggcttcttgttggtgcactgaaaatatgatttaaaatcgtatctttttgcccgttcgtcaagctattaaggttttgtagttgttctgaagcttcttttttatcttctgatagtttattactaccgtgtaaatcattaagtgcttgtttgatattttcaatagcttgatctatttgatttttatccatgatagtaggatgagcagttatcaaatcttttgctgcttgaattgcatgattataagcatcctgttggctggaatcttcattaatgaaatcactattttgttttactgtattgtcattgttaacaatttgttgtagttgattcatagagttatctaattgtttagagttatttacgatatcatctacctgttgtttagtttgagcttgattaattaaatcatgttgtttatctttttgtgattgtgttaatccttgcaaatgttcgatgctttgatttccgtctgacttagcctctgctaatttagattgcccatttaaattattttcagcagttttaatcgtttgagttgctctatttattacatctttattaagctctggtggttgggtagttgcaataatttgagaaccataatttaacgcagaattgtaatttgcttgaagaccactgtcagcatttacatatctactatcagccttgatttgttcttttttatttatttcagttttcagtgctttcatagcttcattaagttcttttgctttttgtaaggcttcttgaacttctggtttggttgatgcttggttaactaatgttttttcagcaagaacctgtccaggatttaatgcttgtaaattatcaatttcagcaatagcttgatttttagcctcttgaagtttttgctcaccatgtaaactttctctagcattttgcaattctaataaagcatcttcaattgtagctttatctaaagtgctacttggaacgccgttgataatgtctttagctttttgaagtgcattactatattcattttgtgccgcttcatcttcattgataaagtcgcttaattttttaacactgttttcaagagcaacttcattctcaagttgacgcatagcttcattaagtgctttagcatgatttaaatcattagaaacttcagttcttgaaggagcagagttaatctcatcatgctcgctttgtctttgagaattgtttagatttgttaaatagtttaattcattggttgcatcttgttgtgctttttgtaatttttgatcaccatgtaaatcgtttttagttaaatgaatgttttgaatggcatctgctattttattgttgtttaaaacatcatctgtagtgccgtttaatatttctcgacctttttgaatggagtcattataaatattttgaacttgcggatcttcattaatatatttactttgttgatgaacgtttgactgttcttctacgagtgtttttagtgtgcccatttcgttatttaacttattagcttgtgcaattatttctgccacttgctgtttagtttgagcatgattaattaagtcatttaatgcttgcttttgtttatcatttaaatttgttgattgatttattattaaatttgaatctgcttgattttgtgcaagtttattcgcaccgtgcaatgaatcttttgcttgaatgaccttttgagtaatagcttgaatattacttatatccatagttgggtcgttaagttgatttatgagttgttcagcttggcttacagcattatcgtacgctaactttttctcagaatcttcattgagatagttactagaatttagagtagcatccttatcggctatactttgtttaagttgttgcatagcttggtttattgcttttgcttcttctagtttctgagttactgcaggtttagttgttgttctgcctatatcttggattaattttgttatttgagctgaatttaatccgtctagattttgtatttcattctttgcaatttcctgtgcttgtcttaatttattttcaccatgaagattttgttcagcatcattaatttcttgaatggtacgattgatatcagtactacttattgttggattattttctgaattaattatttcctgaccttttgcaatagcttgttcatatgcttctttttcagagacatcttcattaatatagttactattttgtcttactaatgacgctttggctactgcaacttttaattcttccatttttccatttaagaatttagcatgacttaactgtttagcaacatttgctctacttgtttgttggttaatgatgttttccaatgcttgtttttgtggttcagttaaaccagtaaagttagtaatttgttgtttagcatctgtctttgcatcttgaagtttttgatctccatttaatccatttatagctgtatttatatcttgagttgcttgtttgattatttgaggatccatcgtcgcattgtcttcaccaa

SEQ ID NO: 4217 - DNA, 3232 bp, Artificial Sequence
  Description of Artificial Sequence: synthetic nucleic acid sequence
atggtgccgaggaccggaatcgaaccggtacggtgatctctcaccgcaggattttaagtcctgtgcgtctgccagttccgccaccccggcaatatcattaatggagcggaagacgggattcgaacccgcgacccccaccttggcaaggtggtgttctaccactgaactacttccgcgaatgcgggtgaagggagtcgaacccccacgccgtaaaggcgctagatcctaagtctagtgcgtctgccaattccgccacacccgctatttaaatggtgagccatagaggattcgaacctctgaccctctgattaaaagtcagatgctctaccaactgagctaatggctcaaaagatggtgccggccagaggacttgaacccccaacctactgattacaagtcagttgctctaccagttgagctaggccggctataaatggtggagaatgacgggttcgaaccgccgaccctctgcttgtaaggcagatgctctcccaactgagctaattctccaagatattttgcctggcaacgtcctactctagcggaacgtcagtccgactaccatcggcgctaaggagcttaacttctgtgttcggcatgggaacaggtgtgacctccttgccattgtcaccagacaaatgaatgattatacattcaaaactagatagtaagtaagattttgcgtcgcaaaacgttttttaaaaattgattaagtcttcgatcgattagtattcgtcagctccacgtgtcaccacgcttccacctcgaacctattaacctcgtcatcttcgagggatcttataaccgaagttgggaaatctcatcttgaggggggcttcatgcttagatgctttcagcacttatcccgtccatacatagctacccagctatgccgttggcacgacaactggtacaccagaggtatgtccatcccggtcctctcgtactaaggacagctcctctcaaatttcctacgcccacgacggatagggaccgaactgtctcacgacgttctgaacccagctcgcgtaccgctttaatgggcgaacagcccaacccttgggaccgactacagccccaggatgcgatgagccgacatcgaggtgccaaacctccccgtcgatgtgaactcttgggggagataagcctgttatccccggggtagcttttatccgttgagcgatggcccttccatgcggaaccaccggatcactaagtccgtctttcgaccctgctcgacttgtaggtctcgcagtcaagctcccttatgcctttacactctatgaatgatttccaaccattctgagggaacctttgagcgcctccgttaccttttaggaggcgaccgccccagtcaaactgcccgcctgacactgtctcccaccacgataagtggtgcgggttagaaagccaacacagctagggtagtatcccaccaacgcctccacgtaagctagcgctcacgtttcaaaggctcctacctatcctgtacaagctgtgccgaatttcaatatcaggctacagtaaagctccacggggtctttccgtcctgtcgcgggtaacctgcatcttcacaggtactatgatttcaccgagtctctcgttgagacagtgcccaaatcgttacgcctttcgtgcgggtcggaacttacccgacaaggaatttcgctaccttaggaccgttatagttacggccgccgtttactggggcttcgattcgtagcttcgcagaagctaaccactcctcttaaccttccagcaccgggcaggcgtcagcccctatacatcaccttacggtttagcagagacctgtgtttttgataaacagtcgcttgggcctattcactgcggctcttctgggcgtgaaccctaaagagcaccccttctcccgaagttacggggtcattttgccgagttccttaacgagagttcgctcgctcaccttagaattctcatcttgactacctgtgtcggtttgcggtacgggcacctgttatctatctagaggcttttctcggcagtgtgaaatcagcgactcgaggaaacaatttcctctccccatcacagctcagccttatgagtgccggatttgcctaacactcagccttactgcttggacgtgcactccaacagcacgcttcgcctatcctactgcgtccccccatcgattaaaacgatactaggtggtacaggaatatcaacctgttatccatcgcctacgcctgtcggcctcagcttaggacccgactaacccagagcggacgagccttcctctggaaaccttagtcaatcggtggacgggattctcacccgtctttcgctactcacaccggcattctcacttctaagcgctccacatgtccttgcgatcatgcttcgacgcccttagaacgctctcctaccattgtccaaaggacaatccacagcttcggtaatatgtttagccccggtacattttcggcgcagtgtcactcgactagtgagctattacgcactctttaaatgatggctgcttctaagccaacatcctagttgtctgggcaacgccacatccttttccacttaacatatattttgggaccttagctggtggtctgggctgtttccctttcgaacacggaccttatcacccatgttctgactcccaagttaaattaattggcattcggagtttgtctgaattcggtaacccgagaggggcccctcgtccaaacagtgctctacctccaataatcatcacttgaggctagccctaaagctatttcggagagaaccagctatctccaagttcgattggaatttctccgctaccctcagttcatccgctcacttttcaacgtaagtcggttcggtcctccattcagtgttacctgaacttcaacctgaccaagggtagatcacctggtttcgggtctacgaccaaatactcaacgccctattcagactcgctttcgctgcggctccacatttgctgcttaaccttgcatcagatcgtaactcgccggttcattctacaaaaggcacgccatcacccattaacgggctctgactacttgtaagcacacggtttcaagttctctttcactccccttccggggtacttttcacctttccctcacggtactggttcactatcggtcactagagagtatttagccttaggagatggtcctcccagattccgacggaatttcacgtgctccgtcgtactcaggatccactcaagagagaa

SEQ ID NO: 4218 - DNA, 3155 bp, Artificial Sequence
  Description of Artificial Sequence: synthetic nucleic acid sequence
cctctgcatatgtcatacgtgggaatgggccactaacgtctattccttttacatcttttacaaccttacgtaacatatcttcacccatggctatgatatcttcttgatcgacaaaactcatttcaatatcaacttgagtgaattctggttgacgatctgcacgtaagtcttcatcacggaaacatttaacaatttgataatatttatcaaaaccacttatcattaatagttgtttaaataattgtggtgattgtggcaacgcgtaaaattcaccctcgtgtacacgggaaggtactagataatctcgcgcaccctcaggtgttgattttgttaatactggtgtttcaatatcgaagaagccattattatctaagtattgacggatagaacgcgtagtttgatgtctcattttaaaagtttgcgctaattcttgtctacgtaaatctaaatatctatattttaatcgaatattttcatcaacgtttacattttcttcattaattgaaaatggaggtgtttctgatttgttaataatctcaatatttgaaacttgaacctcaacttgacctgttttgatttttgggttaatagtttcagcatcacgttttgttactacaccttcaacttcgactacatattctgagcgtactgtttcagcaacttgcaatgcttcttcggaaaagtcaggattaaaaactatttggacaataccttcacgatctcttaaatcaacaaaaattaatccacctaaatctcgtctgttatgaacccaaccttttaatgttactttttcgtttaaaaattcttctgtgactaaaccacaatacgttgttcttttattcatttttagacttcctttctacttttaaaataattaaccaattcgtctaattgtacattttctgattcgcctgaaatcatgtttttcacaccaatttcattattttcaagctcttgatctccaattactactgtatatttagcattaagacggtcagcttgtttcatttgtcctttaatttttctgtttagataatccttatctacttttattccatttcttcttaaatcattgattaacttaacagcataacgatcggcatcttctcccattgtcacaacaaataaatcaaaatcttcacttacatctaatgaaataccttcttcatcaagtgccatcaataatctttcaatacttagtgcaaacccaatacctgtttcatctggaccatctaataattgtaacaacccattatatcgaccaccaccacataatgtagtgatagctccatcatactctggattatcaatcattaattcaaaggcagtatgagtataataatctaacccacgaactaagttaggatcttcaacataagatatgttcaaattatcaagatgtaatttaacttgttcataataagatttagaatcattattgagataatctgtgatacggggtgcattttttactgcttctttatctctatcgattttacaatctaaaattctcataggattagtgtgtaatcttgattgacaatctgaacaaaatgtatcaatcacaggttcaaaatgttttactaatgcttcgttatattctttacgtgattcactatcaccaatactattgataactaactttaaatgctttaatccgaaagactcatatatatgcataaccatagcgagtatttcagcatcaatactaggattttccgctcctattgcttcgacaccaaattggttaaattggcgatatcttcctttttgtttacgttcgtatctaaacataggaccattgtagtaaagtttgataggttgattgggttcaccttgcattttgtgttcaatatatgaacgtacaacggctgcagttccttcaggacgtaatgttaaactacgatcccctttatctttaaatgtatacatttccttttgaacaacgtcagtagaatcccccacgcctcttgcaaaaagttcagtactttcaaaaattggcgttcttatttctttataattatacaattccattaatgtgtgtaatcgattttcaatgtaacgccatttagcagaatcttgcggcaagatatcttgggtacctcttggcatcttaatcataaaactctctcctttattattaaaaaagattaaaatagtcttttattttcatatgggttataaaaaattaaaaagtcccttgtatagtgcaaaactatacaagggacgattcaccgtgttgccaccctatttgattatactgataaaagcataatccactcaaaacgcttaacgtgcgctatccgacttttaattaaaagtacctcttcttgcgttcaaatttttaaattactaagtacaatcttacagccaaggattgtatttctacgcattaaatgctacctacttcatttaaaatttcaagaatcatatcggttttatttataaagttcaacaataatgataacgatttttagaataatttgcaaggtctaggacgagaaatattgttttaaaccatcaacaatagcttgttcaaccacttgtctatgtaattgatcattaatcattgattcatcagtaggattacttatatagcctaactctaacagtactgctggtatatctgtctgtctcaacacttgataattttgttgtctagaacctcgatttgtcaataatgccttcttttgaattgcagaatttaaagtttgtgcaagtgattcttgcttgtctttaaaccaataaacagtcactccattggcatttgaagaatcaagcgcatcattatgtatactaataaatgcgtcaccctttatatttctatcatctagggacacatatttatcattggaacgagtcatttttacatgagcaccttccttatttaataacttttttaattctttagcagttttaagtgtgtaatttttttcgagacttttagatggtgtactacttgaggcgccctgatcacttccaccatgaccagggtcaagtacaattgtttttccttttagagggtttgacgaaagtgattgatcagctggaatgttcaaatttgtgtgccaaccagcaacccagcctttctcagtgccagcgtgattttgaacttcaatccatttcccttttcgatctattttcttaaaactttt

SEQ ID NO: 4219 - DNA, 4046 bp, Artificial Sequence
  Description of Artificial Sequence: synthetic nucleic acid sequence
tactttgacgattgtttgctactctaatgttaaagtcgaaatctttatcaaaactaacttgatttttaaattgaactgcaccagctgttgttgtaccaggtggctgtcccaccttctactttgtagccatctacaacttcacggatacgacctaattcatcgtcagttaaatctttaacgcgagtatctgctgatacgttagcttcttctacaattttattagcagttgaagtaccaataccatatacgtatgttaatgagataacaatgcgtttttcacgtggaatatccactcctgcaatacgtgccatattaatttacacctctcttttattaaccttgtctttgtttgtgttttggattatcacaaattaccattactttacctttacgtttaatgactttgcatttttcgcatattggttttactgatggtcttactttcatttttatacctccctatattatggagtgacgattatttataacgataagtaattctaccgcgcgataaatcatacggagacatctcaacagttactttgtcgccaggtagaatacgaatgtaattcattctgattttaccacttacgtgagctaaaatctcatgaccattttctaattctactttaaacattgcgtttggtaaagtatctagtactgtaccttctaattcaattacatcttgtttagccattgattaacttccccctttttgcaatagtaaggtaatcgtcaatagacaacttaacgatacgaatctattcgtgatggtttaatataagttcaacaaaaatacgggaattaaatatcgttatttgtcactcattctgttaaatttactctaatactcactgaaacatagatcgtatagtgttgatctattataaatgatctaagatatcaatgacatcgttggttacttcgtcaatatcttttgaaccatcaatgtttttcaagacacctttgttgttgtaatattctaaaataggcttagattgtttaacattaacgctcaaacgattagatactgtttctggattgtcatcttcacgttgatataactttccaccatcgatatcacatataccatcaacctttggaggattaaatacaagatgatatgttgtaccacatttctcacagatacgacgacctgtaagacgattcattaattcttcctcaggaacttcgatattaatgacagcatcaatttctctatcaagctcagacataatttgacttaatgactcagcttgatctatagttcttgggaatccatctaacaagaatcctttttttgcatcgtcttcagaaattctttctttaacgatacctacagtaacttcatcaggaactaattctccacgatccatatatgatttagcttcttttcctaaatctgtttcatctttaatcgcttttctgaacatgtcaccagtagaaatatgtggtattgggaatttcttaacaatttcactcgcctgagtccctttacctgcaccaggtaagcccattaaaatgatattcataaatgccctcctacaaattatctaccaccaaagcctttatattctttttgagtgacttgtgcttctaaagttttcatagtttcaatagctacaccaataacgatcaaaagactcgtaccaccaatttgaattgattgtggtaagcccataaatttagtcgcaattataggtaaaatagctatagctgctaagaaaattgaaccaacaaaagtcaatctataaagtactttagtaatatatttttttgtttgttcaccaggtctaattcctgggacataactaccttgctttttaaggttatctgccattttttcaggattaacttgtacaaaagcataaaaatatgcaaatgcaataattaaaactacataaataatcattccaatattacttgatgggttggcagtatcagcaatattctgtgcccattctgctttcgggaagaataaagtcaatgttcttggtaacaagaaaaacgccatcgcaaagataactggaataacaccggcagagttaactttcaaaggtagataagttgcttgtgaacctaatcgttgagcagattgtttctttgcatattgaataggtattttacgtttagcttcaagaacaaatattgcgcctactgttagtaaaatcaaggctacaatcaatcctagtattttcagccaagcaagtgaagtatcgtcttgacctacaaacactgattgtgcaaattgttctagactcgaaggtaaagttgataatatacctgcaaagatgataagagaaataccgttaccaacaccaaactgtgtgatttggtcaccaagccaaattaagaaagctgttcccgctgttaatacaactgcaattaataaataactcataacagacttttctataataagttgtcctttgagatagttattaaattggaaagccatacctatagattggataaaagctaaaattatagcaaaataacgagttacgttattaatttttcttctacccatttcaccttgttttgcccactctgtaaatttaggaacaatatccatttgcagtaattgcatgacgatggatgcagtgatataaggcatgattcccatcgcaaatattgagaaacgtttcaaggcaccgccaccaaaagtatttaataactcagtggcaccttgagatccctgtggatgattaaaggcttcaggattaactcctggagcaggaatatacgttcctattttaaaaataactaacattgctagagtgaagaaaatcttgtttcgtacttctttagttgtaaagaaacgtacaaacgtttgaaacattagatcacctcgtgtgctccaccttttgcatcaatagcttctgctgctgaagctgagaatttatgagctttcactgttaatttcttgtctagtgaaccgttacctagtactttgataccagatttttcattcttaacaacaccagattctactaataaagctggagtaacttcagtaccatcttcaaatttattgagttggtctaagttaacaatagcatattctttacggttaatgttagtgaaaccacgtttaggcaaacgacggaataaaggtaattgtccaccttcaaatcctggtcttagtttaccacctgaacgtgctttttgacctttttgaccacggccacttgttttaccgttaccagttgcagcaccacgacctacacggttacgtacacgacgtgatccttcagctgcttttaactcatgtaatttcatttcggcacctccttaattatttttcttcttcaattgttaataaatgcttaactttgttgatttgcccacgaattgcagggttatcttcaacaactactgaactattagtctttttaagacctaaagcttcaacagttttacgttgtgtttcaggacgaccaataacactacgagtgagggtaatttgtaatttagccataacttattttccctccttaattgtataattcttctacagatttgccacgtaatttagcaacatcttctgcattttttaagttttgtaaaccgttgatagtcgcacgaaccatattaataggattatttgatcctaaagatttacttaagatatcagtaattcctgctaactctaatacggcacgaactggtccaccagcgataactcctgtaccaggtgcagctggtttcataaatacgctacctgacccatattgaccagttatagtatgaggagtcgtaccttctacacgtggaacaactactaaatcttttttagctgcttcaacagcttttttgatagcttctggtacctcttgcgctttaccagtaccgaaacctacacgaccatttttatctccaacaaccactaatgcagtgaaacggaaacgacgaccaccttttacaactttagcaacacggttaatcgtaacaacgcgttcttcaaattctttagtttcttcttctctacgagccatgaatgtgtccctcctttaattaaaattctaatccattttctcttgcag

SEQ ID NO: 4220 - DNA, 3997 bp, Artificial Sequence
  Description of Artificial Sequence: synthetic nucleic acid sequence
gaccgataatcgaacttatcacgctgattatgcttgcaattaccatcatggcataaagttgtttactgattaaaaaagctgtagaagctggagtgattagtaaagcaactacaaggataattccaactgtttgtatgctcgcaacagttacaagtgcgagtaataacatgacaaagtagtgaattaatgttgtgttcagcccgctcatacgactaaaagttgcatcaaatgttgaaatcattaaaggtctataaaagataataataagtaaaataaccagtacagtaatgacaattgttgtccaaaatgattgatgtgtaattgctaataaattgccaaataaaatgtgatataaatctgttgtactattgattaaactaataattatgacgccagatgctaggaatgcagtgaaacttattcctattgcagcatctggttttgttttactgtttgaagtaataaaaccaataaacaaacttgcaagcattcccgttacaagtgccccgataaacattggaatattaaataagaaagataaagcaacacctggtaaaacagcatgactcatggcatcacccattaaagaaagaccacgtaaaacaataatgctacccatcgttccacatacaatcccaactaaaatagatgtgattaatgcacgatttaaaaattgataactaagcaaatggttaatgaaatctaacatctaattcgtactcccttgtgaggatagtgttaaaagcgaatcatctttgtaattaatgaaagttgcatttaatcgttcagatgataatgcttcttttgttggccctaaaaactgcaacgattgatttaataataaaatgcggtcaaaatattgatctgcttttgataagtcatgatgaacaattaaaatcaatttacccatatgtcttaaatgtttaattttcttcataataagttgttcgctataaatgtcgatgccaacaaaaggttcgtctaaacaataaatatcactattactcataagtgctcttgcaacaagaacacgttgcaattgtccaccacttaattctgcaatttgtcgatggcgtatatggtcgagttctaaatcattaagtaattggttaagtttcgttttttcaactacacttgcttttttaaaccatccaatgtcttcataacatcctgatagtatcacttgatccacttttataggaaaatctaaatcaatatgagctttttgtgggatatatgtaatatatctaagttgtgtatgtatagggtgatcatataatgtatgtttaccggtcgctttaaattctccgataaatgctttgagaagagatgatttaccggcaccattaggtcctacaataccaatgatttcaccatttataggtaatgagaatgtaatatctttaagaatgtgcttttttcccaaaaataaattcaaatgattcacttcgagcaataattaaaacctcctaataaaaagtttaggttaacctaatttattttataatatactctaaagttttaacatgtcaagttaattcatggtacaataaagtgaatgtgtgaggtgaaacgatgttaactgaagaaaaagaggattatttgaaagcaattttgactaatgatggcgacgtgtcctttgtatcaaataaaaaactatcgcaatttttaaatatcaaaccaccatcagtaagtgaaatggtagggcgtttagaaaaggaaggctatgttgaaacaaaacattataaaggtgcccgtttaactgaagaagggttaaagcaaacgttagacatcataaaacgacatcgattactagaattatttttaatagaaattttacaatataattgggaagaggttcatcaagaagctgaaatacttgaacatcggatatcagatttatttgtagagcgtttagataagattttaaattttccgaaaacatgccctcatggaggcgtcattcctagaggtgatcaatataaagaaatttttactacgtcaattcttaattttgaacctggagaacgtgttactgtacgacgagttcgtgataagacagagttgttagtttacttatcaagtaaggatatttatattggaaatacagttgaaattgtatccaaagatgataccaataaggttattattcttaagaggaatgatattgtaacaattttaagctatgaaaatgcgatgaatatttttgcagaaaaataaacgataaaaagagcctaggattaatttcctaggcatttttaagatattggcatttagtgaaaggatttaaagtgtgtttgtaataagcgttttaagtcactgtctctttgttagaatgtgcttactaattcaatgtacatgatgataaaatctatttatcgtatttatagtattgtgtatttgattaataaatacacagtatagagattgaataatatccacactaaactaaagataaaggtgggtactcgagtaactttcgttaaagcactgccatcccaagaaggtttaggtcgttgaaaggtaagacgaaaaatcgtccatgaggattgtaatatttcacctaaaagtacgcctaaaataaaatggtaacttaatgtgacaatgtcgtaaatgaaccattgatggtcttgtttaaatactaaatagagtaaacttgagatgagtataatgacaatcaaaggtgatagtttacgggaagtaataaagaaataatatataaaaataaataaatatatagtaataaatatacttggatattgatagtgaatagataccaatccagttaaaaacatcaatggtggcataagatacccacctatagttgtaataaactgacctaagtatcctttagattgtgtaatcgcatagccttgttgtgaagtgacttttctttctctagggcttgtcacaatgacaagatctttggcctttccaccagcgagtttgttaaataagacgtggccaaattcgtgtgtaagtaccggtatataatttaaataaatatctaagaaagcgttaacacctttatttctataatagtggatgattacgtaaagcagtccaataactaaaataagatagatatttaattggatagttgtagtaataaaattttgtaaataaatcatgagtgaacctcgtatttctttaagttaaaatcatctttatttaattatatatgaaaagactgtggatatcctttagactttagatgtaaatgattagaaaatattttttgtttgaattttcatgtgttaaaataatttatgcattttaaacgtgttgtaaagtggggattgaatatgtatcaaaaccaaagaataaaagataaaattaacatattaggtgtaagttttgataatactacaatgctggaaatggtagaaaatattaaacaattcatatctagcaatacagatgataatttatttatagtgactgctaatcctgaaatcgtggattatgcaactgaacatgagctatatagaaatttaattaatcaagctgattatgtagttccagatggtacaggaatagtaaaagcttcaaagcgattaaaacagcccttaaaacggcgtgtgccaggaatagaacttcttgaagaatgtctgaaaatagcacatgtcagccatcagcgcgtatatctgcttggatctaaaaatgaaattgttgagtcagcagagaaaaaacttcaatctcaataccctaatatccactttgcacatcatcatggctatattcatctagaagatgaaacagtcataaaacgtataacaagttttaatcccgattacatttttgtaggaatgggatttccaaagcaagaacaatggattcaaaagcataaggacaagtttaagcacactgtgatgatgggcgtaggtgggtcgtttgaagtattcagtggctcaaagaaaagagcacctcaaatatttagaaagttaaatattgagtgggtatatcgtgtgcttattgattggaaacgcattgggag

SEQ ID NO: 4221 - DNA, 3131 bp, Artificial Sequence
  Description of Artificial Sequence: synthetic nucleic acid sequence
tcaagtgtttttaacactttaaaaaaggggctgaaatcaaatgtctttttatgattttattttaggatttatcaatgacgatacgccactaggtcatttagcacaatacatttttaatgatgcttgtttcccaaaggaagagaaaaataataattctataagaacctatgtgcttcttaattataatgatcgtcagttaatcgaaagtacaaatcgtgcaattagtctatatcaattaatttgaataataccagttatgggtcttaagagcattccaaacatctttagttttaaagtttatttcattattacgaacacaaaacggctcgataacattttgatctaaccaagtattaattaattctttaggtacaccatcgagtagcatatctgttttgcttataattaaacattcccaatctaaagaaattgaattaggattgacatagttacattgactatgagtagacatcattaatcctcctttattccatgtaaatctaatgttaagttataccctaaacaaattttattaaacaatttgcttttaaattgtatgatttctaattttttaaatcattggtttactttgtaatttggcagtgattaaataaaagtgtcataaacaatgatgggtgtattctttggtgaatatcttaaataatgagtgaagaggtgtttacaattggttaaaacattatatttaatgagacatggtcaaacagtatttaacttaaaaggtaaaatacaaggggctagtgattctcctttggctgcattaggtgtacaacaagcgaatgcagcacaacaatattttaaaacgaaaaatattcattttgactatctttattcatcaccacaacaaagagcatgtgacacgttagagaacgctgtaccaaaccaacaatattggtgtgtaaaagatcttaaagagtgggggtttggattatttgaaggggaaagtatcgagttattaagagctattaaacaacctagatatttgtatggtgacgctgttgtaccatttggtggagaatcaagatctgaagttgaacacagggtttatcgagcactctatgaaatgatggatacaacagatggagagacaattctagcagtgagtcatggtagcactattggtttgtttgtaagaaatatattagggtatgacaagggaagtaaatttgaaataggaaattgtaacattgtaaaatttgaatacgatggagaagaatttatctttaaagatttaattaatcccattaaaaaatagtttacttacaagatagttttaataataaatgtacattaattgttcaataattatagaaaaatcaacatagcctcaaatgatttgtgtaatttcatttgaggctaaatttttaacttttttgtatatgggaatcacttaaataatatatgttttgctttactgatttttgaaatagtcattttaaatattcatataaactcatgattaaaaagcactatatcgatgtatggacataataatgaaaatgtttaaaaggtaaatataagcattttaatctgatgactcagttgttgaataaatgagccaattttcgtcaaaatattcattgccaattttgctagcgtttttttcaaaagcaagattttcaaaacctatagaactaaagaacactttagcacttatattgtttgatgcaatagcaatcatcaatgtttcaatattttgttctttagcgtattgaataatatgattaattaattctcggttaacaatttcatcattatttttaacaaaattattttcaagaatagctttatggcatttacctacataattcatttgttttaaagtgcatgttgcaacaagttcatcatcttcaaaagcaccaaatatattccaataatcagtatgattagacaagatagttttgagtctatcaatgctaacattttctaaatagtaacgatcccattcataattatggtgaccaaatttcattaattcaatataggaatccaaatcgttttgattcaataaacggatattgttcatggtgacctcccattaaaagaaataacataaataaaaatgatttttgaaattaagacttattaaatacataataaaagaattattaaaaatacgcaataatcgttttgttactataaaaaacattattgacaacatatttaaaaattgtttttaaaattaattttatatttttgtcaattggaaaatgatgactttgaaatgaatttatcacattttattttatcaatattttgaaaaaacgaaaggtatattttgaatctttacaaaaaattattgaaaagtatgttataaaggccaattaaacaagtaagattgataacataagaaatttaaattaaataaaaaaacgaggctggtacataattccctagcataatagccagtaaatgagttttcataaattcatttactagctatttatttataatacttcgtattgttggctcgctttcttaggggacagcttcagcctgtagtcttcagcttgtcctgttccctcaagagtctcgccaaaatacttttctacgcacagcatcgcacacagtcaaattagcagaagaattaagctacattgagcagtatgttgccatacaaaatatccgcttcgatgatatgatacagctttacatcgatgctactgagggtgtacaacatcaaacaattggtaagatgatgcttcaaccactcgtagaaaatgccatcaagcatggtcgtgatagtgaacctttaaagataacaattcgtatcagacttacgaagcgcaaattacatattctggttcatgataatggcatcggtatgtctccatcacatttagaacacgtgcgccaatcccttcatcacgatgtttttgatacgacacacctaggtttaaatcatttacataatagagccatgattcaatatggaacatatgcacgtctgcacattttctcaagaagccagcaagggacattaatgtgttaccaaataccacttgtctaggaggaataaagatgtttaaagtagttatttgtgatgatgaaaggattataagagaaggcttaaagcaaatggttccatgggaggactatcatttcaccactgt

SEQ ID NO: 4222 - DNA, 3223 bp, Artificial Sequence
  Description of Artificial Sequence: synthetic nucleic acid sequence
tatgaaacgaaatctcttgcaggatttgatatagaatcatttaacgtgtcacatgacgcgattgatccacaattctacatcttccacaataactataagaaatttacgatgataactgacactggttacgtttcagatcgtatgaaaggtatgattcaaggtagtgatgtctttatgtttgaaagtaatcacgatgtcgatatgttacgcatgtgtcgctatccatggaagacgaaacaacgtattttaagtgatatgggtcacgtatccaatgaagacgcgggtcttgcgatgagtgatgtcattacaggtaatacgaaacgtatatacctctctcatttgtcacaagacaataatatgaaagacctcgcacgcatgagtgttggacaagtgctcaacgaacacgatatcgatacagagaaagaagtattgctttgcgataccgataaagcacaagccacaccgatttatacactataattgaatagaggtaagacaaacgacctacttaagtattacgcttaagtaggttatttttttggaaaagtgatcaggagaattgcagggaatgattatgtgttagtttaaacaggcttgcgcatgaacgattgattaaggaatttttttgaaatgaaagcgcatcatggaagggggagaacgatgtcttacacgctttgtgatttatattacatttcctagttgataaaaaagtaatgatgtaaaaatatgaataaataaaatattaagactctcataaaaacttaaatataaagttaaaatttaaaaacatttagaaattgtaacaaaataaaaattggcatttaaatattttttaaatatattgtatttatagttagtggccatactatttaatataaaagtgagtttctatgttcaacacaagtatgattcaacgtaataaatgatctaccgctgctttcatagttatgttgtaactcaaaacattgtcatgtgagactttatcaagtcaatatcatcgtagttaatatgaattcatttaattaatcacatgcttaattgaggtgaaagtggagcactcatatatttgattgaatgtcgtagtgatgattgatgagactcaggtaggggtgatacatatactgctagatgatagttcacttacataaagataatggtgatattaatttaggattaaaaagatgcgtgtggaaaataggatatcagtgacggtatttgaagtaagtgagtctaaaaggtctgaaatatagggaataattgtaaaaataacgttaagacaaccgtaaagttatccactgattaggaaatagttatccagaattgtgtacaatacacacataaatacccacattattcacagacttatccacaaattcacaatgaatttctttaaatatgtgtataattcctaaaaaacactaagaaaatgttaattcaattgttatactaagagggaaatgtgtgcataagtgtataacttgtggataactcgaataaatcatgtacttttggaggataaaatgaagattactatcttatcagttggaaaactaaaagaaaaatattggaagcaagccattgcagaatatgaaaaaagattaggaccttacacgaaaatcgaattaatagaagtaccagatgaaaaagcacctgaaaatatgagcgacaaagaaatagaacaagttaaagaaaaagaaggccaacgcctactcaataagattaactcccaatctacagtaatcacgttggaaatcaaaggcaaaatggtgtcttcagaaggactcgctaaagaactgcaaacacgcatgacacaaggtcaaagcgactttacatttgtcataggtggctccaatggtttacaccaagacgtcttacaacgcagcaactacgcactatcattcagcaacatgaccttcccacatcaaatgatgcgtgtaatattgattgaacaaatttatcgcgcattcaaaatcatgagaggtgaagcgtatcataaatgatgcggtttttttaataatatttaatactataaaataaaaataaattttatataaaattattaataaaatacgtaacaactaattgaatgtatgtttgctttgctttaagtacacaggaatcatcattttagcagcacctatgagtaataccacgttaactccaagagaattaactcttaaagatccaaataaaaaggttacacaagctgcaactattcccatatttgcagcaccacttcctaaaccagtaaggttaattgctgttgctatagcaactaacgagattggagttaccattaataaagaaaatgttacacaaattaatatagacattaataatggatttaattctgtaaacctgtttactaattttcctagtgactgcgtaataacttgaacgtaaggtaatgttaataaccctattaatccactaattacaggaactaaaacgggtaaaataatcatttctaaggaacctaatttcccctctaaaaacatataaatgaaacacgctaatataactactaaaattacatttataatatctccaattccttttaattcaattgtttgtccattatagtgtacagctccagaacctagcattgctgaaataccaataattgcagcacctgtacctttaaatttaaattggtgcgcagcaagaacccctataataaaagccataaaagattgtatgattgttactagctgaaaaatcgtttctagtacatgattaccttctttgaagaattttaataattcacctaataaggcattaggtaacagtgcaataactacccctgctcctactgcattcaaaatgttgttaaaaaatcgctttccatttatttgcgaatgactcatgttaaacctccatttaaaacattaaattaatcgtattatagaaacgaaatataaacaatcatttaatatcaaatttcatgtcaataattaaagaaatttgagcatttatacttaatagggataatatttagcatttacttatttgataaaaaaacatccaaggttaaattatatatttaaccttggacgcatatgttatatatattttataaaaactaaatttaattactgaatatttatatcaggtatattgtttcttaggaattgttgaacgaaatcattaatataaacactgctattgtatttattatctacgccaccataatgtattccaataacttgatttttaccattaa

SEQ ID NO: 4223 - DNA, 3927 bp, Artificial Sequence
  Description of Artificial Sequence: synthetic nucleic acid sequence
aatttagttgcactatgaataactatgtcagcgcctagtgctaaaggtgattgacccaaaggtgtcataaacgtattatcaacagctaatagtatcttatgttcctttgctagcgttgctacagcatgaatatctgtaattttgaaaagtggatttgaaggcgtctctacatagatgagttttgtgtttgattgaatagcttcagtgatatgatctatatgtgtagcgttaactgtagtaaattcaatattgaatcgattgagtatttgttcagttaatctaaatgtgcccccgtaaacatcatcaggtaaaataacatgatcccctgcgtttaatgtgagtaaaacggctgaaattgcagcaatgcctgaagcataagcaaatccatatttaccaccttctaaacgtgcaagtttctcttcaagtaaagttcggttagggttaccacttcgtgcataatcatattgagtctcaccgcctaacactttttgatggaatgtagatgaatcgtaaagtggcgggttagctgagtcgtagtctttacctctacgcacatcgaatattacttctgtttctttagataaactcatgaaatcactcctactttagaattctctaatgcttgaattatgtcagcttctatatcgttatagtcttctatacctacggacaatctgatgagatattcatcaattccacgtttgtctttttcctcatctggcatatcaacgtgtgtttgtgtataagggaaggtgataaatgtttctgtaccacctaagctttctgcaaatatacaaatttctaaattttctaaaaatttagcgacgctatatgcttggttcagtcttaaactaagcatgcctgttcgtccactatataaaacttcatcaattgaatctgactggcgacatcgttgtgcaagtttttgagcattttcttgggaacgctctatgcgaagatgtaatgtctttagacctctttgtaaaagataactatcaagaggtgatagagttgctccaatcatattatggaattgattcaattgttcagctaattgagcatccttaacagttacaactccagctaacacatcgttatgtccgccaatatattttgttgctgaatgcagaacgatatctgcaccttcttcgagtggtgtcgaaagataaggtgttaaaaaagtgttgtcgataattgttaatagttgatgttttttgctaaggatataatatggttctacatcaatttcaatcatttgtggatttgagattggttcaataaataatgctctagtttgtggagtgatgtttttttccacttcttcataatttaaaaagtctacatatttaaacttcaaaccatattgtttttcgtaaaaatcgaataaccgaaatgttccaccatataggtcaaatgcaacgagaatttcatcacctggtttgaatatattacatattaactgaatcgccgccataccactggaagtagcaaatgaagcaatgcctttttcaagttgtgcaaaagcttcttcaaaggctgttcttgttggatttttagttcgtgtataatcatagcctgttgattcacctaggtgaggatgctgatatgcagtagataaatatattggattggcaattgcgccagtgtgatcttgtgttaaagcaatttgagctaaatctgtatccttcatagctagctcctcctattcagtaaaaataaaaaagcttccgtcctttagacccgaatgattcggatgtaaaggacgaaagcttaaacttcgcggtaccacctttgtttgctactttattgctaaagtaacctcaatcagtacgccatagtgttaaaacagtatactgaaaatagctgatacacaatctttttatcgtaacatcattaaataaaacaaaaactcatttaatccatatgtgaataaatgagtattaacgataaattgtgacgtataaaatttccagtacgccatttaacatcaatgttaatactgtatcgctataacgggcgaacccgttgatacctcatattggcatcaacactccaaggccattttcaaactttctttcaatgccttctctcagcgtgtgaagactctctgtataagcagtgtaagttttactttcctttttacagtgtgtaaaatgttttttaaattgttaatacatagattacatagtttgaatttatttgtcaatgatttttctgaagattttgatttaacaattaatttattatcagaaatacatctgaaaatatgtgacgtaataagcttcatattaagccattagtattaatttgaaagtcttgtattattggattgaacttttttaaaataagtaatgaatcaatgaggattgattattcattagagatacttaaattaagatagaaagatgtggaaaagagatggcatatacagatgatcagagattgaaaatgaataatgatgatagtgtgcaatttattgcactagaattaattagacctaatccttatcagccacgtaagacgtttgaagaagaacgactcaatgatttagcttcatcaattcaacaacatggtatattacagcctattgtattacgtcaaactgttcaaggttactatattgttgtgggtgagcgacgatttagagcatctcagttggcgggattaacagaagtgccagctattattaaagaactatctgatgaagatatgatggaattggcaattattgaaaatttacagagagaagatttaaatgccattgaagaagcagaaagttataaaaaaatgatgacagatttgaatattacacaacaagaggttgcgagacgattaggtaagtcacgtccttatattgccaatatgcttaggttattacagttacctaaaaatgttgctcaaatggttcaacaaggagcgttatcaagtgctcatgggcgtacgttattaactttgaaagacgccagtaaaataaaaaagacggcaaaacaagccactcaggagtcttggagtgtaaggtatttagaggagtacgtcaatggtttagtcagtaaagacatctcaatgaaactggacagagagaccaagggaagtaaaccgaaaatgattcaacagcaggaaagatttttaaaaaagcaatatggtgcgaaagtagatatttcgacatctaaaaatgtcgggaaaatcacgtttgaatttaaatctgaagcagaattcaaacgcttgattcgtcaacttaataaagattataaggaatattaaaaaattagcctttataaataggaagcatatacatagttttataaatatacctcaaaaggatagtattttaaaaccatagacgtattatctaaatgaataaattaagttataataaatgaattatgaaaaaaatgaaagggagggcatattttatatgaatcaacttaaacatattttatcttcattgttcgaacctttaacaaaggttgaaacatatgaaaatttaattactaaagtaataatgattttaatttatatccttgtagcgattgttgttatagcaattttgaataagattattgagcaagcatttaaaattcaaaataaaagcaaaaaaggaaataaaaaacgttcaaaaacactgatttctcttgtacaaaacatagtaaaatatatcgtatggtttgttgttatcacaacaattttaagtaagtttggtattagcgtcgaaggtatcatcgctagtgctggagttgtaggtattgcagttggtttcggtgcgcaaacaatagtaaaagatattattacaggtttctttattatctttgaaaatcaatttgatgtgggtgactatgttaaaatcaatagttcaggaactacggtagcagaaggtactgtgaaatctattggtttaagatcaacgcgaattaatacaatttcgggaga

SEQ ID NO: 4224 - DNA, 3889 bp, Artificial Sequence
  Description of Artificial Sequence: synthetic nucleic acid sequence
tagctgcactaaaaggtaacgacacaattattaaaaaactctttcgtcttcctgcaatcaaacgttttgaagaggatgaagagctacttgaagacttggtgatagaaaacaaccaagctattgaaacgactgaattacatcaacgaatacttgagagtatcacttcttcgtatgcttcattattatctaatgatatgaataacatcatgaaaacattaacgttgtttacggttcttttgacccttcctacactcgtctttagtttctttggtatgaatgtacccttaccaattgatgatcatagttacgtgtcttggattattgttgtgggaatttcacttattctagtagctatcgttagtatctttttatggaaaaaacaaaaattataacaacaaatacccttagttatagattagcactcaatctaactaagggtattattatatgtttaaaattgtgtcaaaattttaagtctctactatgattcaacagctgtcttatttgtttttcttcgagaaagtactaaagtgacgacaactgaaacaacaaatgcaattagcattcctattaagtaatgtaaccaaccagcgtgtgtaggatttatagatataaatccaggtaatccagctgtaccaagcgctatcgcttttactttgaagaatgaaatataagccgcacctatacctgatcctgcaacagcaatattctaacaggtgtgattgaccgtgtagaccatcgctatgtatatgtgaatttaggaagaattgaagctgtgctgtcagaagctgaaagaagtcctaatgagaaatatattcctaatgaacgtatcaaggtgtacgtaaataaagttgaacagactacaaaaggtccacaaatttacgtatcaagaagtcatcctggattactaaaacgcttattcgaacaagaagttccagaaatttatgatggtactgttattgttaaatcagtagcgcgtgaagctggagatcgttctaaaattagcgtgtattctgataatcctgatatagatgctgttggcgcatgtgtaggttctaaaggagcacgagtagaagcggttgttgaagaacttggtggcgaaaaaatcgatatcgtccaatgggatgaagatccgaaagtatttgttcgtaatgctttaagtccatcacaagttttagaagtaattgttaaataaaaggatattaaccaacttgttaaatacctagatgactatacttaaataaagagatccaacagatgaaacggttaaatgacgtctgtaggatctctttactttaaggcaatacaaaaatcatattgataacgttgacaaaagccaaagatgagtttttgaaaaaatcatttataaaatgttcattcagtcaatacttttgattaccttaaaattgacctgtgtttaaactttatttttaaatagatttggacataatttttctagtgtacgtggacataattgataaaatttaagcattatttgcatccatgatggttgattaatttcaattttatttagtattattccttccactatttgcttggcaagttgttgaggttgtatcatcatgtgtctataatttttaaaatactttagagtaggatctgcgtttttttggaatggtgtatctattggaccgggctgtacattgagcacttttaattccggttgttctaatctcaatgcattaagaacggcgctaaaccctgctttcgatgcaccgtaatgtgccgcattagcctgtgaaacaagagcagcttgactagatataccaacgatatatgctgcttttactaattgtggttgaatcactttgtataacaaattaaaatttgtaagattaacctcgtaagtttctactacttcacgagttgaatgctcacttatagacttaaaatatccaacacctgaactgtagatgaaaccatttataggtgtatttaaaaatttttgtaatgattcaatatcttttcgttgcattaaatcacatttaatcacattgatatgttcaggtttaaaatagttttctttgattcgattgaacttatctatatttcttgcaagtatagtaacatgggcccctctttgaagtaattcattggttattgcaaaacctaacccactcgttgctccagttataataaagtgtttgcctatcacgtcgctcctcctttatgtatattttaataacaagcttaataagtgtgatagcattcaattttatttatgtgtaatattacttatctatgatatatgatactatatatgcataactttaagtcaatgaatagaattcaaaattgaaggagttgagttgaatatgaaacttgtattttatggtgctggtaatatggcgcaggcaatttttactggaattattaattccaacaatttaaatgcaaatgatatttatttaactaataaatccaatgaacaagcattaaaaagctttgcagaaaaattaggggttaattatagttatgatgatgaagcattactcaaagatgccgattatgtatttttaggtacaaagccccatgattttgaaaatttagctaatcgtattagagaacacattactaatgataataggtttatttctataatggcaggtttatctattgattatattcgtcagcagcttaataccaataatccattagctcgtattatgccaaatacaaatgctcaagttggacattcggttactggaataagtttttcaaataattttgatcctaaatctaaaaatgaagtggatgaattaatcaatgcatttggatcagttatagaagtctccgaagaacatctacatcaagttactgcaattacaggaagtgggcctgcatttttatatcatgtatttgaacaatatgtaaaagcaggtacagaattaggtttagaacgaaatcaagtcgaagaatctatacgcaatttaattattggaacaagtaaaatgattgagcgttcagacttaagtatgtctcaattaaggaaaaatattacatctaaaggtggtactacacaagctggacttgatgcactatctcaatatgatattgtatcgatgtttgaagattgtttaggtgcagctgtgaatagaagtatggaattatcacataaagaagatgaataaataaaaacgcttttctcctaagatagtattctgagagaaaagcgttttattatattttgaaagtatcaaaatctttaacgaaataaaaatgtggagaagtttgatcaagggataactcattgtatattgatgtaacttcatcaatgttatatctgttactgatatgagtgataagacttttatttacattagcttgcttaattagattaaatacatcgtctatatgactatgatggtaattattagcaagtttcttatctccttcaatgtaagttgcttcatgaatcattaaatctgagttctttgctaattcatattcattttcacacggttttgtatcaccaaatatactgataattggaccaggtttagctttacctttaaaatcatccgaattgtaaattaatcctttatattcgaacgtttcttgtaatttgacttcctgatattttggaccaggctctagtccaatacctctcaaggcctctacattgattgtaccaggcgtgattggggcttcaatacgatatccgaatgaaggtatgccatggttaagcatttcagcttgtacagtaaaaccattgtggtgatacgctaattgttgattgatttcgatataggtaatcggataattcaaatgcgattcagaaagttgtaaagatgtttctatgtaattttgaatacctttaggccctataatagtaaggggtttattttctccaccttgaaacgaacga

SEQ ID NO: 4225 - DNA, 3083 bp, Artificial Sequence
  Description of Artificial Sequence: synthetic nucleic acid sequence
attaccaggaacaggattattattagttggcttatttatgtggaatttaatgcagtggagtacaaatccagctattcaaagtggtattattgaacacgtcgaaggagatacaagccaagtgatgagttggaatatgtcgagtctcaatgccggtattggcgttggcggaatcgtaggtggactcgttatgacacatttatcagtggaatatgttacttatactagtgcattgataggtttaattagtcttatcattgtattcactttaaaaaatagacattatgctaaaaatttatgactggaaaaggtgtgcacgatagcacatagaagtatctttatgatattagatttgtgtatgctatcagtgccttttccagtctttatccatagatatgtaacgcttgatgttgaggttcataacatttccatggcatcttaccttttcgggcaaaataagctaagtcagatatcatgttactacttaaattcatatcatgttgagttatagaataatgatttttagtcaaaatagagaggtgaccaaaccaaaatactaaatccaatatatgatatgcacttttaaagtaggaggtatggggttggtgccaatcaaaacgtgctagccaagtgtcgcaactattcatttgatttaaaaatagataaattggacgaacaaaacaatactctgttattaaatttctttgttgtttcattgtgagggcatcatttttttcgacgtgtgtaccatattgagacatcaagtgaataaaacgttcagaaggtaaggtgcgtgttgcgtcttcaatataaatatcaccttcatcgtgtgtataactcatgaatgtcggtttgggaaattttttaatggatcgtgacatatgatgatctttaataggttgataaatcaaatcaagtccacgagatcttccacgctctattttttgagactccattagatataaaatgtcatcactggtaagtgtcttaagtgttttattaggaaaataatgcctcatgagttgtgaaaaatgttgtactttagtatgtgcattgagtggtgtatcagtagttaacgttccacttaataacatcactttatgataataatcatcaagttcgggcatttgcattaatgtcatgatactcatactacctgcagattgacccattagtgtcacgttatttgaatcaccgccaaaatgttcgatatattgatgtacccatcttaaaacgttaatttgatcagaaatcccattattatagttcaaatgttgattaaaataagaccaatctaggtagccgagtgcacctaagcgataattaaaagtaactactattatattttcttgttctactatgtgttcaggacaatatagttcagctgtgccatgtccttgaagaaaactaccaccataaaagtaaatcactacaggtaaatgattttgattggacgatggtttccaaatatttaaaaacaggcaataatcattttgtttaaaagaattaaacgatgaatctgtcatcgaaaaaaagtcttcaagtgaattgtagggttgtggtgggatggattgaatatgagttgcatcaatcattggtttgcttagttccataaactttgaatgttggaatcgagatatcttattgaatggtttggcatacgggatacctaagaatacatcaatattctttttgtgtaagccattgatggtacagttacctatcttgacttgaaccatgtttgaacacacctttacatataaagtcgtagcttaactataacatgaaaaattatatttagatgaaatgtgagcaagtaacaaagtgaaaagaattgttgatgattgacttgaacaatgtgttaaaaaattaaattttacaaacgaaataaaaatgatattaagtgtttaactgaatatttaacgaatgatatcagatagaattaaatgaatttttgagtttaattcataattactggtatattaaaaagcttgagacagtaatgatagtcccaagcttttattataaatattttatattctataagctgtcgtcttattgattttgctcttgtcgatcgcgttctttccaatctttatgacgcgcttttttgcgtgttttacgcaacttatcgcccattttcttattcaacttgttcgcacgcttgaaataaatactttcaaagtaacttgtcgtacctagttgatagaagattaaagcaacgattacaatgactaagaaatcccatggatagtgaatccaatttaagcctttgaactctttacttccaataaatgataagaatgcgagaacaataagatagataataatccataagcttccgccaatttgttttttagtattcttccaattcattttatattcatagaagaaataaataggtaaacctaaaataataattaaaataacttctgctgttgttggccacattgcccaatagatagctaatgatgctaaaacaaaggataaaggtgccataaattttaaaatattagctttaaatggacgagtcatttttggtgccattttacgtaatgaaataaccgtagttggaccagttaaatatgcaactaatgttgcagtagaaataaccgcagctagtgtaccccagtcacggaacaatgtcaccataatcatgctgataattgcattaaatgcaatggcaacacgtgggatattatactttttattaattttacctaagaatttaggaatatgcccattttcttccatagcgcgtaacacacgtccagtaacggcaacaaaagaaactccagtaccaaacggtgacacaactgcttccatataaagtaatattgctaaccagttaagacctaataaaattgccatatctgcaaatggtgaattgaaattgataccgctccatccatgctcatgcaacattgaacttggcatagatgtaatgaacgtactttgtaaaactatatataatatagcacttaatgtaagtgagataacaatcccacgtgcgatgtttttctctggatttttaatctctgatcccatgttaataattgtctggaatgcattaaatgagaagataa

SEQ ID NO: 4226 - DNA, 2920 bp, Artificial Sequence
  Description of Artificial Sequence: synthetic nucleic acid sequence
gtctccatggtttacgtccaccaccacgtactgctgaacgattcttaacagcgtgagtaccttggcgtaatgacgcacgttgtaagttaatagcttcaaaaagaacgctattattaggttcgatagcaaatactgcatcgtttaattcaactgaacctgattttgatccgtctacttttaaaacatcataattagccattatgcaatttcctcctttcgcttcttaattatttattacctttttttattgaagttgtgatttctactaaaccttttttaggtccaggtacattgccttttactaaaatcacactattttcagtgtcaacttgaacgacttctaagttttgaacagtaacagtgtttccacccatacgtcctggcattttttgtcctttaaacacttttgaagcgtctgatgccatacctacagagcctggcgctctatggaaatgagaaccgtgagccattggtccacgaccttgtccatgacgtttaatagcaccttggaaacctttaccttttgaaacgcctgtaacatcaatgatgtcaccagtttcgaatgtatcaactgagacttcttgacctacttcgtattcgtcaacgttaacgttgcggaattcacgaatgaagcgcttaggtgctgtgtcagcttttttagcatgaccttcagctggtttattagcatatttattagatttagaacctttcttatatgcttgtttatcttcaaaacctacttggatagcattataaccatcaacttcttcagttttcttttgtaatacaacgttttgactagcttctacaactgttacagggattaattcaccattttcaccgaaaacttgtgtcatcccaatttttcttcctaagattcctttggtcatcgaaagtccacctcctatattgttctattataatttaatttcgatgtctacacctgatggtaagtttaagcccattagagcatctaccgttttaggtgttggattaacaatgtcgattaaacgtttatgagtacgttgttcgaattgttcacgagaatctttgtacttatgcacagcacgaataattgtataaactgatttttctgttggtaatggaattggtccagaaacatctgcaccagaacgttttgcagtttcaactatataaacgtaggaggtgatttttttactctataatatttaaccatttataaacggattgagttgctcatcgtcaactgtagtgtaaggcccatgtccagggaaaagtggcatatcaccctctaattcaaataatttatcttttattgaatcaattaatgtttcataatctcccttataaaggtctgtacgaccgataccatttttgaacagagtatcgccaacaacagcaaagtcattaaaaacaaaactaagactacctggcgaatgacctggcgtatgtaatactttaaatttaaatccttcaatctctgcaggaccttctgataaacttaagggatttgcgtgactttctattttagataaaccatattgtgtaaatttagatgagccatttttatctggatcagttaaaaaatcaaactcatctttactcatataaactggaacctgatatttttcaataatattatctaatgctccgatatgatcatagtgtgcatgtgttaataaaattgcttttaaaggtttattgatttgatttaatttttttattattttttgactttcacttgagggatcgattaatattacattttcttcattctcaatgaaatacgtattagtatcaactattcctaatgttaaatttgaaattcgcattataattcaccactatggtctagatgtttttgtactgattttaatttatcattcatttttcttgatttatctcgacgatcatcaattctaatatttgtacaaaccctatctaaccctttatcaaaaggtaattcatgaatcgcttgaatcacctcaaaaaggtctttcaaatcaccttcgattaatgtattcattggtgtcaattgataatcaattttcccttgttgtttaaattcatttaactttgtttggatttcagctatatatttacttacactaggtccctctgttcctactggaataactactacatcaacaattgccattatttagcaccctctttatctatgatatatgttttgataagcccagctgcaccagtaataccagcgtcattccctaacttagcttgtactatctcagtattattttgagctggagtaaaagttaaattacggtattcagttttaatattttctataaggataagtcccgctgtagacatgccccctcctagaacaatatattttggattactagtaacgctaatgatactgcataaataaccgatataatttgccactttttcagttataaatatacagaattgatcgccagctttagccgcatcaaatacagcttttgcagttacttggttatctttaataagttgtaaaattgatgatttaaacgttaatttaggataatagaaattaactaaatttactacaccagtagcagaagcaactgtttctatgatgcaattacttggtttaagacaaggggaacaattgcttgagcgttatcccttcgaacttagtggaggtatggcacaacgtgtcgcctttataatgtcattaattagacgtccgaactacttatttttagatgaaccaacgagtgcacttgatcaagaaaatattaaaaagtttatgcattaccttcttagggcacaggagcgctaccaaatgaccattgtttttatcacacatgatattaacttagtgaaagattgtgccacacatattagtattatgcagcaaggtaaattgatagaaaatggtgaggccgcgtcgatcttaactaagccgacacataattacacg

SEQ ID NO: 4227 - DNA, 3032 bp, Artificial Sequence
  Description of Artificial Sequence: synthetic nucleic acid sequence
agttgataaatatataatttaaataggcaaatggacactctcatatttaatcatgaaagtgtccatttgcctatgtttactgatataaactatcgtgatcgaccgtttaacaacaagatactgacctgaaaactagttatctaataaatgactttttaagtaatgtgctgcaccatcttcttcgttcgtgtattcggtaatatcatctgtaagatttttaatttcttgtcttgcatttttcattgcaacagtgtgatggccaaaattaaacatagctctatcattatcactatcaccaataactaaagtttcttcttgcttaataccatagtgatcaatcatttccttgatacctgtacccttatctgtatgatatggcatcgtttcagcattataacgcgaagaattagatacggtaatacctaaatttgattggttttcaacaagctggttgcgaaaatcagttattttatctaagttgggactaaataaatatattttagaaaagtgtgcatcaggtaaggtatctcgccaatctatttttcctttaattgcctctcttcgcgatgaccactcactttgacttacagcgtcaggtggctctaaaaaggttagtacatttttgtacaatatatataattattaagaggtgggtgaaagatgaagaagttaataattaaagttattggtgttatattattagtgacatttttaatttatctcttttactcaccacgtttaaagtttgatgttctagagaatccaaataaaaatagcaaaacgactaagacggagcaatttaaacaggtgaataaggatgctgagaaccctaaacctaaagaagggatagggacttggattggaaaagatattaaaacactaacgcatcattatggacaagctgatcggtcttatccatataaaaatgggttaaaaaattatgtctttaaacagaaagatgaatattatattgtaagtactaataaaggaacaatcacatcagtttatgccacaggtaaaggtgtgaaagtgagcccacttaaaataggtgaaagttcatctcatatttttgaagatactagtattaatccagaaccaactgtcaaaacgaaaggtaaaacttataaatttgaaatgtctgatgaagacttaaagacacagacgttaattaaatatggagatgtttatgctcaaatatattctgatcaacaaactaataaaattttggcagtgagatttttagatgcaaatacattggcaacactacaaccatataagttataatggacacgattattatggatgcgattacgcctgaagttgagcaatatatttataagataagttattggctgacgaatattgctgtcgcctttggtgcgctcataggtggattgatgtatggggcacataaatctatgttgtttttcatcgcttttgtcatttacattatggtttttatagcacttatcgtatggttgcctaaagatttaaatattgttactcagtcgcacacacatcatgctaatgagaaacaattctccatgggtcaaatattaaaaagttataaaccagcatttaaagatacaacatatctacttctaattataggatttagtattttaacaatgggtgagttatctgcatcatcgtacatttcagtgcgtttaaaacaagagtttgatccgatgatattgttttcgttacatatcaatggcgttaaaatgtattcacttctattaatgacgaatacaatcattgttataatttttacctattttatttcaaaaattgttatgagaatgaatgttaaaacagcattattggttggaattattttttatgtcattggatattcgaacctcacttatcttaatgattttacgttacttatcatatttatgattatagcgacgataggtgaaatggtatattctccaattcttgaagaaaatcgttttaaaatggttccttctcataaaagagggacatattcagcagtgcatgctttaggatttaacctagctgaattacttgcaagatttggaattatattaggagtgtttttaacttcaatggagatggggatctatatgtttgttttattattactaggtggcatgtcactttacattgcagtgagtcgttttaataatacaaattcacaataattttttaaattagaaatgtataattcataccaaattgctcgtaattttaataaaactatatttattaagattttgttaatttttattttcctaattgttttctatagtgagaatatactaatataaatcatggctagaaaatatgatgtaagttgtttatgagttattatgggaatgaatatgaaagaaggactctaatgaatattgaagcactatattttcaaaaatatttttattttaaacatttaaatcaatcaagttcagaacacagggtgacatactgggtaaagttaagtcgcgacattgagttacgtagattaatgtatgcattattagatgtcgttcaaagtcaacctgtgttgcgtacacagtttgtgacagatgattttaatcaactcaagataaatttaagagatttttttccatttattgaaattaaagaagttaatgaaatgtcgcaaagcatagatttagaagcattctttacacgtaatttaaattcctaccatttcaatcaattacctctgtttaattttaagatatatcaatttctagatggcgcctacctacttttagatttccacgctactatttttaatgaaagtcaattaactccatttttacaacaattaaatattgcttatacccactctttaaaaagtgaatatagtatctcggatttttataattggattaaagaaatgaatcaaaagatggatcaaaatcaagttgtgtgtccatcaaagcacttcaacgtattgaatgcagacggtgataattacgcttacatacctgtaaagaatacatctgaaaagaaaaaaatgtgttctttgcatgcagaactaccatctttagacattg

SEQ ID NO: 4228 - DNA, 4996 bp, Artificial Sequence
  Description of Artificial Sequence: synthetic nucleic acid sequence
gctcatttctatactctattagcaaatattcaagattccgcttttcaacttgcaatgagcaaggccattgttaaaatcaatgaagataaatcatcaattaatcaaaatgatctcactgataaagagttgaaagatgcgattctagatatagaaacactatttccatatcttacaattaaccattttggaagttctgttgataaaatcaaattattcgctgaattgacttctaaatataaagattaccatcctgagtatctgggtaagtttaacagatatgaaatagataaatatattcaagaaattagcaaaagttataaaaaaagaggtaatgaaaatggctgaaaatcaagctaaaaaagaacaagttcatacagtattccaaaatatttctcaaaaatacgatcgactcaacaacatcataagtttcgaacagcataaagtatggagaaaacatgttatgagtactatgaatgtacaaaaaggcagtaaagctttagatgtgtgttgtggtactgcagattggactattgcattaagcgaagcagtaggctcaaaaggccaagtaactggtcttgattttagtgaaaatatgcttgaggtaggtaaacagaaaactgcttcattggaaaatatccagcttgttcatggtgatgctatgaatttaccttttgatgataactcatttgattatgttactattggttttggcttacgcaatgttccggattatttgtcagcactcaaagaaatgcatcgagttttaaaaccaggaggcatggtggtatgtcttgaaacaagccaaccgacattgccattattcaaacaaatctatagtttatactttaaatttgtgatgccaatttttggtaaaatgtttgctaagtccaaagaagaatatgaatggttgcaacaatcaacatttaattttcctgacaaacaaacattgaaaggcttattcttcgaagcaggatttaacgatatcattgtacgtagctttacaggtggcgttgctgcaatgcaccttggctataaagaaaacagttctagcaaaggtgattaacgtggcaaagttaaacattaacaacgaaataaagaaagtagaaaagcgacttgaagaagcaattataagttctgatcaaacattacaagaagcctcattccatttactatcttcagggggaaaaagagttagacccgcttttgttattttaagtggtcaatttggctctaacaacaaaccttcagaagacacgtatcgtgtagcagtagctttagaactaattcacatggctaccttagtccacgatgatgtgatagataaaagtgataaacgtagaggccgactcactatttcaaaaaaatgggaccaaagtacagctattttaacaggaaatttcttacttgctatggggctcaagcactgagagatcccctcataatttccccaaaacgtaaccatgtgtgaatagattttgagtaagcagggttgcagccacgagtgagtcttcccttgttattgtgtagccagaatgccgcaaaacttccatgcctaagcgaactgttgagagtacgtttcgatttctgactgtgttagcctggaagtgcttgtcccaaccttgtttctgagcatgaacgcccgcaagccaacatgttagttgaagcatcagggcgattagcagcatgatatcaaaacgctctgagctgctcgttcggctatggcgtaggcctagtccgtaggcaggacttttcaagtctcggaaggtttcttcaatctgcattcgcttcgaatagatattaacaagttgtttgggtgttcgaatttcaacaggtaagttagttgctagaatccatggctcctttgccgacgctgagtagattttaggtgacgggtggtgacaatgagtccgtgtcgagcgctgattttttcggcctttagagcgagatttatacaatagaatttggcatgagattggattgcttttagtcagcctcttatagcctaaagtctttgagtgactagatgacatatcatgtaagttgctgataggtttccagttttccgctcctaggtctgcatattgtacttttcctcttactcgacttaaccagtaccaacccagcttctcaacggatttataccatggcactttaaagccagcatcactgacaatgagcggtgtggtgttactcggtagaatgctcgcaaggtcggctagaaattggtcatgagctttctttgaacattgctctgaaagcgggaacgctttctcataaagagtaacagaacgaccgtgtagtgcgactgaagctcgcaataccataagccgtttttgctcacggatatcagaccagtcaacaagtacaatgggcatcgtattgcccgaacagataaagctagcatgccaacggtatacagcgagtcgctctttgtggaggtgacgattacctaacaatcggtcgattcgtttgatgttatgttttgttctcgctttggttggcaggttacggccaagttcggtaagagtgagagttttacagtcaagtaaggcgtggcaagccaacgttaagctgttgagtcgttttaagtgtaattcggggcagaattggtaaagagagtcgtgtaaaatatcgagttcgcacattttgttgtctgattattgatttttggcgaaaccatttgatcatatgacaagatgtgtatctaccttaacttaatgattttgataaaaatcattaggggattcatcaggctcaagcatttatctgaaatcagtgatactcgtgtccattcgaccatttctaaatcaattgttgatgtgtgtagaggagaactattccaatttcaagatcaatttaatagcaatcaaacaattactaattacttacgtcgtatcaaccgtaaaacagcacttcttattcaactgtctacacaagttggtgcgattacttccaatgcgtcaaatgacgttattcgtaaattaaaaatgatcggacattatataggtatgagtttccaaataatagatgatgtgctagattttactagttctgaaaagaaacttggtaagccggttggtagtgaccttatgaatggtcatattacattacctgtactattagaaatgcgaaaaaataagacttttaaagataaaatttcacaacttaatcctgacagtcctcaacatgcctttgaaacttgtataacaataattagacagtccgaaagcatagaacaatcaaaacaaataagtgaaaagtatttaaataaagcaatcaatttaatcgatgaattagaggatggtcctaataaagaactatttagaaagcttattaaaaaaatgggaagtcgaaataagtaagttttgtgacaaaagttgaaagcgcttcattatcctgttaccatactaagtagcaggatatttttatagcttgcaatgttttaagttttttacatacttataaaaatgaatgaaacacatgcacagggggacacacgaagtggaacgcacatttttgatgattaaaccggacgctgtccaaagaaatttaattggtgagattatatctcgcattgaaaagaaaggtcttaagcttgttggcggtaagtttatgcaagtgcctatggaactagctgaaaaacattatagtgaacatgaaggaaaaccgttctacgacaagttaatttcattcattacttctgcacccgtttttgctatggtagtagaaggtgaaaatgctgtagctgtatctcgtaaaattattggaagcacaaatccaagcgaagcagctcctggtacaatccgaggcgactatggtttaaatctaggtcgtaatattatacatggttcagattcaacagaatcagcacaacgtgaagttaaattatggtttacaagtagcgaaattgctgattataaagaaccaagagaagattggctatacgaataataaaaatatcaaataatgaaattcattttatccattaatgtctgtgacgcatatttgtgtctcaggcattttttatgattaaccaaattttatttgcttaaaataatacttattgaattagtctatttatttttttatctagggatttaacgatgcaataccgtatattgttcgattatatagcaattttatcttttgacaattgagcattcattattaagtaatgacctacttttaatatatcaatcatgtatctaatgatttcggtcttttgagttttttaatagactgatctttaattggtataatgtcactatgacataacaatcatcttggtgctattcttttttaaatatttataactgctaaaataaaaatctccttgtttgtctaactgacttatgttgtgtgattgaatatgataatatattaaacatattacaatttaatgtattgaagaatagaaaggggcgtgcgatcatgagataccttacatccggtgaatcacatggaccacaacttacagtcatcatagaaggtgtaccagctaatttagaaattaaggctgaagatattaataaggaaatgtttaaacgtcaagggggatatggtcgggggcgtcgtatgaaaattgaaaaagatactatagaaattgtgtcaggcgtcagaaatggctttactttaggaagtccaataactttagtagttactaacgacgatttcactcattggagaaaaataatgggcgtcgcaccaattagtgatgaagaaagagaaaatatgaaacgtaccattacaaaacctagaccgggccatgctgatcttataggtggcatgaaatataatcatcgtgatttaagaaatgtgcttgagcgttcatctgctagagaaacagcagcaagagttgctgtgggtgctgtttcaaaaattcttttagaacaattagatatccacttatatagccgtgtagtcgaaattggtggtattaaagacaaaggtttatatgatgtagatatgttcaaaaataatgtagataaaaatgatg

SEQ ID NO: 4229 - DNA, 3218 bp, Artificial Sequence
  Description of Artificial Sequence: synthetic nucleic acid sequence
tactatatatttatttatttttatatattatttctttattacttcccgtaaactatcacctttgattgtcattatactcatctcaagtttactctatttagtatttaaacaagaccatcaatggttcatttacgacattgtcacattaagttaccattttattttaggcgtacttttaggtgaaatattacaatcctcatggacgatttttcgtcttacctttcaacgacctaaaccttcttgggatggcagtgctttaacgaaagttactcgagtacccacctttatctttagtttagtgtggatattattcaatctctatactgtgtatttattaatcaaatacacaatactataaatacgataaatagattttatcatcatgtacattgaattagtaagcacattctaacaaagagacagtgacttaaaacgcttattacaaacacactttaaatcctttcactaaatgccaatatcttaaaaatgcctaggaaattaatcctaggctctttttatcgtttatttttctgcaaaaatattcatcgcattttcatagcttaaaattgttacaatatcattcctcttaagaataataaccttattggtatcatctttggatacaatttcaactgtatttccaatataaatatccttacttgataagtaaactaacaactctgtcttatcacgaactcgtcgtacagtaacacgttctccaggttcaaaattaagaattgacgtagtaaaaatttctttatattgatcacctctaggaatgacgcctccatgagggcatgttttcggaaaatttaaaatcttatctaaacgctctacaaataaatctgatatccgatgttcaagtatttcagcttcttgatgaacctcttcccaattatattgtaaaatttctattaaaaataattctagtaatcgatgtcgttttatgatgtctaacgtttgctttaacccttcttcagttaaacgggcacctttataatgttttgtttcaacatagccttccttttctaaacgccctaccatttcacttactgatggtggtttgatatttaaaaattgcgatagttttttatttgatacaaaggacacgtcgccatcattagtcaaaattgctttcaaataatcctctttttcttcagttaacatcgtttcacctcacacattcactttattgtaccatgaattaacttgacatgttaaaactttagagtatattataaaataaattaggttaacctaaactttttattaggaggttttaattattgctcgaagtgaatcatttgaatttatttttgggaaaaaagcacattcttaaagatattacattctcattacctataaatggtgaaatcattggtattgtaggacctaatggtgccggtaaatcatctcttctcaaagcatttatcggagaatttaaagcgaccggtaaacatacattatatgatcaccctatacatacacaacttagatatattacatatatcccacaaaaagctcatattgatttagattttcctataaaagtggatcaagtgatactatcaggatgttatgaagacattggatggtttaaaaaagcaagtgtagttgaaaaaacgaaacttaaccaattacttaatgatttagaactcgaccatatacgccatcgacaaattgcagaattaagtggtggacaattgcaacgtgttcttgttgcaagagcacttatgagtaatagtgatatttattgtttagacgaaccttttgttggcatcgacatttatagcgaacaacttattatgaagaaaattaaacatttaagacatatgggtaaattgattttaattgttcatcatgacttatcaaaagcagatcaatattttgaccgcattttattattaaatcaatcgttgcagtttttagggccaacaaaagaagcattatcatctgaacgattaaatgcaactttcattaattacaaagatgattcgcttttaacactatcctcacaagggagtacgaattagatgttagatttcattaaccatttgcttagttatcaatttttaaatcgtgcattaatcacatctattttagttgggattgtatgtggaacgatgggtagcattattgttttacgtggtctttctttaatgggtgatgccatgagtcatgctgttttaccaggtgttgctttatctttcttatttaatattccaatgtttatcggggcacttgtaacgggaatgcttgcaagtttgtttattggttttattacttcaaacagtaaaacaaaaccagatgctgcaataggaataagtttcactgcattcctagcatctggcgtcataattattagtttaatcaatagtacaacagatttatatcacattttatttggcaatttattagcaattacacatcaatcattttggacaacaattgtcattactgtactggttattttacttattattatcttttatagacctttaatgatttcaacatttgatgcaacttttagtcgtatgagcgggctgaacacaacattaattcactactttgtcatgttattactcgcacttgtaactgttgcgagcatacaaacagttggaattatccttgtagttgctttactaatcactccagcttctacagcttttttaatcagtaaacaactttatgccatgatggtaattgcaagcataatcagcgtgataagttcgattatcggtctatattttagttatatatataatattccaagtggagcaactattgtaatctgtacctttatgatttatattgtaacgctatcaattactagaattaaaaataaacaaaaaaggagcgctttaacgtgaaaaaaattctcgctttagcaatagcatttttaattatccttgccgcatgtgggaatcacagtaaccatgaacatcactcacatgaaggaaaattaaaagttgtaactacaaactctattctctatgacatggttaaacgtgtcggtggaaataaggtcgatgttcatagcatcgttccagtaggacaagatccacatgaatatgaggttaaacctaaagatattaaagcattaacagatgctgacgttgtattttataatggtttaaacctagaaactggaaatggttggtttgaaaaagcacttgaccaagcaggaaaatcaacaaaagataaaaatgtgatagcag

SEQ ID NO: 4230 - DNA, 3666 bp, Artificial Sequence
  Description of Artificial Sequence: synthetic nucleic acid sequence
gggtgaaggtaatgttcaaattttaaattcaacgtcagcgcaatttgaatgtaattgtagtcatgagaaatttttaaatgctattaaaggtttaggagaggcagaaattcatagcatgattaaagaggatcatggagctgaagctgtatgtcacttctgtggtaataaatatcagtatagtgaaagtgaattagaagatttattagaaacaatgaaatagttcaaaaaatgatgagttaatataatttataaaacaaactggatataaattttaaaagttatgcactcaattttaatagaagttagtcatatagtaatgtaaaagtcgtcgaaaaggaggattatttgttgtcctcactttcgttcgactatctttttttacgtttaacttaatcttttgtaggaaatgtcttatagtaaagaccaaagtagtatatagttttatttatagtaagactatacggtttgtctttttagaaaattctgatagaataaagttatatccgatagaaaaactaagtattgataaattgtaaaactaaaaggagtgttttggatggcacaaaaacctgtagattatgttacacaaattattgggaatacacctgtagtcaaattaagaaacgttgttgatgatgatgcagctgatatttatgttaagttagaatatcaaaatccaggtggttcggtaaaagatcgtatcgctttagcgatgattgaaaaagctgagcgtgaagggaaaattaaacctggtgatacaatcgttgagcctacgagtggtaacactggtataggtctagcatttgtatgtgctgccaaggggtacaaagcagtttttacaatgcctgaaacaatgagccaagagcgccgtaacttattaaaagcttatggtgctgaactagtattaacaccaggatctgaagctatgaaaggtgcaataaaaaaagctaaagaattaaaagaagagcacggctattttgaaccacaacaattcgaaaatccagcaaatcctgaaattcatgaacttacaactggaccagaattagttgaacaatttgaaggtcgacaaattgatgcatttttagctggtgtaggaactggtggtacgttatctggtgttggtaaagtattgaagaaagaatatccaaatgtggaaatagtagctattgaacctgaagcttctccagtattaagcggtggtgaaccaggccctcataaattacaaggattgggagcaggtttcgtacctgatactttaaatacagaagtttatgacagcatcatcaaagtaggtaatgatactgctatggatatggcacgtcgtgttgctagagaagaaggtatattagcaggtatttcatctggtgctgcaatatatgctgctattcaaaaagcaaaagaattaggtaaaggtaaaacagttgtaacagtattaccaagtaatggggaacgttacttatcaacaccattatattcatttgataattaaaaactaaactaaaaatcattttggacgaagatttgtttctaaagttttaaaatagcgtgtatttcacgttgatttttcaactttttataaaataaatcttcgttttttatttaatcagaccaaccaatattgtagcttctatctaaaatcggctacctttttttaatatgccgataatatatactcaaaacttattgaaatgaatgatatcatgaagtagcagatgtccatgagtgttttattatcctttgaaaaaatgtttaagctatcaagcttatagtctgttatctttagtccaaaaactatttgaattaaagaaataatagttgtaaatcctaaaataatgattgaataagagagtgctgctgagaataaactgctcgctttggcgtcagatttaaatattttagaaataattagaaagattaaaaatactacaacaacactaaagattgttcctatgaaagcgcctatagttgtagacatacgaaacatattttcatccatttggctattagctatcgattggttatctaatagttcattactagtattatatgtgatgaaagcgctaataatagctaatactatcactatgattgatttaagtatccattttggctgatgtcttagtttgttaaaatgattaacaaatggaatacttgagttttgaatatcattttcttttaattcctgtgtactcatgtaatatatctcctttacttattaaggttagtttgatggtaacattttattacataatataaaatgcaaaatccttaaatttaattaaatatagttactaatactaatttaaagacaaaatgattgataatatattaaaaattataagatttagtaatttttttacatataaaagattaataattttacaaatgtgttatcatttccttgtgaatctattacacaaggagaatatatatgaataagaaactattgtggagcatcattggtattgtaattattgtcgtattaatcattgctgcttttatattaaaacaagttaatggttcaggtagtaaagatagtaatgcttacgatacatatacagtaagaaaagaaacacctattagtttagaaggtaaagcgtctccagaatctgtgaaaacttataacaataatcaatctgtgggtaacttcttaagtgtttcagtacaagatggtcaaacagttaaacaaggtgaacgtatcatcaattatgatacaaatgggaataaacgccaacaactattgaacaaagtgaatcaagcacaatctcaagttaatgatgattatcaaaaagtaaatcaaagtcctaacaatcatcaattacaagttaaattgactcaagatcaaagtgctttaaatgaagctcagcagtcattgtcacaatatgacagacaactcaatgacagcatgaatgcatcatttgatggtaaaattaacattaaaaatgattcagatgtaggcgaagggcaacctattttgcaattaatttcttcaaatcctcaaattaacgcaactatcacagagtttgatattaataaaattaaagaaggcgatgaagtaaatgtcactgtaaatagcaaatgtcccatataaagctcttgcataaacaggatgatgactatcaagcgttttaacaaatgcttttaattcatcatgtgctttcgtaaaacgtccacttccatttccatgggcaattactatagttgctttggttgaaccttcactgactttttcatcagcaattctattttctactaatgttttcatatatggatgtgtaccaagaggcgcactcattttactatcaatttgtggatatcgagctttcatctctttaagtatttgtggaatatcactgatataatgcattgcactaaaaatgagtaaaggtacaatacgaaattttgtaattccttgcttaatcatcttctccattatgatttcaagattttgtgtttcactttctaaaaatgctaactcataataatattgctcatcttttaataaagttccgataaattcttctaaagcttcattctgatttccttttctcatgccgtgagcgactagaatattacctatcataattatcccacccttttgtattatcattattacgaataattaaatcacatttgtgtactaatgtataatgtagcatcttaaat

SEQ ID NO: 4231 - DNA, 3827 bp, Artificial Sequence
  Description of Artificial Sequence: synthetic nucleic acid sequence
ggaggcacactatgtcacaaaaaatattagtggttgatgatgagcaatccatcgtgaccttactaaaatataatttagaaacagcagggtatatagtcgaagtcgcttatgatggtgaagaggcattgaaaaaagttgaaacagaacaaccggaactaattgtattagacgttatgttgccaaaaaaagatggtatagaagtatgtaaaacaatcaggtctgataaaaatttagtaccgattttaatgttgacagcaaaggacgatgaatttgatcgagttttagggcttgaactaggtgccgatgactatatgacaaaaccattttcacctagagaggtagttgccagagttaaagcaatattaagacgttctcaatttgtaaatgaaattgagaaggaagatgttgatgatgaagatattatcattggttcaattagaattcgacctgaattctttgaagtctataaagaagatgaattattagaattgacgccaaaagaatttgaattgttattatatttaattgaaagacaaggaagagttattactcgagaacatatgttgaattcagtgtggaattatgaattcgctggagattctcgaattgttgatgtacatataagccacttaagagataaattggaagaaaatcctaagcaacctaaattgataaagactgtacgtggtttaggttataaactggagagacctaaagcttaatgttgaagtttcatctgcgtttattactattaattagtactattacaatcattagttttattggtttaggcgctatcattcacaacacaatttatcaaacattaactagtaatcaaattaaaagcttagatagtgaagctcgtaattatgttaatctctttaataataataaagagaaagaaatcactaatatagctcataatgaaaaaaatatcatattaataaaagaaaaagataaagataaaattatttactcaagtggaaatattaaagatattgaccatagaattgataatgaagctaatccttcgaaattaatcaataaaaacacaaaactcggtatgcgttacacctataagaatacaatagatgataaaacaatatacataagtggaattaataatgaaattattgatttacaaaaagatttatggaaatacttgtctattgttggagtcattgtattatttacggtttatttagcaagtagaagtatcaatcgaacatatattagacctatcaatgaagtaacttatgctacatcacttctagcagatggatattaccatgttcgtgttccagaaagtaatgtgaaggaaactagggcattatttgtgactacaaatgacttagcacgacgattgcaaaaattaaacaatagtcaaaaaattcaatccaatagattaaaaactaccttagaaaatataccgagttcagtactgatgattgataaacatggagaaattgtagttgctaatcatgcttattatcaggtgtttaaccctgatcaaatggtagaaaataaaagttacattggtttcatagatgatagtattgaaaaattaattattgaaagttttagaactgaaaaagttatctatgaacaattagaagttgctattaataacgtacatactaaatatttcgatgtatcttgtatccccattttaactaaatctaaaaaaaatttacaaggtatggtggttgtgcttcatgacattactaatttgcagaaattagaaaaccttagaagggaatttgttgcaaatgtgtcacatgaactaaaaacaccgattacttcaatcaaaggttttgcagaaactctgattgaaggtgctaaaaatgatgaacaatcgcttgatatgtttttaaatattattttaaaagaatctaatagaatagagtcattggttacagacttattagatttatcacatatagaacagcaaaaagaacttgaaataaattacatgaatttatctgaattagctattaatataatagataatttgcaaacacaagcatacaataagagaatcaaaatacaatctgaaattgaaaaagatgtcatcattgaggcacatgaaaataaaatagcgcaagttattactaatttgctatcaaatgctataaattattcttcagaagataataaggtaatagtaagagtatatagaaatgacaataaagtttatttagagattcaagattatggtattggtataagtgaaacagatcaaaagcgtatatttgaacgtttctatcgtgtagataaagcgagaagtagagattcaggtggtacaggacttggtctgtctataacaaaacatattgttgaagcacataatggtagaatagacgtgaaaagtgcacctggcaaaggttcgatattcaaagttctatttaatgataattaaatttgagggcactacattgtcggtacagacaatgtggtgtcctttgttgtagtgattatttagaaatataatgttaagacttatgctattaattaaaatcaaaatacatcttgtcattgacagacataagatgagtggaaattttttaagaaacatttaacttaatatttctttagcatttataagttaaatattagtaatagctaatgcgtagtgaatactaaactcgcttactcgttatgtatttgtatatatgctaaaatatatgtaaatctgttctggaggttacgtattttgaataaattagtattaatagatggtaatagtctaagctttagagcgttttatgctctccctttactttcaaaccatgcaggtattcatacaaatgcagtttacggctttgctatgctcttagaaaaaataattaaagaagaaaaaccgaatcattttttagttgcatttgatgcaggtaaaacgactttcagacattctaagtacagtgaatataaaggtggtcgtcaaaagactccacctgaattaagtgagcaatttccatatattcgtcaacttttagatgcgtatcatattaaaagatatgaacttgataattatgaagctgatgacattataggaacattaagtagacaagctgatgaagaagattttgaaaccattatcattacaggtgatagagacttaactcaattagccactgataatgttacaatatattatacaaaaaaaggtgttaccgacgttgatcattatacacctaaatttatagcagagaaatataatggtttagtgccgaaacaaattatcgatatgaaaggtctaatgggggatacctctgacaatattcctggcgttgctggtgtcggcgaaaagacggctattaaattacttaatcaatttgagtcagtagaaggggtctatgaacatattgaggaggtcactgcaaaaaaattaaaagaaaaactcatcaatagtaaagatgatgccttaatgagtaaagatttagcaacaatcaatgttcacagtccgattgaagtatcattagaagatacaaaattaactctacaagacgacactacagaaaaaattgaactatttaaaaagctagaatttaaacaactattagcagatatagacacatcctctacgaatgaagaagtcatagataaaacttttgaaattgagcaagactttcaaaatgtagatttgaatgatttaaacgaagcggtaatacattttgaactcgaaggcactaattatcttaaagacactattctcaagtttggtttttatacaaatcatcaacatgtagtgataaatgctgaggatgtaaaggattataaacatttagttcaatggcttgaagataaaaatacaactaaaattgtct

SEQ ID NO: 4232 - DNA, 3019 bp, Artificial Sequence
  Description of Artificial Sequence: synthetic nucleic acid sequence
taggtgtatttaatttaaatggattctttgagccactacaacacttaatcgaccatatgattaaagaaggatttattgatgagaaatatcaaaagcttgcacctttatatgatactaaagaatcactcatcgaaggacttaaacattacaaaccacttggtgtacgtacatacgattaataaagtaaaaggtagagaacccacaaatgatttcatctaaagaaacatttgtgggtatttttcaataaaactattaaactctttcatgtttattaaaatctatcttaaaattaagtatcaaataaacataatcatttattatttaataactttgtagtttatattattgacttattattttcaagttttttattatatggattatcatttccaattatacaaaaactacaaatccccatccgtgaaggtgcttttatgaatcacaatttcatttgtacaagaactactaactttcctttcaagaaggaagtagctctttataatatcttacatgacgtttaaggggatggtatttactaagattcggatattcaaaattgtctaaaaaagtcattcctaatttttccatgacttttctagaaggcaaattattttcagaagtaaaactatataattctttaattcctttatctctagcatatttcattacggcttctgccccttctgtagctagaccatttccccatacttctggaattagcctccaacctatttcataaaacggtaactctttaaaagggtaatggctatcttttgaaacgtaattcacacctataaaccctaaccattctcccgtctctttcaactctacagcaaataaacctaggccactctcttgtattatgctatccatattttccatgtctatctcagaacgacgataactaagtaaactagggaagtatctacgtacttgcgcattagcattcattttttgaaaaggtaataaatctttggtttcccaatctcttaagtttaaacgttcagtttcaatataaataaccatcttaaacactccatttaatcgaaaatgcttattttgcctatattttaatataaaattaacgcgttatgaagtttttaactctactcatatcgcgttatttaaacatatattcttttttatatttattagtttttagaaatataactaatcaacttaatgtgtaccggtatttctttcaaacgatcactttgatttttaggtgcaacaaatgttgcatcaataaaatcattttgatgattaaggtggtatgttgctacaaatgtatctgtatctgattcaaagttaggcaaatgtgcaatgactcgtttaatatcacttgttgtatctttaatagtacgaccagttagattctctaactcacgacctaattctactaatgtcatctttttaccttctagaatattaaaatcttgttcatgcatcgttcttctctcctcttaaagctatcaactattcgctatcttccaatctaaatgtttgttaaactcactaatacctattcgcaacatataatacccttcccgtttcgtatttaaacgttaggaataactacctatcgttcttgtcgatgattattttttctatcattctgtgagggcttctgctgtgtatgtggtttagaggattgactgtcatgttcatcttgattgctttttattttgttagtttgatcatcatgattagcagatgtcgattgattatctgaagacttttcttttgcatcatgattatctttatttttcttatctcgggatgtgcttttagcaggcaagtcatttacatcttcttggagactatcctgtttgtgtttaagcttatccttttgctcttgtaactttttcttctgtttttttaaatccttattttcttttttcaactgatcaatgcttttttctaaagaagctttttcgttacttttaccacatgcagttaacaccaatgttgtaattaatagtaaggttaaccattttctcatgatagactcctttgtagttacttatcgatactctttattttaacatggttttttgatttaatcattttttaacataaaatatcatttcattacatttaatttcccaaagtaacatatatatttaatggtaaattatttactctttatttataaaagttttacttttattaaagttatctttttagttatgatatcattcgcgctattttatcaaaattaaacgacgtttgtgtgaaatagaaaaaagatttacaattcctataattttgtctaatagcccttttgaacttgtataagagtaatgatatacatgtgataattatgatatgattgtgtttatcatactaatcatcatgtttttaaatgatactttaacttagttatcctttttaaagtagtatttatttatgaatttaaaatttaagggagtattttattatgaaatccactgcgcaattaacaaaggagaataatgtcaaagctttgcgactgaacaataccgatcgtgaaatatttgaaaattacatgacatatgtgcgtgctgacttacgagttaaccctcacgattcagaattaatgttaaaccgtactttgaaacacttaattcgtgcaggtgatactggaatgcttgcgatggagtttttcaaccatgatcctaaagcacatgctaaaaaagagataagggaactcccaaatgaaacatttaaaaacatttttaaatatataagtcataacttcattcttttaataggtattttttgttttctcaaaggattgattggcttttttatagggggcgatagtaatttactatatttatatacgtttcccctaactgtcattattggtttagtaattatatttttatttatttggatgaactttaaaacggtacaattacagtgctttaacaactcttattggacctggtggctcacctatggtgtcatcgcattattattaatcactcttttttatgttttttttataccgcaatcatttttagcgtttggacca

SEQ ID NO: 4233 - DNA, 3069 bp, Artificial Sequence
  Description of Artificial Sequence: synthetic nucleic acid sequence
agattttacaggtggcatatatgctgtgtttaaagttagtcatacaaaaataaatatagagaagttctttagcaatttagaaaatattttaaatgaaagtcatttgcgtatgagaaatgaaccaattatagagagatacattgaagaagagggaacagataaagtgtgtgaaatgttagtgcctatctatgaagtaaattaaaaaacatagacaatttcgataattttagtattcatactaaaaacctttatagcaacaaaacacattttatttataataaagaaaatataagtttaataaaaaaactcccacctgtctggcgagagtttaatgattggtaactttcattacctagtaaaatctggaacatcttacaatatttcaattttatacgtaatgatgataaacaaactgaagataagttgatatacaatcatttctataatattgaaatagactaacgtatttcatacgtgcgttttattaaattcctttgccaataccgaatccgaagtataggattgctataaaaataactaagacaattctataaatagcaaaaggtactaacttaactttattaattaagtgtaagaatgttttaattgcaattaatccaacaataaatgccgctaaaaatcctaaaatgtagaatggtatgtgtgctaaatgaatatactcataatgttttagtaaagataatccacttgcagctaacataattggtaccgacataataaaagtgaaatcagatgcagctttatgattcaatttcataagaacacctgttgaaatcgttgaaccggatctactaaatccaggccacatagctattgcttgagagataccaatgacaaatgcttggaaataattaatttgatctactgtttgaggatgctgaacagttttagaatacttatcagctataatcatataaatggcacctataaataaaccaattaagactgttggtacactaaataagtatttttcaattaaatcatcaaataaaaatcctaaaatccctgctgggaccatacctactaatacatgtattaaattcagacgtcgtggttttgaacgtctgtctcccgaagtggaaggttcaggtttatgttggccaatatgtaaaatttctaagaagcgttctctaaatacccaggcggccgcaaatactgaacctaactgtataacaactttaaatgtgaatgctgattgagaaccgagaaaattagttgactttaaccacatatcatcgacaagtatcatgtgcccagtagatgaaacaggggcgaattcggtaagtccttctacgatacctaagatgatgccttttattaattcaagtaaaaacatactttacccactttcttatctctattaatttattactagtactcaaaataccatattatcatagcatagaaaatcatattgatggtgtttacaatctaaatactagaccaaagtcttataaatgtattaagttgtgactagaattattctgtgagcgaattgattttaattttttgtaaacactctataatatatgtaggtgatattattgtgaaaaaactaacaaaaatggttttaagttataaattataccccacactcatgttaatcatgagcgtttttttatcttttacggtcgttgcgcaaaacatttcaatttcacactttttaaatcacttactgtattatcaacaacaatctttattattattgttatcagttatttttatctctcttattttaagagcaacatttaatatgctgattcaatttttaggagatcatttggcatttaaagtaaaacatatgcttagagaacaagtgattttgaaaaaaagtgtccgttcaattggtgaagaaataaatattttaactgaaagtattgatggtatcggtccgttctttcagagttatttacctcaagtctttaaatcaatgttgattcccatcgttattattattaccatgtgttttgttcatttacctactgctattattatgatagttaccgcaccttttattccattgttttatgttatttttggacttaaaacaagagatgagtcaaaggatcaaatgacatatttaaaccagtttagtcaacgttttttaaatacagctaaaggtcttattacatttaaacttttaaatcaaacgaaacaatctgagcaacaactttataaagacagtacacgttttagagatttaacaatgcgtattttgaaaagtgcctttttatcaggacttatgcttgagttcataagtatgttagggattggattggtcgcattggaagcggctttaagcttagttgtatttaaccatatcaactttgtgactgcagcgatagcgattattttagctcctgaattttataatgcgattaaagatttaggtcaagcatttcatacaggtaagcaaagtgaaggtgctagcgatgtggtgttttcatttttagaatctgaagataaagctgattctcctacattaaaagtggatgagcaacagtttgaacaagttttaattaagcatgttgattttcaatacgctaatagtaatcatatggctttgaaaaacatttctttttcggtaaataaaggagaaaaggtcgctattgtgggaccgagtggtgcagggaaatccactttagctaagttgcttagtcaatcagtaacacccacacatggaacactttcatttaaccaagcatcattaaatatcggatttctaagtcagcgcccacatatatttgcagattctatcaaaaataatattgcaatgtatgatgatgagatatgtgatgagcaagtgattcaagtgcttgatgaagtggggttaaaagagaaagtactttcattaaaatatggtatctatacttctattggtgaaggtggggaaatgttatcaggtggacaaatgagacgtattgagttaagtcgtttattattattgaaaccagatattgtaatttttgatgaaccagcgataggattagatattgaaactgaaaaggtcatacaacaagtattagagcatcatttttctacaacgac

SEQ ID NO: 4234 - DNA, 3229 bp, Artificial Sequence
  Description of Artificial Sequence: synthetic nucleic acid sequence
atagttaacaagtgtatttttacatctagaggtgattatctactccactagttcctaaccttatgatgtacaggtcaaattaaagtcattctcgtataagattgaatttactacggtaacattagaaaatgcagactacatataaagtaaatataactttaaaaattaactccctattctgtctgcttaatgaaaaatacgcataatcattgataaatcaaataatgattatgcgtatatcaattatacgtctcgactatccatttcttttcttaaataagcttctatgaatgggcctatttctccatccataacagcgtctactttaccagtttcttcattcgtacgatgatctttaatcattgaatatggatgaaagacgtaagaacgaatctgacttccccatccaatgtctttttgttcgcctcgaatttcagccatttcttgctcttgctcttctaactttaaggtattaaggaggtcgatccctctcttattgaagcggctaaaggcattggaatgaaaccacttagaagattgaccaaagtcgaactccctattgcaatgcctgttatcatggcaggaatacgcacagctatggtattaatcattggtactgctacactcgcagctttaataggcgctggtggtctaggagatttaatattattaggcattgatcgtaacaatagtgcactcattttaataggtgctattccagctgcacttctagctattatttttgattttattttaagatacatggaacgtttatcatataaaaaattgctcatttctttagggacaattgtaattgtgattatcatagctattgccatacctatggcagcgcaaaaaggtgataaaatcacattcgcaggcaagctaggttcagaaccgtcaattattacgaatatgtataaaatacttattgaagaagacacagatgatactgtagaagtcaaagatggcatgggtaaaacctcattcttatttaatgcgcttaagtcagatgaaattgatggttatttagaatttacaggtactgtattaggtgaattaacgaaagaagatttaaagtctaaaaaagaaaacgatgtatatcaacaagcaaagtctagtttagaaaaaaaatatgatatgacaatgcttaaaccgatgaaatataataatacgtatgcattagctgtaaaacgtgactttgcaaaaaaatatcaaattaagacaataggtgatttacgcaaggtagaagataaacttaaaccaggttttacattggaatttaatgatagaccagatggatacaaagctgttaaaaaaacgtatcatcttaatctttctaatgttaaaactatggaacctaaattacgttatactgcagttaaaaagggagatattaatctcatagacgcatactctactgatgcagaattaaaacaatataacatggtagtattaaaagatgatcaacatgtatttcctccataccaaggagcaccgctatttaaagaaaaatatttaaaagaccatcctgaagttaaaaaaccgctcaataaattggcgaatagaatcacagatgaagaaatgcaagaaatgaactataaggtaacagtgaagaaagaggatccttataaagtagcaagagaatacttagaaaaagaaaaattaataaaataaaattgtgcgtttcgagatggatttgatagctattcgatgtctaaatggtacatcgaatagctatttataatttaactatttcaaccgatatagtgaatttaaaatgtaatgttagaagtgtgattgattttaaggtatgagtttgtttataataggtactaagttttttaaaatttcagtcaatttaaggtgtgatttatgtatgaagaaacaattagaccaattaacagcatatacgccagggctttctccagaatctttaaaaaaacagtatggcattaaaggtgaattacataaacttgcttcaaatgaaaatgtatatggtccaagtccaaaagttaaaacggctattcaatctcatttagatgaattatattattatccggaatctggatcgccaaaattaagggaagcaataagtcaacaacttaatgttgatgcatctcgtattttatttggtgcgggtttagatgaggttattctaatgatatcaagagccgtattatcaccaggagataagattatcactagtgaatctactttcggacaatattatcataatgcaattgtggaatcagctgatgttatccaagtgcctctcaaagatggtggatttgatttagatggtatgttacaacaaattgataataaaacgtctttaatttggttatgcaatcctaacaatccaactgggacttacttttcgcacgatgaattatttaatttcttaaaacgtgtcccaagtgatattcctgtattaattgacgaagcatatgtagaattcgttactgctgatgattttccagatacgctaaaattacaggaggattttgacaatgccctttatcaatggtaatcacatgacctgaatgttgataccatttgatttctttttcatcagaatcgacatgattatatatataatttgctgattgaggatcaatcattgtatcttgttctgcttgtacgacaagtattggatcaattacttcatcgacatgttctttaactccatttagagtgtcactcagttctctcagggtttcagttggatgaaattgttccatttcttgatcaatcgtttgttgatctttgccttcatattttttaaagttacgtgcatattcaagaaagccttcataaatcgaaccttctgttttattctccataggtgcacacatagttataatccccttcacatcacgatttaaacttagttttaatgcgaaggcgccacctaatgataaaccagctactgctatttcttcgtaaccttgatctactaaataatcataaccatctaaaacatctttaaaccaaacaaaagggctagattttaatatttcttctgggggcgctgcatgtccttcatattgtggagcataagatgtatagccctttttttgaagataacgcccaagttgtcttacatcagcagagttacctgtaaagccgtgaagaagtaacactgcacgtttcccttcttcaaaaaagaatggttttggtagtttaatttgcatgattaaaatccctctcccttatagtaagcttt

SEQ ID NO: 4235 - DNA, 3283 bp, Artificial Sequence
  Description of Artificial Sequence: synthetic nucleic acid sequence
aataataaaaatggttacaattatttactcaagtatttgaatgacttagaccacccacaactcatttttgaatctacaggtatctattcaagaggtatggaacgattttgttgtgtaaatcaaattaactatattcaaatgaatccgttagaagccaaatttaaaacgagcgctctaagatcatggaaaactgatcaggcagatgctcataagcttgcttgtttaggaccgacgcttaaacaaacagacagcttacctatacatgagttaatattctttgaattaagagaacgcgtccgttttcatctagaaatcgagaatgaacaaaatcgacttaaatttcagatccttgaattactccatcaaacattccctggtttagaaagattgtttagtagtcgatattcaatcattgcactcaacatcgcagaaatctttactcattcagacatggttcttgatatcgacaaggaggtactgattacacatatattcaattctacagataagggaatgtcaatggataaagctacaaaatatgcacttcaattaagggtgattgctcaagaaagctatcctaatgtcgatagacattcctttctagtcgaaaaattacgcttacttattcaacaattaaaacaatctattcatcatctcaaacaattagatgatgccatgattcaattagcacaacaactcgattattttgaaaatattcattcgatacctggtattggtaagctaagcacagctatgattattggggagattggtgatattaagcgatttaaatcaaataaacaactcaatgcttttgttggcattgatatcaaacgatatcaatcaggtcatacacactgtagagataccatcaacaagcgtggtaataaaaaagcgagaaaacttttattttgggtgattatgaatataataagagggcagcatcattatgacaatcatgtcgtcgattattactacaaactaagaaagcagcctaatgagaaacctcataagactgccatcattgcttgtataaatcgattattaaaaacaattcattatcttgtaatgaatcataaattgtacgattatcaaatgtcaccacattagccaaacgtacaatcaaatatagtttaacaccttattcaaaaaaattaaaatgaacggtttagttaagtaatgcttattttaattataagtacttgactaatcgtaggaaagagcctgagacataattcctagcaaaatagccagtaaatgagttttcataaattcatttactggcttctttatttacaatacttcgtattgttggctcgctttcttagaggacagcttcagcctgtagtcttcagcttgtcctgttccctcaagagtctcgccaaaatactttgtattcatatgtaattttacattaaaatactttaaaaaaataaggccctttcgtataatttaataaacatcactaaactaaattaacgaggtgccttatgtataaagattataacatgactcaacttactctaccaatggaaacttcagttcttatccccacaaatgatatttcacgacatgtaaatgatattgtagaaacaattctagagactgaattcagacatcatcgtgatgcaatatcataccatccaaaaataatgttaaaagtagttttatatgcctatacccaatctgtgttttcaggacgtagatagaaaaaatacttaatgataatattcgaatgatgtgtctatcataaaatcaaaagccttcttatataacaattaatcgattcaaaagcaaataaaaaaataatgaaaaattataattgggaatattttaaagtccaaattattaaaaagttttcagaaccaaaaacaaaaagcatctacagtcaagaaaaattgatgtggagcctgtttttggatttatgaaggctattttgggttttactcgaatgtccgttcgagggataaataaagtcaaaagagaactaggatttgtgctaatggcacttaatataagaaaagtaacagctcaacgagctgaaaataatcaaaaaaataataaaaaagacaatttctatataatttcaatagaaattgtcttttttatttatcttggaactttaagtcccacactctttatttatgtgagatagtttgaaatttccaatatatcattttaatctcgtttgctttgtttaggtgtcacatttgttcttaaataatcgtcaacctcaatacctctatcactaaatagtatacccactttttccaaacctatttgctgaacattaggctttctaccggttgcatccagtacataatctgtttcaatcatctttccagactcagtttctactataaaacgttgtgcattcggtttaactgacttggtattctcactaaagtaaaatttaacaccttcatcttttaacttttgaattaatttattgacgtgtgattcgttaaacccttcaagtgcatgatttgtatgatgaaccacattaacctctacacctgatttgatcatgatagaagcgaattcaatactgataatacctgctccaataaaagtgatactatccggtaaagattgcattgataaaaattcccgactatcatgcgtatattctttaccctcaatatctaattgatgactatgttgtccagttgctataacaatataatctgattgtaaagttgtattatttacctctattgtatgaacatctacaagtttacctttccccatgattacatcaattccctgttgttcaaacatcgatgtgagggtttcagacataggattaatgacttgttctttgtaatgcattaaattcttccaattcacttctaaattgtgactatcaataatattaggatattgtttggcttcttcaagcacttcataaggtccctctaataaaattttcgcattacaaccatagttagtacatgtaccggcgatggtatctttttcaactacagctacttgcttaccactttgctttaatgttaacgcagcatgccaagctgcatgaccacttcctaaaaatactacatcatattgtttcattaacactcatcctttcttatttttctatgagatgttttaatgtttgctctagttcttcaaacacatatttcgtttcatcatactcagtcgtatcaaattcttgtggtaagcaacttgaaattgcttcaaaaacagcttcttgttgttgttgcccattgtcagttaacgtaattatcaactgtcgtttatcagattgttgacgttctct

SEQ ID NO: 4236 - DNA, 3305 bp, Artificial Sequence
  Description of Artificial Sequence: synthetic nucleic acid sequence
tcattaacaccatattctaacggggcagcagtttcattcacatcattaacaatagcctcatcagtaatatgcactacaaactcacctgattgttctatatttattgaggtgtcttttctatttccctttgtacgttgaacagcaattgcaatcataggtggtgtatgattaactacattaaaaaaactaaacggggctgcgttgatatccccttttaaattttgagtagttacaaatgctatcggcctaggtataatacttccactaagtaatttataattttgcatatctgaaagtgtttcagcttttatttttttcactatcaatcaatccaatcaatttttattaaaaatataaaatttactatttaactattgttgtccctttgcagacataattataaataaaaagttaaagaagatcgtatattcaattgaatcactgttagcctataagataagaaagcctaggacattgatatttgtcctaggcgcttattatcataaacaaatcttatattaaactgtataggtttgtatgatgtttagcaccttcgtcgtgctttcacttcgaaaaatatatactaatcaacatgctatagttaagttaatctatttgagtcccaccagtcacaccatatacttgaccggtaatataacttgcatcatcagaggctaataacacatatgtcccagcacattcaactggctggccggcacgtcctaacggtgtgttttgtccaaaagtaggtatagcgctttgtggttgtccaccgacaatttgaagtggtgaccaaaacggtccaggtgcaacacagttaacacgaatacctttagggccaagttcggctgaaaaactctttgttaaagatataattgcagctttcgttgcagcataatcatgaagaattggactaggattataaccttgaactgaagatgttgttgtaatcgagcctcctggttgtaaatactcaagcgctttttggactgtccaaaataccggatagacattcgtttcaaacgtttcggtaaaatcttgagttttaaactccgataattcatcttgataaagttgatgaccagcaaccaacgttacattgtctaaaccacctaattgctgataagccttttcaaccatgtcatagttgaattgttcatctctaatatcaccaggaattaagatagctttttgcccaacattttcaataatctgttttacatcatcggcatcttgttgttcacttggtaaataattaatcgctacatctgcaccttctttagcataagcaattgctgccgcacgtccaattgctgaatcgccaccagtcactagtattttaaagccatctaatcgatggtggccatgataagaatcttccccacaatctggttgtggtgacattttagcttgtatacctggaacttcttgttcttgtttttcataattatcagttttaaatttattgcgcggatcttgagctgacatttcaaatcatctcctaattcatttaatgctttctgtatacccagttatcatgtacgtttaatcatagaaaatctgaaatcacttcaatttataaaattatgtcaataaacgttgaacgagctgaacgaaatattgaggaactttttccaaaatacgctcatctggatgatatttaggatgatgtaaatcatatttactgtcggagccaataaatgcgaaaacaccggggtattcttctgtataacctgaaaaatcctctccaatagtaaccggttcatcgagcattgatacatgatagccaacatttttagcgacctcgattgcttcttgtgttagatgtgcatcatttactactgcaccaggtagtcttgaataagttaaatcaatatccacattaaaaacacgacttaaaccatcagcaatatttttcatcctattttcaatataatgacgtatatcctcatcgaatgaacgaacagtgccctgtatataagctttgtcagctataacattccatgtgttaccacaagaaatttcaccgattgttacaactgcactatcaaaagctgataaatttcgactcacaatagtttgtaaactattgataagttgtcctacgacgatgactggatcatttccttgctcaggttttgcagcatgcgcacctttacctttaacattaaactcaaaacgatcgacagcagaggtaattgcacccgatttaatagcaaattcaccaacttttaaagtgggataattatgaaaaccaagtactgctttagctcctttaagtactccagtatttatgatttcaaatgcaccatgtcctaattcttcagcaggttgaaatattaatcgaacgcgtccatttaattcatcttcaatctcttttagttgaataccagtagctaatatacttgccatatgaatatcatgaccacatgcatgcattgcaccttgatactttgatgtaaattcatgcttcacttgttcttctataggcaaagcatcaatatctgttcttactgctatcatttcctctccttgcccaatttctgctactaaacctgtttttaaaggtacctccagtatacgtataccataacttttgagtatttttcgtaacttttctgtagtttcatattcttcatctgaaagttcaggatattgatgaaacgttcttctccaatctacataagtagaataatttgtcatatatcgctcagccctttctcacacttcaaatttattcatatacttaactagtgatttatcattcttttaattaacttaattgtcaattttattaagagtatcttaacattttatcggaaaattctaaatattcaacatttttgagagctagtttattaaaattatttaaaaaagcgaaaacatttttaaacagtcacatttatcattaattactgcctagcttatcggaatatatgataaaaatgcattaaaaattctctttcatattaaaatgaacaatcttcacaataaatggttagtacgattacgacaacaagtgtgacattttaattagtgattaacacgctatttctcattcagtcataaactgtcaacatgttaaaatgcccgagacatcaacgaatatcacaggcattttgaaactaaatatatctaaaattattaaatttttacatgacgacttctaactttaaattaaacaatgatgtactaaattagcaactaatttagcagttctttgatctgaatcatacgtcggattcatttcagctatacttatagattttactttttcacttggaatgacccgtttagcaagttcg

SEQ ID NO: 4237 - DNA, 2941 bp, Artificial Sequence
  Description of Artificial Sequence: synthetic nucleic acid sequence
atcgtgaatgttccctcaagacgtaaagatatttctattaaagaagacttaatagaagaagtagcacgtatatatggatacgatgacataccatcaacgctacctgtatttaaagatgttacaagtggagaactaacagatcgacagtttaaaacgcgtactgttaaagaaacacttgagggcgctgggctagaccaagctattacttattcattggtatcaaaaaatcatgctaccgattttgcactacaaaatcgtcctacaattgaactacttatgcctatgagtgaagcacataccacattacgtcaaagtttattaccgcatttaattgatgcagtatcatacaatgttgctcgtaaaaatacaaatgttaagttatatgaaattggacgtgtcttctttggtaacggtgaaggtgagttaccagatgaagtagaatacttgagtggtatattaactggagattttgttaataacacttggcaaggtaagaaagagtcagttgatttctatttaactaagggtattgttgaacgtattgctgaaaagcttaatcttcaattcgattttagagctggtcaaatagatgggttacatccaggaagaacagcaattgtgtcacttaatggtaaagatattggcttcataggtgagctacaccctacgttagctgcaaacaatgatttaaagcgtacgtatgtatttgaacttaattatgatgcaatgatggaagtttctgtgggatatattaattatgagcctatacctagatttccaggtgtaacacgtgatattgcattagaagttaatcatgaagttacttcatctgaattgttatccattattcatgagaatggtgaagatattttaaatgatacactcgtatttgatgtatacgagggtgaacatttagaaaaagggaaaaaatctattgcaattagacttagttatctagatacagaaaacacacttaccgatgaacgtgtaaatgttgtgcatgataaaattttagaagcacttaaaaagcatggtgcaattattagataattatcataaaggacttacgcattagtaataaatactagtgcgtaagtccttttatttattgtatttttgattcataagatgaattgctttatctctgtttttaaaatgtttttttgaaatagtatcaagttgttgaatatcatatttttgaatgactttagcggcaattaaatctactttgttacttgctccttttggtatttccatatggagttttttagagatgtggtccatgtgtttaacaaatgcataacgagaaataatgcttgctgccgcgattgctagtgatttagattcaccttttgtttcaaattttgttttgtcaggaaaaggtaatgctgataatgcataatgttgataaacttctcgctttgcaaattgatcaataacaatataatccagttgatcttgctcaattttttgaagcacatttttgatagcttcattatgtaagacagctttcattttaacttgagaccatcctagactttgtcgttcgttatacttaacattatctaatgttaataaagaatgcgggataaaggtaatgagctgttctgcaagatcgacgattttagtatcgcttagtttttttgaatcatctacaccaagttcttttaagattttgatatgtgattggctcacataagctgcacatacagtcaatggaccaaaatagtcgccactgcctgcttcatcgcttccaatacaatgaaaacgattatattgaatactagttgtatttgatgatgtatgtttgccagttgttgattgtttatttggtagcaattgactcgcaagttgttcagcattcttaccttgaaacattactttgccagaactatagatattgataacagtattttgatatctcgtacgagctttcataccttgaggtaacttcgtcgtctcaaaagtagtttgagccatcaatgattgaatttcttttgacgtgagtttgtatacgacatttcccattaattgaatcctctcttttttgtactcttttatattttatcaaattttaatattgaagatagtcttaaatgatattgttgaatatgtcatctgtattatcttttaataacagacgtttacatcggtatttacactcatgtataatatttgatgataagtaaaaatatgtaaaatactacaatttacaatttaataaattggagtttgaaaaaattgtttaagttaaaatcattttaatccaaggtcaggagaaattagtatgggtgaatttaaaaatagaataaatgttacgattaatgatcaacatttcacaatcattggcgaagatagccctgaacatattcgttatgtagcacatcttgttgatgaaaaaatgcaagaattaggtcaaaaatcagcaggtttagatacaactcgaaaagcgattttaacatctgtgaatattatgcatgagaaagttatattagaagaagagaacagacgattacagcaagaaataaatcaattaaaacaaagagatgaataaatgctcattgatatagttgttcttcttattatttgttactttatagtgatagggtttcgtagaggtatttggttatcgatattgcactttgcttcttcaattgtatctttatatattgcgtcacaacattatcaatctattgcgcaacgtttagttgtctttgtgccatttccgaaaacggtggcgtttgacatggtctatactattccttatgatcatttgcaatacagatttgaaaaagtgatagcatttattataatatttggtatgtgtaagcttattttgtatctagttgttgttacatttgataatataataacgtataaaaagatacatttagtaagtcggatatcgagtgtcgttttgagtatcatagcggtttttata

SEQ ID NO: 4238 - DNA, 3403 bp, Artificial Sequence
  Description of Artificial Sequence: synthetic nucleic acid sequence
cggttcgcatatgacgcgtcaatatttgaatgtgtcaccattaatatagtttgatgcttttgattaatttttcgaaataaacacataaggtttttagaggtttttgaatcaagtgcaccagtgggttcatcagctaataataatttaggtcgtgctatcaacgcacgggctatagctatccgttgtttttgtcccccagatatttcagacggatatttttcaagcaagtcttcaattcctaattgttcacttatttccattaagcgtttttgcattattttcggacgttcatttgcaagtacaagaggcatcaaaatattatctttgttcgacatcgtattcaacacattaaaatcttgaaacacaaatcccatcatttctctgcgaaagcgtgcaatgtctttattcttcaattgattaagcggcaactcgtctaactttattaatccttcagttgtacgatcaaaagtagcaattaaattgagtaatgtagatttacctgaacctgactcgcccatgattgctacaaattcattttcatcaatttcaaggttcatttgatttaaagccattgtcgtgttcatacctctgccatagacttttttacatttttaacctctaataacactatgcaaactcctttctacccttctactacatcataaaataaaaagaatgccaataacattcatgaaatcttacaaatatcattggcaaacttacaattttgaaagtttattatttttctttagtaaaatgtataaaaaatactgtcccatgattcaactctgattgtacagttacttgtatatttaaatgatttgcaatgtgttgcactataaatagacctataccagttgattgttcattcaatctaccgttaaatcctgagtatcctttatcaaaaattttaggaatatctgctttactaatcccaataccattatctttaatctgtagagtttgattggcaacatcaaaatctatccaaatatctttacctttagcatattttaaagcattatttaaaagttgctctatcattatagaagcccattgtgcatcggttaaaataatgtcctcacttttttcataatggatttgcgtcttttgttcaataaactgaattctatattttaaaatcaacgggcgaatcaaatcatcaactgtcactttggtaattgtcatatctgactcttcatttaataattttaaataacttaatgcgagacttgtataattatcaatgtgcacaatttcttgtcgaacacgattaactacattctcctcgtttctctccaaaagtaattgtgaggcagtgataggtgttttaatttgatgtacccatgttaaaaaataactttcaacatcgttacgatattcaatttgctgattcttaacatgtgctaactcatgttctaaatatgctactttatctttaagatgttcattctttttaaaacttaaatactttatccaccaacgtacacacatcaatagtaatattatactgattgctagtacgtatgcatcaaaaggtaaagaaaacacataaaatataagcgcaaaaaataatagaattattaaaataattgaaatctcattacgaatcgattgaatatatgcaaacttcatatgtctcaaaccctgtatcctacatttttctttgtctcaattaaatcatcgacaccgatagaaagtaatttttttcgtaatcgtgtcatatttactgcgagcgtattatcatcaataaaattctcagactcccaacacttctcaattaaagctgtacgacttacatatttattttcattttgaaataacaattttaatatctgtagctctgttaaggaaagttgaacatgttcattatccttgctaagcttggcctcatcaacaattagtttacaacctttaacagctatttcatcacgagctattgataaatcataagtgcgacgcaatagtgcctgaattttagctactgttaaagacaagttaaatggtttctcgataaaatcatcgccacccatttggatagccagaatttgatccatattatctgttcttgaactaataaacataataggcacatgagatacttttcgcatttcttggcaccaatggaagccattaagtgttggtagattgatatctaataatacgagttgtggttctactcggcgaaaatcttccattatcttttcaaaattatcaaccacatgcacctcataattccatttagatagctcattagctaaactttcagcaatcactaaatcgtcttctacaatgaaaatcttcatatatgttcacctttcactatcttttcactcttatttatcatcatttgaatttttattttgttgttgttctttgtcgatataatcatgttgttgctgatctacatgattcgaattttgttcttttgaatttttctttctacgtttttcttctaatacgcttagtacaataaacaaaataattaatattggagataacattacaaatatcattgtctcaccttctcttagggtctctagctcccaataattatgatacctattatagattattttacatgtttattaataggaaatacattgtcatgatgctattattttaacaatattataactttgagagatataaacgaacatcgaatatagagtcatacattttatttaagtgataaaattttataatatgtaaaaataatattactttacattatatttactaaaaactaactctcagtcaaagtttgtcttctatacttaaattatcatacatattgggaggcaatttatttatgaaatttatgaacaaaatgggtaagacgacgcttgcttcatcaatcgtagcagcatccgttttaagtacggtaaacgtatcatatgcttcaggtagctcagaacaaagtgctcaaactaagcaaacacaaaacgatgccattgctttcggcaacacaaaaaatccaaaaaatgtcatcttcatggttggcgatggtatgggaccttcttttaacactgcatatcgttattataaaaataagcctggtgctaagaaaatgactccaactgcattcgataaatatctaaaaggaacaaatcgtacttattctaatgatcctaaagaaaatgttacagactctgctgctggaggaacagcttttagtaccggtcacaaaacatataacggtgcgattagtgttgatacaaataaaaaaccaattaaatctgtgctagaacaagctaaagaacaaggaaaatcaactggtttagtaactactgctgaacttactgatgcaacacctgctgtatatgctgctcatgtagattcacgcgacaaaaaagatgaaattgcacagcaattttataatgataaaataaatggtaaacat

SEQ ID NO: 4239 - DNA, 3161 bp, Artificial Sequence
  Description of Artificial Sequence: synthetic nucleic acid sequence
tgtaatcgttcattaattttcgattgcccacaaggatttgttgttgatgaatcgtagctttaataccatgtcccggaattgatttaaaagtgtcattatcaagtaaattaagacctttatctttagcataagtaacaatagcatcagcaagaggatgttctgaagcattttcagcacttgctaaaagttgtaatgtatcattgtcaccaacataatcagttactacaggttgaccattagtaattgtgcctgttttatctagcacgattgtatcaacataatgtgcacgttctacaaattggcctcctttgaataatatgccattttctgcagcacgtcctgtacctaccataatagatgtaggcgttgctaaaccaagtgcacagggacaagcaataactaaaacagatattgctgaaacaagtgcaggttcaaattgcccggggtgaacgaatataatccatatgataaaagtaataaccgcaatgctaactacaatcggaacaaaatatccagaaataatatcagctaagcgttgaatcggtgctttagaactttgagcatcctcaaccactttaattatatgtgataatgcagtatcaccacctacttgagttgcttcaatcatgattgaaccatttttattcatggtagaaccaatcactgaatcgccactacttttttcaacaggtatagactcaccagttagcatggattcgtcaatagaagtatcacctttagtgactttgccatctacaggtatcttttcgccgggttttattagtaaagtatctccgactttaactttatcaagtggaagcataatttctttattttctttaattactcgtgcttctttcgcttgtaaatttaacaattcgcttaatgcattggtagtctgtgatttggcacgtgcttctaaatatttaccaagaagaattaacgtaattaaaatagcacttgtttcaaaatataaatgcgggtgatgtgtttgatgtgtgagccacatcatcatttcataaatgctataaaaatatgcggcactggtaccaacagcaaccaatacatccatgttagctgaaccatttcgcaaatttttatacgcgccaacgtaaaattgccacccaataataaattggacaggtgttgaaagaattaattgtacccaaggattgaccaaaatggatggaatggaaataggtgagatatgcaccaccattactaataatagtggcaacgataaaatagctgaaatgattaatttattgcgtttatgttttaactcttgttttttacgatttgattgcgcttttgatgaagttttagtttcagcatcgtatccaatattttgaatacgcttaattaatgcttccgtgttcgtagcactagggtaatatttgatgagtgcttgttcggtagttaagtttactgttgcctgttgtacaccttgcgtttgatttagaaccttttctatacgattagaacatgcagcacatgtcataccatttatatttaattctacttgctcaactgcaacatcatagccgagactttgaatttgctctacaaaatcttcgagatgataatcgtcagactcatagtcgatagttgctttttcagtagtcagattcactttagcttgaacatgattcatacgattcaatttcttttcaatacgatttgagcacgcagcacatgtcataccaataatatccaaagtcaacgttgtattcgccatctaaatgcctccatttcacatctaatgtaccccctataggtatacaagtcaactacttagcttatatattactctccacgtgcatcataaaagcgatccaatagttcatgaagtgaatgatactcaactatatcatcatagaattgattaagtttcatgaaatagaagtcctctttacctgtttcatgatttttatgaaagacaggggtaggtgctgattttgtttcggccatgacttcatcaaaagcatcaggtaatgtttcttgagtcataaattgacgacgattcacaatttcattagcgattagcggactaaagccctcacatatattaagtaattgtttggcaatctttccagcattaaagtctatatattttaatacctcttgtcctgttaattcataaggattgattttattttgatttggtggtgcttcatatttgaagccaggcataacggttctgtactgatttgtggcacttttaaatagctcataatgtatgcaatttttgagtaactaacagcatgggcacgtgggaacccataatctgcaaacttaagtattaaatcaaaaatttgcttacttatctgttcatcgtaaccgttattttttgcaccatcaatgaaatgttgacgctcactttctaagattgcacgattctttttactcattgcccttcttaaaatatctgcttcaccataactaaaaccagcaacttgacttgctattagcattatttgttcttgataaatgataacaccatatgtgttttttaagattggttctaaatctggatgtaaataagcaaattggttaggattatgtctacgggttatataagttggtatttcttccattggtcctggtctatataatgatgtgacagctacgatatcttcaaaatgttcgggttgcaatctttttaatacgcttctaacaccgtctgattccaattgaaatatacctgtagtgtcaccgtttgataataaatcaaaaacttttttatcatcataaggtatagcttctatatcaatatttatatttaaatcctttttaacttgtaaaataatttgatgaataattgatagattgcgtaatcccaagaaatcaatttttaataatcctatacgttccgcttctgtcatagtccactgcgttaataatcctgtatcaccagttgttaatggggcaaatttgaataatggttgatcattgataatgatacctgcagcatgcgtagacgtatgtcttggtaatccctctaactttttactcacttcaaaccaacgttcatttctatgattacgatgaacaaatgctttaaactctggcttttggtatgcttcttcaagagttatacctaatttatgtggaataagttttgaaatctcatttaaactcgtttcatcaaatcccattat

SEQ ID NO: 4240 - DNA, 3276 bp, Artificial Sequence
  Description of Artificial Sequence: synthetic nucleic acid sequence
cactttaacagtatctcagcctattttatttggattactattactgattgttgttacaatcccatattatacgtttaatgcactaaaaatcgctggtccatcatcgacattctttttagtaacgttttgcttatctataaacttaccgatagccccagaagaagcgcttttacgtggatctgcaattctcattggtggtatattggctaccataacagtaattttaacaatcatatttgctaaagagaaagcagaagacagagcaattcatgcggattttaaaacattacataacttgctacatcattttgatgagccagaggatttcaaagcatatgctcgaaacgctgttacagaatttagaaattctgaaaaacttttaattacctcaacatcaggtggtaatggaaaattaagtaaaaggtttcagaaattaattttattacacacatcagcacaagggatatattcagaattactagaactcaatgaaaatcatattcgtccattaccaagtgacttagttgaaatgatggatcatatcattaatagtgttcaacaacctaaacaacaatatcgaccgtggtcaaaagttgttgatgtggcaccagaatttcaaaatttaatggatcatattttgaaaatagatgaaatgattcacgcaaacgataatcaaattaaatatgaagcagatattcgcaagcctttatatagtaagcgaatatatcaaaatctaactttcgactcaattgtatttagaaatgctttgcaatatacagttattatggcagtagctatatttattgctctagcgtttaacattcaaaaagcgtattgggtgccattgtcagcgcataccatcatgttaggtaatgtgacaacgattcgtacgttagacaggtcacttgctagaggtattggaacgataatcgggactattgttttgtcgggaatcttggcatttcatatcgatcctattttcgctattatcattatgggattttctgccatgatgacggaagcgtttgtggcatctaactatgcatttgcagtcatttttattacgacacaagtcattatgctcaatggtctagcctctcaaaatttaaatattgagatagcgtacacccgaattattgacgttctgataggtatagctattgcagttattggtatattcatactcgcgcgtaaaactgcatcctcaatgttatctgatgctattgccgaattggtacgtaaagaaggtattttatttcattatttattttcaaaaaataaacaggaaacgaatgaacgtgatagggtagaaagtttaaatttaaacgtcaaaatcagtaatgtgacacagatttacaattcagcgaatggtgaattgtttagtaataaagaagcggtaaggtattactatccaagcatatttgctctagaggaaataagttttatgctagagcgtgccatgaataataaacatcgacaaacaataaatgatgatttaatgggtgaatatttagtcgtatttgaaaatatagctaagcatttccaatttcaagcagatttaaatctcagagacatgcaaccattacctcaatacaattacatccgtgcttcccttatgaatatacaacgtaattgtgttgaacaacgtcaggccatcacaaaagattaattagtacagatgtctcgtattgtttaattaaacaaatttagtggtaaggtttagtaaattattgaggaggtaagacgatgccttggacgatggaagattatcctcaaagttggaaaaactttgaagaactcgaacggaaaaaagcgattgatattggtaatgcgatgctcaaagatggctataaagaatctgatgtgatacctattgctacaaatcaagctgaaaaatggtatgaacatgcttcaaaagaagaattagagacgttaaaaaacaaacatatcacgcaacatcaagaagatgaatcagctaatcctaaacttaacgaagaaaatgttcatgtatattatgaagatcagctatggaaagtaaaatctaaagaggctagacgagcttcagatacatttgacacaaaatctgaagcagttaaccgtgcacaacatatcgcagagaataaaggtaccaaagtgattgagcatcgaaaagatgagtgattttaaacaaagtaatggcgatggatgtatgttgaagtgataacttcatataaacatttggtattggaacataaaatctaataaatatatgaaattgaattatcaattattaaaaatatgtacgttacctgagacaattattgttgtctcaggtttttttatctataaatgatatatgataaaactgtaatatgacataaagtttctagttacttttgcataatcctcttgtttaaagaagtatgaaccagtgactaacattgtagcaccctgttctacacatcgtttactcgtttgatcgttaatgcctccatctacctcaatatcaaaagttaaatgattttcatgtttaagttgatttaattgctcaatcttagtcacgcattgttctatgaatgtttgtccaccaaaaccaggatttacagtcattactagaacataatcaacaatactcaatataggtaaaattgtttctacagatgttccaggattgatgacgacacctgcttttttccctaattgtttaatttgttcaattgctctatgtatatgtgttgtcgactcaacatgaacagaaatcatatcagcaccatgttcggcaaaaagattaatataattttcaggttgctcaatcattaaatgaacatctattggcaaatgagattgttgtctaacagcatccaaaatcggaataccgattgaaatattagggacaaatttaccgtccattacatcaaagtgtaatccgtctacctttgctgtttctaacaattgaagctcttcttttaaatttaaaaaatctatagataaaagtgatggtaaaattttaaccatttagtatcgaacctttctattggaaatttcattatataattgctgataatgatcatacctgaattgtggaatttctcctttttcaacgagtgctttgacatgacattgtggttcttttatatgattacaattacgaaacttacattgctctccagcttcatgaatatcaataaaaaaatcttttagttgttctttttcaatatgattaaaatctaacgcactaaaccccggtgtatcagcgatgtaaccaccttttctatcgtataattcgacatgtcttgt

SEQ ID NO: 4241 - DNA, 3438 bp, Artificial Sequence
  Description of Artificial Sequence: synthetic nucleic acid sequence
tatgaaactcggagatggtcaatttgtttctactgttgctaaagtaaacgaagaagacgataatgaggaaaatgcagatgaagcgcaacaatctactactactgaaacagcagatgtagaagaggtagtcgatgatcagacaccaggcaatgcgattcatacagaaggtgatgcagaaatggaatctgtagagtttcctgaaaatgatgatcgtattgatatcagacaagattttatggatagagtgaatgaagatatcgagagtgcttcagataatgaagaagatagtgatgaataattaaaaagggagtaagacagaaacacagagttcgttgttctgcccggaactcttaattaaactatctgtagattttatgaacaaaagtttatatagggaagtcggactagagttgtaatgaggttattttctaactcagtcatcgacgtccaatacgctaaaatgcatgagacatagctatgcctcatgcattttttaatttcttgcttatattaaattgatttgtcctttatgacttctgtagcaccatgcattgaggataaatgaataatcatttccatacatttagacccccttcaatagagggtgtctaaaatataactgtctctttcaacaatgtactttctcaatttaccactactgataaacacagtaattaattctgatatctgttaaccttcaagttgtttcatcacatatggtatttcactaatcagacgtgaaggtggaacaacatacattgtgtcagataatttttcaccgataaaactatgcatgtaagttgcacttgtaacagcttctttaaaattatcaaattggcctacgaagcttgtaatcatgcccgcaagtgtatcacccataccacctgtagccatagcaggtgtgccaataggtaatttatagacatcatcattgcagaaatagatttccgtaccatgttgttttaatactactgtcgcgccaatacgttctaccgcttcaaggttacgttcatatgtctgttcttcaataggtataccgctcaaacgctcccattccttttgatgtggagtgaatataacacgacatgtaggaatttgaggtttcaacttactgaatattgttatagcatctccgtcaacaattaaattttgatgtggttgtatattttgaagtaaaaacgtgatggcattattacctttgaaatctactccaagacctgggccaataaggatactatcagttgcttcaatcatttttgtgagcattttagtatcattaatatctataaccatcgcctcaggacaacgagaatgtagcgcagcatgattatttgggtgtgttgctacagtaatgagcccacttccactataaacgcaagcgcgtgcagcaagcatgattgcgccacccatattggctgatccaccgattaataaaattttaccatagtcacctttatgtgtttcgtcttttcttataggaatattaacagaatctaacgttttcataacgacataacctcccataacatgttatttcttaaaatgttgtaagtcttatgtttgcttttatttcacgaatctttttatttatttcaaacaattgtttacatgtgattttaaatcatctcttctaaatacaattaagaatactatacctgtatctgacattcgtcaatagttaaatgaaactcttttcacatcgtcatgtatcattcattattttagtagactgatagcataatgtagcagttttatttatttaattaaaaatattaaatggaaatagaacgtaaggtgacattacaagcagttaattataataatgttgaaattctctcgcctctcatccgagaaaaattgtatgtatatcgtcacaatgtatctactattacacagaacaaaatatttagtttcaacaagttgtagaagcgggacactaattatttaaaaagtgttgcatataagcacatctaaatatgacgtaattgttgcaaatttaaaataacttgaaatgtgataatgactttgctatattaaaattaagttaataaagtattgttcgtaggacaagtaacatagatagttcgatttcagagagcttgtggtaagtgagaacaagtaatcgacattcatgtgaatctacctactatatgtgaacaatcggtaataacccaagcaagtttttgtctatcgaacatagctggagacttagacaagcgtttttcatcaaaaatctttataaattcttctttagaaaagatttcctcttcaccttcaggtgaccaacctaacaatgtaataaagttaaataatgcttctggaagatatcctaagtcacgatattgctcgataaattgtaggatttgaccatctcgcttgcttaattttttacgctcttcattaacaatgagtgacatatgaccaaaacgaggtgcttcccatccaaatgcttcatatatcattaactgcttaggtgtatttgaaacatggtcatcaccacgtataacatctgatatttgcatataatgatcatctacggcaactgcaaaattataagtcggaacaccatctttttttacaattacccagtctccgatattgtcagattcaaaggaaatttctcctttaaccatgtcattgaaagtatatgtttgatctttaggcacacggaaacgaattgatggtttacgcccttccgcttcgtactgttgacgctgttcttctgttaagtgcgcatgttgtccaccatatcttggcatctctccacgagcaatttgagcttcacgctctgcttctaactcttcttcagtcatataacatttatatgctttgtcttcctctaatagctgttgaattagtggattatagatttctgcacgttcagattgacgataaggtccaaaacctttatctttatcgacagattcatcccaatccaaacctaaccattttagattatcgaattgtgaagattcaccatcttctaaattacgtttactatctgtatcttcgatgcgaacaacaaaatcaccattataatgtttagcaaataaataattgaataatgctgttcttgcattaccaatatgcaaatatcctgttggacttggcgcatatcttactctgatacgttcactcattattttcactcctactattaattgtgtggataataaatagccaaatattaattaaaatactttgcaaattatacatcaataaaatgataactatgaccactatcaaaatatgcaaataaatgcggtagtttattgtaagtggtttaattttaaaaaagttattcaaacgataaagataccctaaagtataccttgatgaataacttgattaaatattgaatattctaatccacctaatattgtagcacttaaagaactctttgataagtcacatgtttaatatgcataaccttgttaa

SEQ ID NO: 4242 - DNA, 2980 bp, Artificial Sequence
  Description of Artificial Sequence: synthetic nucleic acid sequence
gttgcagttgtaagtttaattgaatctactggtgtctatcatgcactgagtgaaattactggtagaaaactagaaagaaaagattttcgaaaagggtacactgcggaaggtctagcaatcattttaggttcaatatttaatgcgttcccttacactgcatattcccaaaatgtaggtcttgtttctttatcaggagctaaaaagaacaatgtgatatatggaatggttattcttttactaatttgcggttgtatacctaaattaggtgctttagctaatattattccattgccggttttaggtggagcaatgatagcaatgtttggaatggttatggcatacggcgttagtattttgggtaacattaatttccaaaatcaaaataatttattaattattgcaatttcagtagggttaggtgctggtattagtgcagtacctcaagcatttaaaggattaggagaacaatttgcttggttaactcaaaatggtatagtgcttggcgcaatttctgcaatcatcttaaatttcttttttaatggtataaagtataaacaaactgaagaaaatgtgaaataatgtaactaagtataaataaaattggaggctgtttttaatgtgggaaaataaatttgctaaagaatctttaacattcgacgacgtgttactcattccagctgcatcagatgttttaccaagcgatgttgacttaagtgtcaaattatcagataagatcaagttaaacattcctgttatctcagcaggtatggatacagtaactgaatcaaaaatggcaattgctatggctcgacaaggcggtttaggtgttattcataagaatatgggcgtcgaagagcaagctgatgaggtacaaaaggttaaacgttcagaaaatggtgttatttctaacccgttcttcttaacaccggaagaaagtgtgtatgaggctgaagcattaatgggtaaataccgtatctctggtgtacccattgtcgataatcaagaggatcgcaagttgattgggattttaacaaatcgtgatttacgttttattgaagatttttcaattaaaatatcagatgtaatgacgaaagataatttaataacagctccagttggtacgactttagatgaagccgaggctattcttcaaaaacataagattgagaaacttccattagtagaaaatggtcgtttagaaggattaatcactattaaagatattgaaaaagtacttgaattcccatatgcagctaaagatgaacatggcagattgttagctgcggcagcaatcggtacgtctaaagatactgaaattcgtgcacaaaaactagttgaagctggcgtagatgcattaattattgatacagctcatggtcattctaaaggcgttattaatcaagttaaacacatcaaggaaacatatcctgaaattactgttgtcgctggtaacgtagcgactgcagaggcaacacgtgctttatttgaagcgggtgccgatgttgttaaagtaggtattggtccaggctcaatttgcacaacacgtgttgttgcaggtgtaggtgtgcctcaaattacagcagtttatgattgtgctacagaagcccgtaagcatggtaaggctattattgctgatggtggtattaagttctcaggtgatattatcaaagcattagctgctggtggtcatgcggttatgttaggtagtttgttagctggtacagaagaaagtcctggtgcaactgaagtattccaaggtagacaatataaagtttatcgcggcatgggatctttaggtgctatggaaaaaggttcaaatgatcgttacttccaagaagataaaacaccaagaaaatttgttcctgaaggtattgaaggtcgtacagcttataaaggaccattacaagatacaatttatcaacttatgggtggcgttagagctggcatgggttatactggttcagaaaacctaaaaaaattacgtgaagaagcacaatttacacgtatgggaccagctggcttagctgaaagtcatcctcataatgttcaaattacgaaagaatcaccaaactattctttctagtgttaaactttgggtgatgaattaatcatttgtaggaacgcgcttaatttttaaaacaacaatgcttaatgatacgttacaatacttaaagctatcatttagggcattgacaggcgcgtttctcttacttttacataaaatcaaacaataaaggagattcatgactatggaaatggcgaaagagcaagagctgattcttgttttagactttggtagccaatataaccagttaattacgcgtcgtatccgtgagatgggcgtttatagtgaattacatgatcacgaaatttctattgaagaaattaaacgaatgaatcctaaaggtatcattctttcaggtggtccaaattcagtgtatgaagaggggtcatttaccatcgaccctgaaatttacaatttaggtattccagttttaggtatatgttatggtatgcaattaacgactaagcttttaggtggtaaagttgagcgtgccaatgagcgtgaatatggcaaagctacaattaacgctaaatcagatgaacttttctttggcttaccttctgaacaaacagtatggatgagtcattctgataaagtaattgaaattcctgaaggatttgaagtgattgcagatagtccaagtacttaacgactggttagaagtatacaacagaaacggagttgttactgccagagctgtaacatctcatcgtatgcctagaggcacaatgtttatgtatcatgcacaagataaacatatagagacacctggttctgaaattactgatactcgtggaggttctcataatgcacctactcgtattcacttgaaacctactcaattagtaggaggatatgcacaaattagttatcactttaactattatggaccaattggaaatcaaagagatgagt

SEQ ID NO: 4243 - DNA, 4142 bp, Artificial Sequence
  Description of Artificial Sequence: synthetic nucleic acid sequence
acacatctatgatcgtttggagcatgaaatatttaatgaaagttcttataatagaactatttttaacgaagttattgaatggcttgaaacggaattaacttataactaaaacagtatagttccgtgtatttgattataagaaattatgaggatattaaacatactaagattagctatgaagaaatctatgacgatagattttttcatagctattttttatagttatagagaggagtagactgtccagactctaggattttaaatccgtaaaaaaaacaagtcagctttactctcaccttttgaaattcgtttgtagtatgttgggttcctgaaaccgtgtataggaaaatgaaatgagaaaggttaagtaaagtttttagcttctcaactattcaaaggaggtttttttatcgattacttaggtgttgatattagtaaaaggagtagtgtagttgcacattataaaaatggaaaattccaaaaagagtttttcatccaaaataataaaaatggctacaattatttactcaagtatttgaatgacttagaccacccacaactcatttttgaatctacaggtatctattcaagaggtatggaacgattttgttgtgtaaatcaaattaactatattcaaatgaatccgttagaagccaaatttaaaacgagcgctctaagatcatggaaaactgatcaggcagatgctcataagcttgcttgtttaggaccgacgctcaaacaaacaggcagcttacctatacatgagttaatattctttgaattaagagaacgtgcccgttttcatctagaaatcgagaatgaacaaaatcgacttaaatttcagattcttgaattactccatcaaacattccctggtttagaaagattatttagtagtcgatattcaatcattgcactcaacatcgcagaaatttttactcatccagacgtggttcttgatatcgacaaggatgtacttattacacatatattcaattctacagataagggaatgtcaatggataaagctacaaaatatgcacttcaattaagagtgattgctcaagaaagctatcctaatgtcgatagacattcctttctagtcgaaaaattacgcttacttattcaacaattaaaacaatctattcatcatctcaaacaattagatgatgccatgattcaattagcacaacaactcgattattttgaaaatattcattcgatacctggtattggtaagctaagcacagctatgattattggggagattggtgatattaagcgatttaaatcaaataaacaactcaacgcttttgtaggcattgatatcaaacgatatcaatcaggtcatacacactgtagagataccatcaacaagcgtggtaataaaaaagcgagaaaacttttattttgggtgattatgaatataataagagggcagcatcattatgacaatcatgtcgtcgattattactacaaactaagaaagcagcctaatgagaaacctcataagactgccatcattgcttgtataaatcgattattaaaaacgattcattatctggtaatgaatcataaattgtacgattatcaaatgtcaccacattagccaaacgtacaattaaatatattttaataccttattcaaaaaattaaaatgaacggtttagttaagtaatgcttattttaattataagtacttgactaatcgtaagaaagagcctaggacataaatcaatgtctcgcgaccacagcttaatttttggtgttcattcatgactttaaaaaatccttattgcataaatgtacatagtgtagtacggtgatgctgccaacttactgatttagtgtatgatggtgtttttgaggtgctccagtggcttctgtttctatcagctgtccctcctgttcagctactgacggggtggtgcgtaacggcaaaagcaccgccggacatcagcgctatctctgctctcactgccgtaaaacatggcaactgcagttcacttacaccgcttctcaacccggtacgcaccagaaaatcattgatatggccatgaatggcgttggatgccgggcaacagcccgcattatgggcgttggcctcaacacgattttacgtcacttaaaaaactcaggccgcagtcggtaacctcgcgcatacagccgggcagtgacgtcatcgtctgcgcggaaatggacgaacagtggggctatgtcggggctaaatcgcgccagcgctggctgttttacgcgtatgacagtctccggaagacggttgttgcgcacgtattcggtgaacgcactatggcgacgctggggcgtcttatgagcctgctgtcaccctttgacgtggtgatatggatgacggatggctggccgctgtatgaatcccgcctgaagggaaagctgcacgtaatcagcaagcgatatacgcagcgaattgagcggcataacctgaatctgaggcagcacctggcacggctgggacggaagtcgctgtcgttctcaaaatcggtggagctgcatgacaaagtcatcgggcattatctgaacataaaacactatcaataagttggagtcattaccgtgtagtactattcaaaacgtaattattacgatttgaattaagcgaggagaatgaaatgactaagacttatgacgtttggtggcaaaaaggtcaagaatcagatgatgatatggcacgagaccatcaagaagcttgggagagaacaataaaaatgcttgatacatctgacatcgaagggaaaacgattttagatgtgggatgtaatcaaggcggatttttacgacagttatacgatacaacaccgtttaaaaaaggtgttggcatagatttagcacgtttatctttggaaaaggcagagacattaaaaggacaacgtccacttacatactatttaacagataaaccgcaagaaacgaagcacgtgtttgatacggcagtaagtacgtctgtcttgtacttaatagaagatattccgcaacatgcaaaagatttaaaagaggtattgaaaccaggcggtgtttattacgcttcattcgcggatttaactaataacccaagtcgtcagtttatggatgacacgattaatcaatatggtgcaacaccttctcagaatcactctctaaaacatatcgttgatagctttgtggatgcaggatttgaagttgcagtaatgaaaaagcatgtacttataaatatttatctaaaaagattggatcaatcgttgaaacaactttaaaggcacttaaatatcaaggggagtactctaaatttgtacctcaacgatttgaaacaggatttagaaaatcacctaaaaacaaaggtgaacttgttgcacaaccactgattaccaatcagggaattccgattaatataagaggtcaaatcgatcgtattgatacatatacaaaaggtgatcatagttatgtcaatatcattgattataaatcttcagaaagtagtgcaacactcgatttaacaaaagtttattatggtttgcaaatgcaaatgatgacctacatggatattgtattacaaaacaaggagcgtttaggtcttacagatattgtgaaaccagggggtctactttatttccatgtccatgaaccgcgtattaaatttaaaagttgggcagatatagatgaagaccaatttcaaaaagactatatcaaaaactttaaaatgagtggtttgcttaatcgtgaccaagaagtgttagacgctttagatattagacttgaaccaaagtataattcggatattgttccaatagcattaacagctaaaggcgctataaatcaacgtagtagtaaagtagctgatgaaaacatcatttatcaattaatagaacataataagaagaattttatcgagacagccagccacattatggatggacatacggaagtggcacccttgaagtacaaacaagtattaccttgtcaattttgtaattataaatcagtttgtcatgtagacggattaatagatagtaagcgttatagaacagtagatgaatcgataaaaccattagatttaattcaacaattaagaaatgaaggtggtgaaagacatgattccaactaaacctcatgatgtgatttggacagatgca

SEQ ID NO: 4244 - DNA, 3154 bp, Artificial Sequence
  Description of Artificial Sequence: synthetic nucleic acid sequence
tttgtattaaggcgtaattcatttttgttgatgcttgtcaactttataaaccataagataaattatatcaaattctcatttgttatgacaataactaaaaataatttttaagggagcacacataagatgaagaaaaataaatttttagtatatttactatcgacggcgcttatcacgccaaccttcgctacacaaacagcttttgctgaagattcatctaataaaaatacaaattcagataaaatggaacaacatcaatcacaaaaagaaacatcaaaacaatctgaaaaagatgaatttaacaacgatgattctaaacacgattctgatgataaaaaaagcacttctgacagcaaggacaaagactctaataaaccattatcagctgactcaacacatcgtaactataaaatgaaagatgataatttagttgatcaactttatgataattttaagtctcagtcagtagatttttctaaatactgggaaccgaataaatacgaagacagttttagtttaacgtcactcatacaaaatttatttgattttgattctgatataacagattacgaacagccacaaaagacaagccattcttctaatgacgaaaaagatcaagtagaccaagcagatcaggcaaaacaaccatcacaacatcaagaacaatcacagtcgtctgctaaacaagatcaagaatcatcaaacgatgaaaaagaaaagacaactaaccatcaagccgattctgacgtcagtgatttacttggagaaatggataaagaagatcaagaaggcgaaaacgtagatacaaacaaaaatcaatcttcttctgagcaacaacaaactcaagcgaatgatgatagctcagaacgtaacaagaaatattctagtattacagattcagcattagactctatattagatgaatatagtcaggacgctaagaaaacagaaaaagattacaataagagcaagaatacaagtcacactaaaacatctcaaagtgataatgccgacaagaatccacaattaccaacagatgatgaattaaaacatcaatcaaaacctgcacaatcatttgaggatgacattaaacgctcaaatacacgttcaacaagtcttttccaacaactacctgaattagacaatggtgacttatcttctgattcatttaatgttgttgacagtcaagacacacgtgatttcattcaatcaattgctaaagatgcgcatcagattggaaaagaccaagatatatatgcatcagttatgattgctcaagctattttagaatctgactctggaaaaagttcacttgcacaatcaccaaatcataacttgtttggaatcaaaggtgactacaaaggacaatctgtaacttttaatactttagaagctgatagcagtaatcatatgttcagtatccaagcaggtttccgtaaatacccaagtactaaacaatctcttgaagattatgcagatttaatcaaacatggtatcgatggtaatccgtcaatttataaaccaacttggaagagtgaagctctatcatataaagatgctacttcacatctgtcacgctcatacgccacagatcctaattattctaaaaaattaaatagtattattaaacattatcatttaacatcttttgacaaagaaaaaatgcctaacatgaagaaatacaacaaatcaataggtacggatgtctctggtaatgacttcaaaccatttactgaaacttccggtacatcaccttacccacatggccaatgtacttggtatgtgtaccaccgtatgaatcaatttgatgcatccatttctggtgacttaggtgatgctcataattggaataatcgtgctgaaagtgaaggctatacggtaacgcacacacctaaaaatcatactgcagttgtgtttgaagctggacaattaggtgctgatacacagtatggtcatgttgctttcgttgaaaaagttaatgacgacggttcaattgttatttctgaatcaaatgttaaaggattaggtgtcatttcattcagaactattgatgcagaagatgctcaagatttagattacattaaaggtaaatagtaaaaatttaaaattatttgaggtaccatccacaaaataatagcacaaagatgtattcaaatttataatacatctttgtgcttatttatattcaataactatattagagtaactttacattgaaaagtccatttttataatttactcaagtgatttctaaaagtatattattcattatatataacaatcattattgcatgtcaaaaaagagtaggacagaattgattttaaattcttagtcctactcttttatactgactcttgttataaactttgagtaagcgttgcaccacctcaatcactaactgtgaaatagtttaactacacataagattgatgatgcctattactatatataatttttaaattaattttggtgtttttttctacgcgccataaagatgagcgctccacctaatgacatgagtacaacagccactggtatccaatgttgtttgatgacttcacctgtcgctggtaatgagatattaccatcgtcgtcaaatagatcacttaaaaggccacctttattatctaaagataatccattctccggtgccgaatgatctaatttatcaagaatagatcctcttgagtgaagtttatcaagtaaacttggtctatcaaatattgaattagaatcaccgacacctttgttaatacgatctaacaaggatggtctattctttataggatctaaaatatattctaaatctttcttagcttgttttgctcgtttttctatatctaataaatcatttgccttgccttcaatcgcagagtgaatgagatccatgatatctgatttgtccttttgtacacgcgcaataacatcagcgataattttagctttgtctttattgatacgggtttgtaatattgtttcaatcgcttgtcttttgtctttagcatcattaatcacaccattcaatatatttaggcattgaagctggtaaaaaagattcgggtctctttaaaatgtcacctgaaacacagttatttggtgtattcaaccatattccgttaggtattgttttatctatcattgcattattgctta

SEQ ID NO: 4245 - DNA, 3974 bp, Artificial Sequence
  Description of Artificial Sequence: synthetic nucleic acid sequence
taggacgcacacaagcaggaacgcttgagctacaggtggatgaaaaagggctatactttaaatgccacttacctaatacatcatacgcaagagatatttatgagaatattaaagcaggcaacgttaatcagtgcagtttcttttacacattgccacctaatgactcaacggctcgtacgtggcaaaacatagataatgagtacgttcaaaccataaataaaatcgatgaattgattgaggttagtattgttacagtgccagcctacaaagatacatcggttgaagtcggtcaacgtgcgaaagacttaaagaaattcaaacagttggaacaaatgaagatagcattggatttagaaagcctacgttttgaaacgtaaggctattttttatacccaaatttaataaggaggcttatacatggctaatttagatgagcgcaaaaaagaaatcgctaatctgatttctaaagcgcaagaagcagtcgaaaaaggcgacctcgaaactgctcgtaatttaaaagctgatattgatgctcaaaagaaagagtacgaagaactcgaacagctttcaaaagaaattgaagcgtcagcacctaaacaagatgaaccacctaaagatgaaggtgcagaagttgaagataacaaagatggtaattctggagaagaatcagagaacaaaccttctgatgatgaaccagaaggaacttcagatgaagaaaaacctgatgatgcaccaaaaccagatgacaaacctgaagaaacaccagaaacacctactattgaaaaagtagaagaaccaacagaagaagaattaaaaaaagaaaaagacaaaaaagaaggagcgaaacgttctatggctaaattaaaccaaaatccagagacaaacgaagaaattctagcatttgaacagtacatgaaatcaaaaggggctaaacgtgacaatgttaaatctgatgacgttggcgtaactatcccagaggatattaaatatattcctgaaaaagaagttaagacagtccaagacttatcagaattggtacaaaaaacttcagtatcaactgcaagtgggaaatacccgatcttaaaacgtgctaacgctaaattcaacactgttgctgaattagagaaaaaccctgagttagctcgtccggaattcgaaacaatcaattgggaagtagacacttatcgtggatctattccgatttcacaagaagcattagatgattcagttgctaacttaactgctattgtttctgaaaatattaacgaacaaaaaatcaacactttaaatgaacgtattggtgaagttttaaaagcattcaatcctactagtgtttctaatgttgacgacttaaaagaaattatcaacgttaaattagatcctggttatgaccgccaaattatctgtactcaaagtttctatcaaaaactagatacattaaaagatggtaacggtcgttatttactacaagacagtatcatcaacactgcaggtaacactgtgttaggtatgaatgtaacagttgtgcgtgatgacttgttaggtaaaaatggagatgcattagcatttattggtgatgtaaaacgcggtgtgttatttgcagaccgtacagacgtttctgttcaatggattgaaaatgaaatctacggtaaatacttaatgggtgctttccgtttcgatgtgaaacaggctgataaaaatgctggtttcttcgtaacatttgaagatgcaacagaacctagtggggatctaggagcataagtaaagtaggtgatttcaatgttcaaaatagatgacgttgaagccattaaacaagcgatacgcgtcgaccatgatttcgatgatgacttaattatggaagtgtatttaccaggtgcgattaacgaaattaaaacagctgtatctttaagggaagaagatcaacctttttatgaaaataacggattgtttaaccttgcagtattgaatgttgtagcacatcactacgataaccgttcaactacttccaacgaacaaactttcgaagtactgcatcttctgtaaagctcgttcagacattaagaagtagcttgattaaatggcgtaaggataacattgaggtgatagtcgatgaaccttaaccaattagattacagagttactttttatgaagttgtgaatgatggtccagaagcaggaatgaatgaacaaaaagaaatatacagttgtttcgctggaatgtatgagccaacacaaaaagatgtacagttaggtaatttagaacttagtaaaaggtcagttacattaaatattagagacgcacaacctcaatttctaccaaatccaaaacacgtatttgagataaaaaatggtatgtatgcggggttgttttttaatatcaaaaatgtagcaccttctaagacgcctaattacattaaagtggtgggtgaagaagaatgactataacaatgaaaggcgataaagaaataattgcctatttagaaacgaaatacggtaaatctgctatgaaacgcataactgactttgcactaactaaagctggcaataaagttgtaagtattatcaaaggtaatatgaaaagttttgaagatactggagaatcagtagaagaaactacactttcaaagccgatgacgataaaaggagtaaggaccgttaaaattcattggcgaggtcctaaacaacgttatcgtattatccacctaaatgaatatggtcactttgatcgttctggaaagtgggttaatacagctggtaaaggtgttattgaaaacgctatgcgtgaaggcagagaaacgtatttcagaacagtaaaagaagaaatgagaaagagggtgtaatttattggatgacatcacaatgaaaatatacgaagcgattatagataacaaagaaattatgaatcatgttcaaaagaacaatattaaattctttgattatccaaacgcacaagaaattagagatgtagtgattgtcatagatccattaggccaagacacccctataacttacggagatgatttccctatagcctttgaagatttgtatcaaatagacgtgtttgtgaagcaacaaaaaaacatcaatggaagattaacagctaaaaaaataacttttgagatagctaaggttttacgaacgataaatgtatatgacactggcggagctataaagcctgaatatataaaagattttaatatttacagacaaattaaaagatttgaagtaaagcaatcactcgtataacggtggtgttaatttggatttattatttgaagatttggttttgtttgatagaagtgccaaaaagaattattacgtaaatagtctaggggaagtattttcgtatagattaagtaatcagaaatggaaaaaaataaaacctagaaaatgtactaatggttactatgctgtatctattaatggtaaatatcccttgattcataggatagttgccaaagcgttcttggaaaacccagaaaataaaccttgtgtcaatcacaaaaattcaataataagcgataatagtttggagaatttagaatggtgtacttattcagaaaacactttacattcttggggaaaagggcgtatggaaggtaatagaaaaattacaaaaaatatagcaggtaaagttggaaaaagtagaaggaatatgtcgtttgaagatgcaactgaagtaagaagattatataaaaatggtggcatattgcaaaaagacttagcagaacaatttaatgtatcaagagaagtgataacaggaataatcaacaattattcatatatcgaaaaatgagacctttattaaaaaggtcttttttaataaacaatattttaaaatttaggagtgttttaatatggcagagaaaaactatcgttcatttacagggttaacagaattttattataaagttcatggagaaggtggagttcaaaaagttgctgatccagaacgcattaaatatttacaagaa

SEQ ID NO: 4246 - DNA, 3030 bp, Artificial Sequence
  Description of Artificial Sequence: synthetic nucleic acid sequence
acagtcagatatcgagagagctgaagatgataaagcatactttaaaagatatgcattaacagctagtggcgtatcaccacgaccaataccaggtgttaaaggtggtatacatcatgtaacaggtgttgaacataatgaagaagggaagccaagtgaggcgcctatgaatcgtcagaatcagatggaaaaacgaatgcgcaaaactgaaagcttggttatcaataatcctgtgttactcaatgaacatgaagacgaagcagatatactgtatataggatttatatctactaaaggtgctattggagaaggtgcagaaagactagaacgacatggtgtaaaagtgaatacgatgcatattcgacaattacatcctttccctaaagatattgttcaacaagctattaataaagcttcgaaagtaatagttgcagaacataattatcaaggacaattatcaagtattttaaaaatgaacacacaagttaatgataaattagttaatcaaacaaaatacgatgggaaacctttcttaccttatgaaattgaagaaaaaggtttggaaattgctaaagagttaaaggagttggtgtaattggctacatttaaagattttagaaataatgtgaagccaaactggtgccctggttgcggtgacttttcagttcaagctgctatacaaaaagcgacagcgaatattggtttagaaccagaagatgtagcaatcattacagggattggttgttctggtagactatcaggttatattaattcttatggcgtacactctattcatggacgtgcattgcctctagcacaaggcgttaaaatggcaaacaaagatttaacagttatcgcttctggtggtgatggagacggctatgcaataggaatgggacatactattcatgctcttagacgtaatatgaatatgacgtatattgtcatggacaatcaaatatatggattaactaaaggacaaacatcaccttcctcagctaaaggatttgtaactaaatcaacacctaaaggaaatatagaaaagaatgtagctccattggaattggcactgtcctctggtgcaacttttgtagcacaaggattctcaagtgatataaaggcattaactaaaatgattgaagatgcgattcatcatgatggtttttcttttgttaatgttttctcaccttgtgttacttacaataaagtgaatacttatgactggtttaaagaacatttaacaagtatcgatgatattgagggctatgacatcacagataaacaacttgctatgaaaactgtgctggatcatgagtcactggttaaaggtatcgtttatcaagatacaacaacaccttcttatgaatcgcaaatttcagaactagaacatgaggcgttagctaaaagagatattcatattacagaagaaactttcaacgatttaactgcacaatttttataaaggatactcattcatagtaactagaattgcgtcaaaataagtaggtaaaataaaaacgaaggtgtacttgatacatcatgactatctaattttactgtaatttcttatctaataacgttaatgattactatagaaaatcaagaagtacgtttcaatttaaaagtattagagaacatgcatataagtaaataacatatttaaagagtgggtcagaataacattttaattctgctcactcttattttatctctatgttgcttgtcaaaagcactacgattcaataatgtaattctcatttaacgttttttacatgattaatcacccatctcatctaaaagtaaataatataagaatgacataatttattccaaattattttaaaaatatagataaagtatttaacaaatgaaattttactcagagttattattaaatacataaataatgtgaacagttaaacgcacagtcctaatcaatgcaataagtttgtttttttaataaatatgtaaaagattttgtaaaaagattttaagaatatgaattttgggaataataaaaatataagatgatttttcggaggttaatatggacaaatttaaatctatgacagaattaaaagaattgactaaagaaggaaaagattgggaaatagagtgtgaaaatcgttctagcatagtcactatattagcattacatggcggtggaattgaacctgccacaactgaattagcctatacaattgcacattgtggcgactataactatttttcctttaaaggtatgagaagtaaggggaataatgagttacatgtgacttccacacattatgatgaccaaattgcattagatttagtgagaggtagccaaagaactgtagccatccatggttgtgaaggtaatgaaagtgtggcttatataggaggtagtgatgacagactaattgagttaatcaccgaatctcttgaagatataggaattagcgtgcgagaagcaccacatcatatttctggaactcaagaaaatactgaaaatggagcagtcatctataaaggtaatcaactttacaattatcgaagttttgatcagtatatttttcaaaaagttgtaaattatttaaatttgaatcaaaagataaacaatttgattatttgtggtgtaaaaagtgcatatattttaaaagaaacaagcgaagcatttaagcaagatgcacgtacatattatcaccaactaatagaggttgactccttacaaacattacctgatgatgattatgtgaaaattgctttcaatataaatcgtcagactcatccagacttagatgagaaattagctcttaagtttaaagacgatattaaactagtatcaagtgggagagatagtatagatgttattatgccaaatatgactaagggtcaagctttgtctagattattaaaagaatggcaaatgcctgcttcacatttaatggcatttggagatgcaaataacgataaagatatgttggagcttgccgaacatagttatgttatggctaatagtgaagatcaatcattatttaatatagcgagtca

SEQ ID NO: 4247 - DNA, 3028 bp, Artificial Sequence
  Description of Artificial Sequence: synthetic nucleic acid sequence
taatttttttaaatgataagaaagtttagattgttttatatctaataactcttctaaatcacatacacataatgatttattgaagctttggctaatttgatttagtatttttaatctgattttatcggcaagtgcattaaacatattttcataaaagtcaaattgttgatcttcactcatatcagtctttgttttaataacttccataaaagaccatcctttttataatatttcattgattttatattatctttacttcaattcttgaattgcttgtttatagttattttttgttgattcgccatactgattaatgttccctttaaagaactccttttccatatatattgtagcttcttttaaattgatttctcttgatagcataacaagatttaaataacttacaaaataacccacagttaaagtacttgcatggtttactcgctatcaagcacgcctccttattgtcaacgtagttttatatcatttaatacatcaattttttttgatgtattaaatataaatcaatatctatattatcgcaagaaaaaaactatgattttacataaacttaggtatttctcacagaaatattaaaataattttttataaattgtattattaagaattaaatttagtaaaatttttaaaactcaaacaataacatagacaccaatctatatagatgttaatctataatagcaaattaattaatgaggtgagtataatgttaaatattgaaatatacgaagaagctatgtgctgttctactggagtatgtggtccagaaccggatgaaacactaataaaagcgaaccaaatcaatgaatatttaaagcaaaatcaaatagaagttcaacgttataatatgaataataatccgaatgaattcattaaaaatcaagaagttattcgtttaattcaagaaaaaggtgatgaagttttaccaatcacttttatagaaggcggtatagctaaaacgggcgcttatattacccaagaagaagccgatgaaattattacagttaatcaaatgagaaatggaggatgctgtggtggagatggatgctgttaaatacttaaataaattgaatttagataacattgagttaacaaaatatttgttttttactggtaaaggcggcgtaggtaaaacgacgatatcaagttttattgctttaaacttagcagagaatggaaagaaagtagctttagtaagtactgatccagctagtaatttacaagatgtatttcaaatggaattatctaataaattaactaaatatcaacctatacctaatctctctatagccaattttgacccgattgttgctgcagacgattataaagcacaatctatagaaccttatgagggtattctaccagaagatgtgctttctgaaatgaaagaacagttaagtggttcatgtacagttgaagtagcagcatttaatgaatttacaaattttttatccgataaaactttagaacaagaatttgatttcattatatttgatacagctcccacaggtcacaccttgagaatgcttgaattaccttctgcatggacagattatttaaatacaacgagtaatgacgcttcttgcttaggtcaattatcaggtttaaatgaaaatagagttaaatataattcagcacttgaaaaactacgtaaccaagatgatacgaccatgatgttagttgcgagacctactcactcttctatatatgaaattcaaagagcgcaacaagaattacaaaaactgtcaatttctaaattcaaagtaatcattaacaactatatagaagaaagtcacggtttaatttcgagtcagatgaaatcagaacaagataaaaacattaatcattttactgaatggttaaataacaatcatgcttattacgttccatataaaaatcagaaagaagaaggtatagaaagtttaactaatctattaaatgatgataacttaattgaaaatgatgactttattgttgaagatcatccgcaattcaataaattaatcgatgaaattgaaaatagtaaagttcaatatttatttacaatgggaaaaggtggcgttggtaaaacgacagtagcaacgcaattagctacaacgttatctaataaaggatatcgtgttcttttagcaactactgaccctactaaagaaattaatgttgaaactacaagtaatttaaatactgcttatattgatgaagaacaagcattagaaaagtataaaaaagaagtactagccacagtgaatgatgatacaccacaagacgatattgattatattatggaagatttaaaatcaccttgtacagaagaaatagcatttttcaaagcctttagtgacattatggagaatcaagacgacatggattacgtcattgtagatacagctcttacaggccataccttgctgttacttgattctagtgaaaatcatcatagagaattaaagaaaaaatcaactcaaactaccagtaatgttgaaacattattacccaaaattcaaaataaaaatttaacacagatgataattgtaacattagcagaaaaaacaccttatttagaatctaaacgtttagtagaagatttaaatagagctaatataggccataattggtgggttgttaatcaatcgttagttacgctaaatcaacgtgatgacctttttagtaacaaaaaagaagatgaatcattttggataaacaagattaaaaatgaaagtcttgataattactttgtcataccttatcgagtattagaatattgatattattgattataatgagaactatatgataaatagagtctactttaaaccagttaataatttaggagttaagcaaatatgtaatttatcaaatgacaataaaaattattaacaatataaaagattctaagtagaaagggagaaaaaaattgaattatagtgaaatatcgcaatacttgaaagtgatggctgatagtagccgtcttgaaatattagatttgttatcttgtggtgaattatgc

SEQ ID NO: 4248 - DNA, 3116 bp, Artificial Sequence
  Description of Artificial Sequence: synthetic nucleic acid sequence
attacctcactttatgttttacatttaaattcccataaagttttatcatcaaacacgtacagtaattatattagaaaatctaatatgctattgtttaatcaaactaagggatgagtcaatatccattctatagacgcatgtttatcatcataaaaaaatgtacactcatatataattcaataaaggagttgtatcctatgagaaaaatacttaagggtattatattatcattaataatcatcggcttaatcaaaacgttcaatgaatatgatgttatacattgtgcaaatcattatttcgaacaaatcaaaagtggaaaaataattgaagatatcaaaatcgatcatttcaataattatcataatattaattttgaagatctaaatccttctgactttttttaacatttatgtcatgctaattgagaaaaagataaaaacatgatgttatgcaatgtttcctgttaataaattaaaacgatgtattttgttattttatccattaattatttatacctatatagatttattgattaatttttcttaaaggtaacacataatactatcccataatatataagctaagtagttgacttgtatacctatagggggtacattagatgtgaaatggaggcatttagatggcgaatacaacgttgactttggatattattggtatgacatgtgctgcgtgctcaaatcgtattgaaaagaaattgaatcgtatgaatcatgttcaagctaaagtgaatctgactactgaaaaagcaactatcgactatgagtctgacgattatcatctcgaagattttgtagagcaaattcaaagtctcggctatgatgttgcagttgagcaagtagaattaaatataaatggtatgacatgtgctgcatgttccgatacataacgcctaacaacttttgatattcaactactttcatgtgaagaacctctgcgttttcttgtagtactcaaactcaactacacctgtttctccgtctttattctttgcgatgttacattcaacaattgacttgcctgagtcatcaacatcatcacggttgtagtaatcatctcgatataacaacatagctaaacttgcatctgcttcaattccacctgcttctttcatgtcagatagcataggtcttttgtcatttcttgtttctacacctctgctcaattgagatagcaacacaataattgcacctgtttcatttgcaataatcttcaaatctcgcgatatcttttcgataccattacgacgatctaacttactgtctgtctgcataagttgtaagtagtcaatgaagataacctgttgcacatctttgttcttcatcgcttgtttacgtacatcatgtgtagtaatattgcttttatcgtgtatatctatatcaagtttgagtattctgtctgctgcagttgttaaacgtgttaattcatccggttctaaatctttaatttctttgatacgagttagttctatcccagtttctgctgataacatccttttcaatacagacacgccagttgtctctagactgaagaatgaagttttatagccttgagacgctatattaagcatcatattaagcgcaaaccccgttttacctactgacggtctcgcagcgattacaatcaactgtgtaggttctaaaccacctattttgtaatccaccagtttataacctgtattgattttttgttttggttcttcgctatataattcttcgacaaagtgatctacaatttttttagtcccactttcttcacttgcactaattaaactgaccttttgtagtttgttaagcatttcatcaaaattttgtatattcggatcagaattgaattcttgtaaatgagtgtaccaagcccacacaacaataggtttaaatgtatcaagtgtgtgtgcttatctgagatttacactcgcaaatcgtgagcatccactttaaatagtacattttcattttttacattggtgattacttatatctcccaattttgctaatagttactgatacttattaattccaatgaaataataaaatcgcctaagacataattcgtgtcttaggcgattttaaataattgctattcagtaactagattggaattgtaattataatatgcatttcaaaaccagtctattattcaacatattgcttatgggaatttagggaattggtcaaaatcaggattacgtttttctttaaacgcgtcacgtccttctttcgcttcatcagtagtatagtaaagtaaagtcgcatctccagccatttgttgtaaaccagctaaaccatcagtatcagcattcattgctgcttttaagaaacgtaaagcagttggtgagtgttgcatgatgtctttacaccatttaactgtttcgtcttcaacttgttctaatggaactacagtattcactaagcccatatccaaagcttcctgtgcattatattgacggcataagtaccagatttctcttgcttttttatggccaactatacgagctaggtagccagaaccgtacccagcatcaaatgagcctacttttggtccagtttgtccaaaaatagcattgtctgcagcgatagttaaatcacaaacaacattaagtacatttcctccaccaattgcatagcctctaaccattgctattactggtttaggaatcacacgaattaaacgttgtaaatctaatacatttaaacgaggaatatcatcttcacctacataaccaccgtgtccacgttttttttgatctccacctgaacaaaacgctttgtccccttcaccagttaatacaattactgatacattttgatcatcacgcgcacgtgaaaatgcatcaatcatttcagcaactgttttaggagtaaatgcatttcttacttctggacgattaatcgttactttggcaatcccttcgaaaaattcatatttaatttcatcatattctctaagtgtttcccactgtctagtcattttgctcctcctttaaaaaacctaatattattgtatcaaattccgtactatcttccacatgaattgtatgtccgacattagaaatttgaactttatgactatcttgtaagtgattctctaattgttgt

SEQ ID NO: 4249 - DNA, 3097 bp, Artificial Sequence
  Description of Artificial Sequence: synthetic nucleic acid sequence
aaagttcattgatttattaataaaaaattacaatttttgagttaagttgaaaactacaaggaaacgcttacaataaaattgtaattcattcacaaggagttgttattgatgaaaaatttacgtaacagaagctttttaactttattagacttttcacgacaagaggtagaatttttattaacactctccgaagatttgaagcgtgccaaatatatcggcactgaaaagcctatgctaaaaaataaaaatatcgcgcttctttttgaaaaagattccactagaacacgttgcgcattcgaagttgccgcacatgatcaaggtgcacacgtcacttatcttggacctacaggttctcaaatgggtaaaaaagaaactgctaaagatacagcacgtgtacttggtggtatgtatgatggtattgagtaccgaggtttctctcaacgtactgtagaaacattagcgcaatattcaggtgttccggtatggaatggattaaccgatgaagatcaccctacacaagtgcttgctgactttttaactgctaaagaagtattgaaaaaagagtatgctgatatcaactttacttatgttggcgatggacgtaacaatgttgctaacgcattaatgcaaggtgctgccattatgggtatgaatttccatcttgtttgtcctaaagaactcaatccgacagaagaattattaaatcgttgcgaacgtattgcgacggaaaatggcggtaacattttaataacagatgatattgataaaggcgtgaaagattctgatgttatttatacagatgtttgggtatcaatgggcgaacctgatgaagtatggcaagaacgccttaaacttttaaaaccatatcaagttaaccaagcattattagaaaaaacaggcaatccaaatgttatttttgaacattgtttaccttctttccacaatgcagaaactaaaattggtcaacaaatttatgaaaaatatggcattagtgaaatggaagtcactgatgatgtcttcgaaagcaaagcttctgtagtattccaagaagctgagaatagaatgcatacaattaaagcggtcatggtagcaactttaggagaattctaaattatagaaggaagtgagtgaaatggctaaaattgtagtagctttaggtggaaacgctttaggaaaatcaccacaagaacaacttgaattagtaaaaaatacagctaaatccctagtaggattaattactaaaggtcacgaaattgtgattagtcacggtaatggaccacaagtaggaagtattaaccttggtctgaattatgcagctgaacacgatcaaggtcctgcttttccatttgctgaatgtggcgctatgagtcaagcctacatcggctatcaacttcaagaaagtttacaaaatgaacttcattcaatgggcatagataagcaagttgtcacactagttacccaagtagaagttgatgaaggcgatccagcttttaatagtccaagtaaacccatcggtctgttctacactaaagaagaagcaaatcgtattcaacaggaaaaaggttatcaatttgtagaagatgctggtcgaggttaccgtcgcgttgtaccatcaccacaaccaatatctattatcgaactggaaagtattaaaactctagtagaaaatgacacactcgtcatcgctgcaggtggaggtggtataccagtcattcgcgaacagcatgatagctttaaaggtatagatgccgtcatcgataaagacaaaacaagtgcattattaggtgctgatattcactgtgatcaactcattattttaacagcgattgattatgtttatatcaactatcatactgaccaacaacaagcacttaaaacaacaaatatagatacgcttaaaacatatattgaagaagaacaatttgccaaaggcagcatgctacctaaaatcgaatctgccatctcctttattgaaaataatcctaacggtagcgtgctcatcacatcattaaatcaattagatgcagcactagaaggtaaaattggcacactcattacaaagtaacgttttaacgtataagtagaaattaatttaatcatattcatacagtgcatcctgttattccactcctctccatttcatacagggtgcacttccttaatcaatcatgtaaaatactaaccaaattcaattgataggcttttattttaggttaactgtcgaaggagatgaaaccgttggaacaagcgatcaatgataataaaaagaaaaaacgttttaactttagaatgccaggtgcatttatgattctctttatcctaacagttgtcgcagttatagcaacttggataatccccgcgggtgcatactcaaaactttcatatgaaccttcatcccaagaattaaaaattgtcaatcctcatcatcaagtaaaaaaagttcctggaacacaaaaggagcttgatcgattaggagttaaaatcaaaatagaacaatttaaatctggtgcaattaataaacccgtttcaattcctaatacttacgaacgtctaaaacaacatccagctggtcttgatcaaattactagtagcatggttaaaggaaccatcgaagccgtcgatattatggtctttatacttgttctaggtggactgattggtattgttcaagcgagcgggtcctttgaatcaggattgttagcacttactcaaaaaacgaaaggccacgaatttatgttgattatgttcgtagcaattttaatgattctgggtggaacactatgtggcattgaagaggaagctgtagcgttctatcctgtactcgttccaatatttattgcgcttggatatgattctattgtctcagtcggtgcaattttcttagcaagctctgtgggtagtacattctcaacaatcaacccattctcagtcgtcattgcttctaatgcagcaggaacaacttttactgatggtctttattggagaataggcgcttgtatcatcggtgccatatttgttattagttatttattctggtattgtaaaaaaattaaaaaagatcctaaatcctcttattcttatgaagacaaagcagcat

SEQ ID NO: 4250 - DNA, 3553 bp, Artificial Sequence
  Description of Artificial Sequence: synthetic nucleic acid sequence
taaaacctcaattctcaacttgataatcatattgatatagtgattatacgaccttttatgattgaactcaaaaagttatcaatgaaatgtttatgttgaagagtgataaagttttgcaaagataagatgaatggttaatatatagtcgatttatttaataatgtgcaaattaaattccatgctatattaatgtcgtttttcttgttatcttttcgcataactacacatagcattcgttttaattctgtatgatttaaagggattttagtccaatttacgtgatcatatagtaaagaattttgactagaaataataaatcccttattatgactcaaaatatgttgagcgagtttcatatctgaaatcattcgtacttgtgccttagtcttttcaatcaatttactttttattgagcttgtcattggttcgagacagtatagtgattgatttgtaaattgagatagcgggggatgtacagtcatagctagtggatgtgatttgggcacatacatataataattttcttcaaataaaggcatgacgcgtaaatgtgtttcccgttctaacacaggagtaaattcagtgattgcaagatccaattgattggaaaggatttgatctaataatttatcatgttttgtaagttgcggaatcatggtactgttactttgttgttcaaatgtttgaattaggggaagaatcatttgagaggcatcactttcttcatatccaatataaattgtctgttggttatgtgatacgtgttgttgaaatgagtgaatggttttatccattaattctagtatttgagttgcctgtgagagtaactgtctaccttcaacagttaatatgatatttctcccacttcttttaaataatgtcacccccaattctttttcgagttgagtgatttgacgactaatcgcagactgtgcaatgtttagttctaatgccgcatctgaaatatgctctcgacgtgcaacctctacaaagtatctaagttgttttatatccatagttgatttccctccattcaataaaataaatactgtcttattctaaacctagtatatcagtattttttacaatcgttctaataattagatgaatttaatctaatttatatattgaacagataaataaattacattatagtaattactatcaaacaaaattgtcagaaaattctaataagggagtgtgcatcatgtacaatgagaaattaaaaaagtagtatggagataatagtaccaagtccaggtaatactttattagatatttcttgtccacgtaatccagttaccactaatattctccaaatatttatttgagcgcctatatctataataatagaaattaatattgcaaatgcaaaactagcataaaattgtgcagtaaacactgcagtttgagtcagaaatgctggaccaatagctgatgtagccattaaaaaaactgaaccatataataatcgtctatgtttttttgtgaatttaaaattttgtcctttttgattgaaatcttgttttgtattttcccccatcttttgaccccctataaggattgaatatcaatgccttctttcattaattcatttctaatttgcgtaacaaattctaatgcgtgttttccatctccgtgaacacaaattgtatcagctttcaaatcgatgatttttccatttttacttacaactttattttccaaaaccatttttaatgcttgttggattgcttcgtcagtattagtgatagtggcatcggttttttttctacttaccaattgtccgtcatcttcataacgacggtcagcaaatacttccgaagctaccttaagccccactaattcagcttccgaaataagtaatgtattcgctaagccgacgaaaattagatttgagtcgaaatcaaaaactgcttgagcaattgcatgtgcaatttctttatttctagcccccatttgataaagggcaccatgaggtttaacatgcatcatttttacatgattgattttacaaaagccacttaacgcacctaattgatatataactaagttataaatttcatttggagtaagatccattttacgacgaccaaagcctttcaaatcaggaagacccggatgtgctccaatacttatattattttttttcgctaattgaacagtttcattcataacatcttcatcacctgcatgataaccacaagcaatattagcagaagttattaatggtaaaatgtgctgatctccaccgaatgtatagttaccaaaagcttctcctaaatcacaatttaaatcaattttcaacttcatttcacctctttaatgatttgatgtttttcaagaaattttatatctactttactggcatcgccttttgcatatattggataatttaaaaccgcatataaaaagtcagctgtagtagtaaaaccttcgatgaccatttcatctaacgcaacttttaatttattaatagcagtttgtctattagaatcctttacaatcactttagctacaagtgaatcataataaggagaaacctgataacctgtgtaaagtaaagaatctacacgtatattaaatccttgtggtaagtgtaatttattaacttttcctggagtgggtaaaaagtttttttcaggattttcagcatttatacgcgcctcaattacatgaccattaaataaaatatctttctgagtgaatggtaattcaccgtgtgttaataaatataactgagcttgtaataggtctctatcagcacgcatttctgtaactgtatgttcaacttgaatacgagcattcatttcaataaaataatgtgcatcttctgtaactaaaaattctattgttccagcactacgatatcttgaagcttgagctactttaactgcgtcgccacatattcttgttcttctttcttcagttaatgcagcacaaggcgcttcttctattaatttttgattctttcgttgaacagaacaatcgcgttcacctaagtgaacatagttatttttaccgtctccgataatctgcacttctacatgttttgctactggtatgaacgcctctacatacactcgatcatcattaaaatatttttgtccttcacttttagcttctttcaaagcctgatccaaatgagatgcttctttaacaattctgatgcctttcccaccaccaccactagctgcttttagtacaactggaaatcctatttctttggataataatttaatttcatctacactttgaacagcatcattagaacctggtataacaggtactcctgcttgtttaacagtttgtctggcagtaattttatcccccatcatttccatagttgtcttactaggtccaataaaatgtatatgattgtcttcaacggctttcgcaaaattcgtagattccgataagaaaccatagccagggtgaattacgtttgattctgtaacttttgcagcagatataatacgatcaatatttaaataactgtctaatggatttgcttcacctatgcatattgcttgatcggctaaacttacatgta

SEQ ID NO: 4251 - DNA, 3505 bp, Artificial Sequence
  Description of Artificial Sequence: synthetic nucleic acid sequence
gtaattctttatcatttttagctttttttaatgctgcgacagtgattttttttgctttatcacgacttatatttaaagtgataggttttaaattttttgtttcaccgtcaattttaactttttcttttttacctttttcaaagtcatcatcttctaattgatcgatgactaaatctgtatatcgcttaatcagttttttaacatcttcttgttgagaatgaacaatacccaatttattattcagatcaaagtttgcatttgaaagtccctcttctttatagtcagaaggatcttcatcaaagatttgagcagctgtttctaatagttctgagtttttgacgctatactttttcttgaataagggtgattcgaagaattgagttgaatcatttgctgtccattggaacttaccaatatctttatctaatattttaggtgatacgctcatgattcctttatttgattttggatcatgaccgatagttccagttattttagaactatctaaaatagttttaggtaaaccaagatcttttagatattccttagatgcattagcatgtagattatacgtattaacatatgaattatcttttaattttttttggaatttcttttcgttactaaaacgatgatcaacataagattttacatttatagcggtctttttttcgctcagtaaatatgcatttttaggtgtatttgttacaaaggcatatacaccccaagcaatccccaaaagaatgattaatccaagtacgataggcactataactttaattttttgagacattaaatatcctcccaaattgtgtctatgtctacatatctatatttttatttttctttaattttaaattctttagtacccactttttcgttattgctatgatttggatctttagcttcaagtgttactggtgttttagtgtctttcaatttaaagaacataacaccttttacttttccatctttgttaattttgttatccatatcttcttcatatttttcctttaaatcagtatcatatccaccgccaatttctaatcttctcttaacatctttagaattttgataaatatcaaatgattcgataaatgctgaagatgctgttaaatctttgtcttttttatttttaacaccatagatgatagcgatacttggtttcttgtcatcatcgtactcagatgctttgacagttttggcttctaaaatttcaatatcaaaattgtctgttgttaatttatcatttttgaatttcgctgttgttttatcttcattgtcatttttgtctacagaaacgctatctgtagaattagatgaagaatcatttttagattcgtcatttttgtccccacatgctcctaaaatgagtgttgacgcaaataatagtgctaatacttttttcattattaatatcctcccgtaaataagaaataaaataaatatttaaatgtaaaatatcctaataataattcaatataataatataatggatattttcgctattaagtatatcatttgtattgattaatagtaatacttttatttaaatattctatgaaatctatagaattgccaacatagaagataattaaaatattgttagtatttatatatttttttataattttgtttcatttaatttagttaaactttttctgcttatattctctaataaaaacacttcagatgataattgaatttaaattcatttaaagcgtatcaaccaagtttttaaatatagacatatgtactttttatcgtagatatttataagaatattcatttcactttattctcttaattgaaaataattatcatttatattgacaactgtatgtgcctcgtttaatataattctcaaatcgtaacaattacgatttgttttatgcaattattttaagttattgatttttatgaggttaatcatttttattaacaatttaatttaaaaatttacaataaaaaggagtgttttatgcaacgtcaagtggtcgaattttcaaaatataatccatctggaaatatgacaattcttgttcattcaaagcatcaaccgagcgaatacgcagcgattgcacatcagttgatggcgacaacacatgtgtgttgtgaacaagtagggttcattgaatcagtaaactatgaaaatggggataactatcacttggtaatgagtggaaatgaattttgtggtaatgcgactatgtcttacattcactatttaaaagaacgtttattgatacagcatcaacaatttcaattaagagtttcgggatgttctcatcctgtagagtgtaaagttcattcgcaacattatgaagtgactatgccaaaagtacatcaagttaaggaaagatttgtgaaattaggggaccaacagtttaaagcatttgaaattagatacgatacatacattcattacgtgttgatgtgtgatggtgtagatttagcaatgaaacagcgcgtggaagattttgtcagtgcgcaaacatggcatcaacaatttaaaacgattggcgtcatgctttttcaacaagataaacaattcatatatccactgatacatatacctaaaatagatagcttaatctgggaaaatagctgtggttcaggagcggcttctatcggtgtgttagttaattatctaacagatcatgatattcaagattacctagttaaccaacccggaggcagtattattgtctcatccagaaagtctggacaaaatgaataccaaacaacgattaagtgtcaagtttcaactgtcgcaacaggacaagcatatatagaacaggagacaatgacgcaaatatgaatgatcatacaaaaatagagaaccaattacaatattatttagaacaatttacgtacttacatcaactcgttttggaagatagtcggcatattgttgatttagaaaatttgattgatgaatacagtcaatggatacttcaacctttggcagagcatcactatttaacatggaacgatttagaaacaaaaatgagcttaaccaagaagcttcaagaggtatcagcaaaatgtgtgaaacaagtagaagtcattcgcgcacaacgtttgttgaatggtagggcgaccacgtcaggttatttcgaaaatatagagcattgcattaatgaagaattcggaagatggcaaattggaaaaaatgacaaattattactgattggttcgggtgcatatcctatgacattgattcaagttgctaaagaaactggcgctgcggtcattggtatagatatagattcggaagcagttgatttagggcaacgtgtcgtcaatgtactagcgccaaatgaagatatcgttattagtaatcaaacagttgatcaattagaagacatccaatctgtgacacatattatattcagttcgacgatacctatcaaatatgacattttgaatgaactttacacattgacgaatgatgaagttgttgtagctatgcgatacggtgatgatataaaagcattgttta

SEQ ID NO: 4252 - DNA, 3438 bp, Artificial Sequence
  Description of Artificial Sequence: synthetic nucleic acid sequence
acatttgttcttccctaataacagagttttacgatccgaagaccttcatcactcacgcggcgttgctccgtcaggctttcgcccattgcggaagattccctactgctgcctcccgtaggagtctggaccgtgtctcagttccagtgtggccgatcaccctctcaggtcggctacgcatcgttgccttggtaagccgttaccttaccaactagctaatgcggcgcggatccatctataagtgacagcaaaaccgtctttcactattgaaccatgcggttcaatatattatccggtattagctccggtttcccgaagttatcccagtcttataggtaggttatccacgtgttactcacccgtccgccgctaacgtcagagaagcaagctcctcgtctgttcgctcgacttgcatgtattaggcacgccgccagcgttcatcctgagccaggatcaaactctccataaaaattatgatgtttgattagctcataaatactaaatagtttgtaacgtttcgttactgtttattggaattaacgttgacatattgtcattcagttttcaatgttcattttctcaccgacaagaattaattatactcttcatggttgtttaagtcaacaactttttgaaattaattttagtcgtttgtttaatgattcgttaagttgtttcgctcaacaaataaacactatacagacttattctcgttttaacaacagtaaaaattacactatcaaaaacaattcaaattactccggaggaaaaaccgaactttttttgtatgaaatttaattataaacgtgttatacagaaaaatggttgctaaaataaaacttaaacgcctatacaaaccctattcacaaactttatttttgttgttcattttaaaatatttttactattttactataatccttgttttttattccaaatactttacatcatccttgggtaaagaaggattgattcttatcctcattaataataaatgtaattataaaagcctttccgtgaactcaataagtctgaattctaaaaagcgaaacagaaatcttatcatattcttctttgtttcaatccattaccgaaccccaacttgctttgtctgttgaatttctcagtgaaattctctatgttgggaagattcatatataagcgtgttcaatcttcttctatttaaatgtaaataaagtctagaatatagacttatatcccagactttaaaatagtagatattattacatttccgttctacctgcaattgctttagataaagtcacttcatcagcatattctaaatcgccgcctacagataaaccttgtgccagtcttgtgactttaatcccaattggtttaaccaacctagatatatacattgcagtagactcgccttctaggttaggattcatagctaatataagctctttcacctcatcgtttttgaggcgttcaactaatgcaggtatattgatgtcttcaggcccaataccatccattggtgaaatcgaaccatgaagcacgtgatataaacctttatattcacgcattttttccattgctatgacatccttgtcatcttcaactacacatatgacagaacgatctcgctgtttatcttcacatatataacaaggatcattttctgtaatatgcccacaaacactacaataggtaagttctcttttaacatcaactagtgctttagcaaacttaacaacatcgtcttctttcatatctaaagtatgaaaagccagacgttgagccgtctttggtccaatgcctggcagtttcataaaactatcgataagctttgatataggttctggataatgcatatttcatcacattccagggatgtttaagccttgagtatgcttacctaaacgttgttgtgttaactcatctgctttattcatcgcttcatttgtagccgccaatactaaatcttgaagcatctcaatatcttctggatcaacagcttcttctttaatttctacatccacaacttctttatgacctgtttagatagaataactggtcgtatgctacctggaacaaagcttcagtctggtttacatcaagctatagaggctctggaaaatgttgaaatttctcaagatatgagtgtgatggcaaccataacattccaaaacttatttaagcaatttgatgaattttcaggtatgactggaacaggtaaattaggggaaaaagaattctttgatttatattcaaaagttgttatagagattccgactcacagtccgattgaacgagatgatagacctgatagagtatttgctaatggtgacaaaaagaacgatgcaattttaaagacagtgattggtatacatgaaactcaacaacctgtgttactaattacacgtactgcagaagcggcagaatatttttcagctgagttatttaaacgtgatatacccaacaatttattaatcgctcaaaatgtagctaaagaggcacaaatgattgctgaggcgggacaattatctgcagttactgttgctacaagtatggcagggcgtggaactgatataaagttatcaaaagaggttcatgatatcggtggcttagcagtgattattaatgaacatatggataatagccgtgttgatcgtcaattaagaggacgctcaggtcgccaaggagatcctggatattcacagatttttgtatcacttgatgatgatttagtaaaacgttggagtaactctaacttggcagaaaataaaaacctccaaacgatggatgcatctaaactagaaagtagtgcactctttaaaaaacgtgtaaagtcaattgttaataaagcgcaacgtgtatctgaagagactgctatgaaaaatagagaaatggcaaatgaattcgaaaaaagtattagtgttcaacgagataaaatttatgctgaacgtaatcacatacttgaagcaagcgattttgatgattttaattttgaacagcttgcacgagatgtgtttacaaaagacgttaaaaatcttgacttaagtagtgaacgtgcacttgtgaattatatatacgaaaacttaagttttgtcttcgatgaagatgtatcaaatattaatatgcaaaatgatgaagaaatcatacaattcttaatacaacaatttactcaacaatttaacaatcgtttagaagttgctgctgattcatatttaaaacttcgtttcattcaaaaatcaattttgaaagcgatagatagcgaatggattgaacaagtagataacttacaacaacttaaagccagtgtaaacaatcgacaaaatggacagcgtaatgtcatttttgaatatcataaagtggctcttgaaacgtatgaatatatgtctgaagatataaaaaggaagatggttagaaatttatgtttaagtattctagcctttgataaggacggagata

SEQ ID NO: 4253 - DNA, 3979 bp, Artificial Sequence
  Description of Artificial Sequence: synthetic nucleic acid sequence
ccaatgtgcctaaagtgtaccacgacctcctgcgatgagagacgtaattcgatatatacatcaatggatgaacgacgtcgaaaataaaaatttaaatatatagtaacaatggattatacaagttgatgatagcaatgtagatattaggaataattagttattaaataaagagactgtttgaaactctagaaatgtaatatcatatctagatatcctcaaataaatgtattattatttccatcgtcatttaaataaaaatttaagtgcccgagatattaaaagctttctcaggcacaatgcttttaaatttagcgtaataaatgcttatattaattattgattaaatgcacctttgttggcaatatgttcgacttccttgccgaattttttaaaattattattaaagcgttgaatcaaatcgtaagcttgtgctttgtagttatctttattgttccaagcattgataggattcagaatagttgtaggtacactgtcaatttgaactggaatatttaagccaaatgtatcatctttaatatatttagtattttttaatttacctgatattgcttgatctaccatttcacgagtatagtgtagactaattcttcgccctacaccatatttaccacctgtccatccagtatttactagatatacatctacatcatgaatatcgattaaatttccaagtagatcagcgtactttgttggactcaaaggtaagaatggtgcaccaaagcaagttgaaaacgaaggttgaggttcagtaacaccacgttctgttccagctagtttagacgtgaatccacttaagaaatgatacattgcttgatctttagttagcttagaaataggagggataactccaaatgcatcagcggttaagaatataatcgtattcggatgtgctgcctttgaaggtgtaacaatattctctatatagtcaatagggtaggcggcgcgagtgttttcagtataggtgttatcatcaaaatctaccgtaccgtcatcatttgtaactgtgttttctaatattgttccgtatttaatagcattataaatttgaggctctttggctataattaacttatctcatcgtggtgatacttcttttgacaaacttctcggacatctccctagtgttcaagaaaaatggaatgcattggaagatatattaaaaaatgaggggcaattatctgttgatttaaaagaagaaattaggaaaatactagctcaaaacagtggttgtctatactgcaaatctaaaggaaaacccaataagaaatttaccgatgaaaaatctttagtttgcataggatttgttgatgtttatgtgtcacaaaatggacgggttccacaatctacaatacaggttttaacaaagacactaactgatatagaaattgtagaattgttagcattcatatcatttacccactgtcaacaagaatttggtgccatgatgaatttacaacctagcaataactgaaaatttaatactgatcaataatatatgcctcttgtaaagtattagttactttgcaagaggtttttattttaattgaaaattgataattaagaacgtagaaagatttcattataaaagaaagaattttctgaaaaatacttgtcagataacttgtaacatgttagtgtattactacatttttactttaatgtattatcgaactaaagaattcggcgtgagggaggggtggcttaagtatgaacaataccatcatttcaatgaaagaaaaggaattacgttttttaaagttttttcatcaacaaaaatataatgttgtagattttaacttaattgaagaattggattggcaacgattgactcatgaagatttgcaacaaatggatgaaagaagcttttggcaacaaaataaatctatctatgcattaagaaatgattttaccgatcaattattcagatattattcgaactatccaacacattttaaaaaagtagcttatgcaggggatattatcagagataacagagttataaagcaagtcggcattgagaattacgagccacaatttgataatatcactcaaaatttcttagatttccaatattttattcaaaacgtacttcatgatgacattcaatttatcattttaggtcactatcaattgattgatgcacttttagagaaaaatcatcaaactagagaagttatggagatgatagaagaacgtaatttatcagggcttattcaaacactaactttcaatcatcccatcattcaaattcttaaagagaacacattaaatcaacttaaaatactctctcattatttaccagagcgacaccctgcaatggtggcaattcaatcttggtcacaatggtttactgatcatgggattactgaaatccaccttgatgtaactgcacaagcgcctagatcttattacaaaggtatttttataaaatgtcatcttaaaaatactgctcatagcgttttgacaggtggatattatcacggttcactagaaggttttggtttaggattaacactttaattataaaaggtgaggtgaaacgccatgttacgagttgcattagcaaagggtcgtttattaaagagttttatcgaatatttacaacaagttaatcagatagatattgcaactgtacttttaaatagacagcgacagttattgcttacagtcgacaacattgaaatgattttagttaaaggaagcgatgtgcctacttatgtagaacaaggtattgctgatgtaggaatagtgggaagtgatattctgaatggtcaaaaatataatattaataaattactcgatttgccatttggtaaatgtcattttgcgttggcggcaaagccagaaacatctcgctataaaaaagtagcaacaagctatgtacatacagctactcaattctttaataaagaaggtatggatgtagaagtgattcaccttaacggttcagttgaattgtcatgtgtagtggatatggttgatgctattgtagatattgtacaaactggttctacgcttacagctaacgggctcgttgagaaaaagcatatcagtgaaattaacgctaagttaattacaaataaagaatcatattttaagcaatcatctgaaatagagagactaatcaagcagttaggagtgtctattaactatgcttagcgcacaacaatttttaaaagaatttaataatgttgaatctctagatgaatctttgtacgagatagtgagtcagatttgtgaagaagttaaattacagggagataaagctttaaaaaattataatttacaatttgatcaagtggaaactgagaagcttgaattagagcaaagccaactaaaaaatgcatacgacatgctagataatgaaacacgagatgcattagagcaaagctatcagagaattaaagtgtaccaagaaaatattaaggtaaaacaggaatcatctcaacaaactgaatgttatgaacgataccatcctatcgaacgtgtaggtatttatgtgccgggaggtaaggctagctatccgtctacagtattaatgactgcaacacttgctcaagtagcaggtgttaatgagattactgttgttaccccacctcaaaatagcggtatatgtcaagaggtgttagccgcttgttacattacaggcgttcatcatgtttatcaagtcggtggagcacaaagtattgcggcgctaacttatggcacggaaactataaaaaaagtcgacaaaatcgtaggtccagggaatcaatatgttgcttatgccaaaaagtttgtattcggtcaagtaggcatagaccaaatcgcagaaccgacagaaatagccttgattatagacgaaagtgctgacttagacgcaatcgcttatgacgtatttgcacaagcagaacatgatgaaatggcttgtacttatgtgattagtgaaaatgaaaaggtacttaatcaattgaacact

SEQ ID NO: 4254 - DNA, 3465 bp, Artificial Sequence
  Description of Artificial Sequence: synthetic nucleic acid sequence
atagcataggtgactcaaatgtaattctacctttgtataatgtgagcaaccagttaaatagtttaactccggttggaacaccgattaacattgttgagatagagaagaatgagttaattaacgcaccattacccatagtgaagaaatggtgaacccaaactaagaaacttaagaatgcgatacctgcagttgcccaaatcatactttgatgaccgaataaacgtttacgggcaaaagtagggatgatttctgagtacataccgaatgctggcaaaataacgatataaacttcagggtgcccccatacccagaagaagtttgcccaaagcattggcataccgccatttgctacagtgaagaactgagttccaaaaattctatcagcagtcattaaagcaagtgctacagtgaacactgggaatgctaatataacgattaatgttgtaatgaatgttgttacactgaacattggcatttgcataaacttcattgttggagttttacatcttagaatcgtaacaaagaagttgataccagtcattaacgatccgataccagatatttgaattgcaattaaataatagttaacacctggacctggactgaattcaccagcaagtggtgcgtagttagtccaaccagcagctggtgatccacctacaataaatgataggttgaataaaatcataccagcgaagaatagccagaaactaacgttattcattacagggaaggcaacatcgcgtgcaccaagttgtaatggaataacaacattccataaaccaaagataaatggcatagccataaatataatcataattacgccgtgcgtagtaaatacttcattatagtggtttgcttccaagaatttgttatctggaattgttaattgagtacgtaacattaacgcatcgataccaccacgaacgaacattaatacggcagaaattaaatacatgataccgatttttttatggtctacggatgtgaaccattctttatatagatatttccataatttgaaataagatataactgctataaggccgatgactaagaatggcgcagcaatttgtgctgagataatcatccaatttcctttaactagtagttgatcccatggaaaattcattaatgtccacctccatgatcatcgtgttcttttttgtgaagtttagacgcattttcgtcttttgctcccttagaaattttttccatttctttagagttataatcctcttcttttttgaactcattatcgtatttttcattgttgccgagaatcataggtttcataccgtgacgttcatagttagggtttgttatatgaaccttacgagcaggtttgattggtttatcttttacatctttgtataaatcctcttcagctgtgaagttaggatctttttgttcaaagttgtaacgtttgtaagcgtagaagatatactctggatcagccgcagggtcaacaaacgccatatgagttccactaaatgttaattctttgttagatgtgcttggtaagagttgcttgtcaaaagtatcttgacttaaagttttcttacctttagcctcttttacccacttatcaaaatcattttgacttacagagtgaactttaaatgtttgacgagagaatccctcaccattgaagtttgagttacgacctctgaaagtacctaattgatcagctgttaaagtccaattcatagtcataccagtcatggcatatttctgaccacctaattgtggaatccagaaacttgtcattgtatccatagattgaagcttgaatacaactggtcgatctttaggaattgttaatgtgttaacagtttcaatatgttgatcagggtaggcaaagaaccatttatagccagcacttactgcgtaaacgacaagtggatctttgtctttttctggtggtttttcataatcgtataaagttttaactgtaggaatagctaaagcaattacgattaaaataggtaccacaaaccaaattgtttcaattagagaattgtggtgcatcttaccagattcgctattctttttgtagctatatttaaaaataaaaatagcgaacatggaaagcactacagcaacaataacaagcatgaaaattattgaatagataatcaagaacttctgactgcttgctactggcccttttgcattaaaaacttctatatttgaacaaccactaagtaaaattagtgtgccaaataatagaagcaaagacttaaattttgacactttttttgacctcctaatactacaaatgtagggcttaccaataattttagtttattacacaatatttacaagagtatgttcaaaaaaaattacttatttatataattgaggtctgttagtcctagatatgacggggtttgtaagatttgttaaaattatgtgtacattttgtgaaaatagacaaatttagcaaaattacatgtaatacaacacattattgataaatcttatcaattagatacaaaaaaagaatattacttatagaaaaatatgatcttatatagaaagaattaagttgaataatatgtctataagatgtgtctgattttaggtaggttaatagtaggatatattgttttagtttattgattgaatgttcttttaagtgatgcatagtcatataaaataatttttaatcacaaaaaaataaacgcttatacaattaatttttgtataagcgttctcgtaatttatagctcattaaaatatataataggtagaaattaaacaaagattatgtgtgattaagaggagaggttcattttacttcaatatttcttatagaagttttttcagcaccatcagaatccgtaacttgatattttactttatacttacctgctttggatgtatcaacttgaccatcaattttgattttatgagtaagatcgccgtcttctttatcgtaagcacttatgcctttaagtaaattatattcttgtcctttttcaataacgatatcgttaacaccttttaattgaggttcagtattagtagtggcttctgcatttaaattgggtgtcactaatgtagctgaaactccaagtgctgataatgactgtagtaatttgttcataacttaacctccgtctattgaatcatctataatttaagtttaatataccctatttttattttgtcgacatcatactatggtcttaatataactcaatcaacataaaaattaaatccttttttatgaaactttgataaagattatgtaaattgtgaattgtttgaaaacatttactgaaactgaattcaaagttaagtgttcaattaataagtattgtgaattagacgaaaattcgttgttatatttaaatgattaataaaaaaaatataataaaatcaactcataaacttatgttcaactcattcatgtgttgaaagtaagacagaaaaagtccatgactacatattcatgtc

SEQ ID NO: 4255 - DNA, 4247 bp, Artificial Sequence
  Description of Artificial Sequence: synthetic nucleic acid sequence
cgttatactttccagctaatgtcagcaacttaacccataaagtgatgattgtatctcgttctggcagtgcttctatatacttgattttgctatcatcgaacattccaacttttaatttaatccacgatacttcagccatttacttctcctttcaacattcggttgagtcgttcatctacggacacccaactttcatgtaatttgtatttctcattaaaactatctatacctatttggtgctgctctttatgatgtcttgaacatagcgctaatactttgttgtctgtgtgatctatctttcgtctgttacgtcctcgacctactgtgtgataatgcgcaagttctgctcgtggcgttccgcatattacacagttacgattgactgttgaccagtaaaggaacgctttatcatttttgagtaagtcacttgtcttataattaagtggtatattgttgtgaaacacccagtcaagaataacttctataacttgtttagcttgttctcttgtgcaatcactcaatgagagacgtttttcatagccatagagaacttctacgtaatccatgaacaaatacctcatatagtcgcgtggttgtcctgtgtaagcttctatgtcgttacagagagcaaatacttttctacgctgcttatctgtaatcttgaatggatctacaactcttacatctgcttctacttcgtaaccgttgtctaaaagtaaagatgttttgttatctagttctactcctttgatgactacagttgttgtaccgtcatcttctgtaatgtagttttttattactaccatctaatcagtccaatcagaacgggagatcttcatcagttatatcgatagggctcgttgcatttgcgaatggatttttactttttgtctgtgtagtatgttcttgttgtttttgaggttggttgttttgttggttattacctttggtatctaagaactgaacgctatcggctacaacttctgtaacaaatactcgacgaccttcgttattttcgtaattacgtgattgaacacgtccatctacacctgctagtgaaccttttgaaagataatcgtttacattcttcgcttgttttctgaacacaactacattgatgaaatctgcttctcgttcaccttgtgcgttagtaaatgttctgtttactgctaatgtgaatgtcgctacttcaactccactcggcgtagttctaaactctggatctttcgttaatcttcctactaatacaactctatttaacatttgaattctccttatctaattgttttagtcctgcatctagtttttgatgtgcatttgctatatcttttttagtaactttgttaatgttttgaatacctaaccaacgcattgttttgtctagcgttgcgtctctacctttttcttgagatgaagttacaaactggttgatacgctcttctaattctgtaatgtcattgtcgttagcgcttggaacttcttccccgttgtatatataaagacctaggccatgtaatgctgcagctttaacgaaacaacgtttttgagctttattaatatcaaatgttgtcgcgctaccctttgctaaagatttgtttctaaaatccaatactggaagccattctgtttcagtttgtccttttacagttactgacacttgtacgaagtaaccctctggagtagctaaataaggtacaaaatagttatctagtggcacatcagggtgtacaaattcatgtgttttaatactgtagttgctgtctatcttctttaattcttgatgagcgtatgaccatgctaggtaggttaatccatttttcttttctacatgatcgttaacatctttttgatttaactgattaaatagtgtttcttcagtcatactcaacctcctcatattcagttgtttctgttactttctttttaattgctctgtgcttagtcatgtcgatactcacatcttctagtcctgcaaattctcttgctctccgtctatctcttgaataagaagtatcttcttcgttgttaggtttattagtgatatacaggtcgaaaggagcgtctttcagtttaattagatatgtcactgtttctttcatcaatcaaacactcccctgcaatgacttcttttgctagttcaaatttttgttgtaattcttcatctgtgaaaaattcgtagaaattcagatgattacaattactttcatatttttgagaatagtgccaaaaggtaataccaacttctccattattatagatttatctcaagcagaagcggttatggattttatacgttccaaaactgatcgagcttctaaggttgcgatgaatcaaatagaaggacgtttaagtgacttaatcaagaaacaacgtcaatccatattagagatactcgcccaagttgaagttaacattgattatccagagtatgatgatgtagaagacgcaacgacggacttcttactagaacagtctaagcgtattaaagaagaaatcaatcagttacttgaaacaggagcacaaggtaaaataatgagagaagggttatctacagttattgtaggacgtcctaatgttgggaagtcttcgatgctaaataaccttattcaagataataaagcaattgtgactgaggtcgctggtacaacaagagacgtgttagaagaatatgtcaatgttagaggtgtcccgttacgacttgtagatactgcgggtattagggatactgaagatatcgtagagaagattggtgtagaacgttctaggaaagctttaagtgaagcagatttaattttatttgtgcttaataacaatgaacctctgacggaagatgatcaaactttattcgaagtcattaaaaatgaggatgttattgtaatcattaataaaacagatttagaacagcgattagatgttagcgaactaagagagatgattggtgatatgccacttatacaaacatcgatgcttaaacaagaaggtattgatgaattagaaatacaaattaaagatttattctttggtggcgaagtacaaaatcaagatatgacttatgtatctaattcacgtcacatttcattgttgaaacaagcgagacaatcaattcaagatgcgattgatgctgctgagtctggtatcccaatggatatggtacagattgatttaacacgtacttgggaaattctaggagaaattattggagaatcagcgagtgatgaattaatagatcaactatttagtcaattttgtttaggaaaataatgatataaaaatataaacaagacggtaagacgtctaaaattcaagattttatgacttttgggaggtaaaagagtggttcaagaatatgatgtagtagtcattggtgctggtcacgccggtattgaagcaggtctagcttcagctcgccggggtgctaaaacactgatgttaacaattaatttagataatattgctttcatgccatgtaatccatctgtaggtggtcctgcgaaaggaatcgttgtacgtgaaatagacgctttaggtggacaaatggcaaaaactattgataaaactcacattcaaatgcgtatgcttaatacaggtaaaggtccagctgttagagctttacgtgctcaagcagataaagtattatatcaacaagaaatgaagcgtgtacttgagaatgaggataatttagacatcatgcaaggtatggttgatgaactcattatagaagataatgaagttaaaggtgttcgtactaatattggtacagaatatcgttctaaagctgtcattattacaacaggtacattcttacgtggagaaattatactaggaaacttaaaatattctagtggccctaaccatcaattaccatctgtaactctagcggataatttaagaaaattaggatttgatatcgttagatttaaaacgggtacaccaccacgtgtaaatgcgagaaccatcgattattctaaaactgaaatccaaccaggtgatgatataggtcgagcgtttagttttgaaacaaccgaatttattttagatcaattaccttgttggttaacttatacaaatggagatacacatcaagtcattgatgataacttacatttatctgctatgtattccggtatgattaaaggtacaggtcctagatattgtccatcaattgaggataaatttgtccgctttaacgataaaccaagacatcaacttttcttagaacctgaaggacgtaatacgaatgaggtata

SEQ ID NO: 4256 - DNA, 4244 bp, Artificial Sequence
  Description of Artificial Sequence: synthetic nucleic acid sequence
tgtgagaaatttaaacgcgcaacgttcattcctgcattcattagtttttcgagcatttcctctgattctgaagctggtcctattgtacatacaattttagtctttctcatttttataatcctcccaaataaatttaaattgataattcttttgctaattcatacatttgactattaaatttgcgatcactttcagcaaaaatttcatcaaacggcgtagaggttaattgattattcctaatgccaacacctttagctgtctcgccttgttttaatagttcaacagcatatccaccaagtcgagaagctaatactcgatcagcaccagatgggctaccgccacgttgaatgtgacctaacactgaaactcgtgtatcaatgttaatatacttcgttaactcatctgcacattcttggccgctcatacaaccttctgcaaccataacgatagaatgttttttccctcttttaataccctgttcaatcttttcagctacatccttaatatctgtattgacttctggtaaaacaatcgtttcagcacctacagataatccagcccataaagctaaatctccacaatcacgccccataacttcaacaataaacgttcttgcgtgacttgatgccgtatctctaatcttatcgactgattcaataatagtgtttaatgcagtatcaaaaccaattgtaaaatctgtaccattaatatcattatcaattgtaccaggaataccaattgtttgaatttctttacattcctcactaattcgttgtgcccctctatagctgccatctcctccaataacaactaaaccttcgataccacgcttacgtaaattctcaatagctttcttacgtacatcctcttctttgaactgagggcaccttgcggaaaagaggaaagttcctcctcgttgaattgtatcccctactgaacccaattcaagcttatgaatatcatcatcaagtaaaccttggtaaccttgataaacaccataaacttcaatattattgtaaattgctgtccgagtcactgcacgaacagcagcgttcatacccggagaatctcctccgctagttaaaactgcaatcttcttcatgacgacatacctttccttaactagatttatcttcaactctaaattaccataaatttttttaacgttccattaaaagaaagacaattcatagatgtaaacgttttaaaaatgtaatttttattacaacataaaaaaaagagctaaaagcctaacaattagactaatagctatacaaaatcactccacaactgaaccaatttttctaaatttttcaaaacgatcatttgctaattcttcaggtgtgagttgctttaattcatttaaatgtttaaggaacattttcttaattgataaagcttgtgcttcttcatctttttgcgcaccaccaagtggctcattaatcacttcatctataatacctaaatctagtaaatcatgcgcagtgattttcatagtttcagcggcaatttgagctaagttactatctttccataaaagtgcagctgctccttcaggtgaaataactgaataagtactattttcaagcatcagaacacgatttgagattccaattcctaaagcgccgccacttccgccttcaccaataacaacagcaataactggtaccgttaatgaagccatttccatcaaattttttgcaattgattcactttgacctctttcttcagctgctttacccggataagcacctttagtatctataaaagtaaatattggacgattaaatttctctgcttgtttcattaaacgcaaagcttttctatacccttctgggtgagccataccaaaattacgataaatattatctttcgtgtctttaccacgttgttggcctataactgttacagacttaccatctaagtaaccaattccaccaatcattgctggatcatccctaaaacttctatcgccatgtaactcaataaatgaatcaaaaatatagggaatataatctaatgtggttggtctttctggtaaacgagcgatttgaacacgatcccaaggttttagattagtgtacacttttgtagtttctctttttaatgatgcttccagcatatctatttcatcttgaagatcaacttcgtttttttcttgcgattcttttaaagaatcaattttatttctaatttcaaaaagtggtttttcaaaatctaacattagttactcacctcttgatggatttttaaaatatttgataaagtctcacgcatatcttttcgatgaatgactttatcaagttgaccatgctctaataaaaactcagcagtttggaaatcatcaggcaacttttcattaattgtttgttctataacacgtctaccagcaaatccgattagtgctttaggttcacttaaattaatatctccaaccgaagcaaaacttgcagaaacccctccagtagtgggattagttatgtaagaaatatataatagtcctgcatcagaatgtctttttaaagaaacacttgttttccccatttgcattaaagaaataattccctcttgcattctagctccaccactcgcagaaaacagaataaatggcaaacgatgttctgtacaataatcaataattctgcatattttttcaccaactacagagcccatgcttcccattctaaaacgagcatccataactgcaacaccatattgtattccatctaatttcgcagtaccagacactaacgcttcattaagtccagtcttttgctgatctttttcaattttttcttcatacccaggaaagtctaatgggttagcagatgtcatacctctatcaaattctataaatgatccatcgtctgaaattgcttctattcttttatatgcggttaaagctatatgatgatcacaattaaagcatacatttaaattttcattcaattcttttgtatacattatttttttgcaattaggacattttgtcattataccagcaggtacatcattttgtttagaatcttgaactgttaaatatttctttttcttgcttcgattaaaaaaatctttaaacattggtaaacctccaaatatcctctgttacttcatttaaaaagactttatattttttgtataaatcataatagtactaaaaatatagctattcgtttaatctattttaagtcagtaagtttcatagttttatcaaatatttcttgtgtatcaattttaattcttgctacaccggattccatagcagctttagctacatttttggctactgatggagctactcttttatcaaatggtcctggtatacagtaatcaggatgtaactcattttcgtctattaaatgaacgatagcttctacagctgcctttttcatatcttcgttaatatgagtggcttcaacatccaatgcacctctaaaaatacctggaaatgctaatacattattaatttggtttggaaaatcagatcgacctgtacctacgacctttgcacctgcctgtttggcttcattgggattgatttcaggattaggattagccatagcaaaaataattggatcatcagccattgtcttcaccatatcttgagttaatatatccgctacagatacacctagaaggtgttgcagttcgtgcaggccatcactgtgcgcaacctttgatgaaatggttaggtgtctcttcaacagcacgtgcaagtttttacgtttataatacgaaagaagatgtagatcaattagttcaagcattgaaacaaacgaaggagtttttctcttatgaattttaataatttggatcaattatatagatctgtaattatggatcattacaaaaaccctagaaacaaaggtgtcttagacaatggctcaatgactgttgatatgaataaccctacatgtggtgatcgcatacgtttgacatttgatattgaagacggaatcattaatgatgctaagtttgaaggagaaggatgttcaatttcaatgtctagtgcatctatgatgactgaagcagttaaaggtcattcacttggtgaagcaatgcaaatgagccaagagtttactaaaatgatgctcggtgaagactacgagattacagaagaaatgggagatattgaggcgcttcaaggtgtctcacaattcccagctagaattaaatgtgcaacgcttgcatggaaagcattagaaaaagggacagtcgaaaaagaaggtaagtcagaaggtaca

SEQ ID NO: 4257 - DNA, 3246 bp, Artificial Sequence
  Description of Artificial Sequence: synthetic nucleic acid sequence
gaatgtttgtccaccaaaaccaggatttacagtcattactagaacataatcaacaatactcaatataggtaaaattgtttctacagatgttccaggattgatgacgacacctgcttttttccctaattgtttaatttgttcaattgctctatgtatatgtgttgtcgactcaacatgaacagaaatcatatcagcaccatgttcggcaaaaagattaatataattttcaggttgctcaatcattaaatgaacatctattggcaaatgagattgttgtctaacagcatccaaaatcggaataccgattgaaatattagggacaaatttaccgtccattacatcaaagtgtaatccgtctacctttgctgtttctaacaattgaagctcttcttttaaatttaaaaaatctatagataaaagtgatggtaaaattttaaccatttagtatcgaacctttctattggaaatttcattatataattgctgataatgatcatacctgaattgtggaatttctcctttttcaacgagtgctttgacatgacattgtggttcttttatatgattacaattacgaaacttacattgctctccagcttcatgaatatcaataaaaaaatcttttagttgttctttttcaatatgattaaaatctaacgcactaaaccccggtgtatcagcgatgtaaccaccttttctatcgtataattcgacatgtcttgtagtatgtttacccctattcaatgacttagaaatatcatttgtttctaacttcaactgaggctgataactatttaagaaagtagatttacccactccagattggccacttaatactattaaaccgtcagaccattcatcaacagtagcagtataattactatcttttccaataaactgcgtagcatatcctattttttgatatatttttattgtgtctttgattttaagaatttcttgttcggaagctaaatcatgtttagtgattaaaattctaggtttgagatgataagaatgagcaatcactaaatagcgatctaataattgtgttgaaaattcaggctcgactgcactcattactataactaactcgtcaatattacttacaggtggtcgttttagttcattatttcggtcatgtacatgatgaatatagccctcttttgtattttgaacttcaaaatctacgatatcgcccaccacaggtgaaaacttcttttttctgaataaaccacgtggtttggtatcaaatctctcaccttctacgtctacttgatacacaccactgattagtttaacgattcgaccagtcttcaaaaagacacctctcatttatattttcttaatcatattatatcaaaatactagtacttataatataacaactcaattcaagctcaatgatccacctacaaatatatagtttttaataaactctaaagaccaattgtctcatattaataaaacgagcctgcaacatatgtattcatatgtacagactcttcatcttttacaaggattttttcattttaatcagataatcatttaaaattatttcaattataatcatcattgaaaagttacactacaaatttattattaatttatcattagttgttactcatttagccatcatagctcacatctttatcagctacaattttattatcaactcttatggtgtacccagcgtcacttccttttttaattttcaaaggaatattaattgttttatcacttttaatattaaacgtttgaactgctgaatcacctttattttcaatatcacgaataaatacttctactttttgacttttactttttttaccggtatacggtactttaacagtctcatttttagtcgttgtatccttgtcctcctcatcatcttcttcttcagacttttctcctttagaaaccactaatagtatagtagaaccttcatcaacagttttatcctttggagattgagaaatgacattacctttttcgacatcatcgttgttttcttttgtcacttgaactttaaatcctttatcttcaagttctttttttgctgactcatatgacttattttcataattattgacatatacttgtcgaacacctaatgattcataaattgtaatatgatgattattaacggcaacctcactattagctacaacgctttgttcagaaattaatcctttttcatatgtttgactataagcttgctcaacgtgaatatctttaaatccgatagcctttaatttttttagcgcatcatttttcgacatacctaaaacatttggcatcttaaccttctctggtcctttggatagaacgatatcaactctattcccttgttcgacgcgttctccactatctggatttgttttaataatttggttttcaggatatttatcactataatttcttgatatgtcacctacttttagatgatgactgtctaataccttttcagcttgtttttcagttttccctttaaggtcaggcatttcttcatatttatttccaaaaacagccatagctacaaaagaaaataaaccaattaataatattacaaaaatgattgataaaattgcaattttcattttagaacgtttcttgtcgcttttttgataataacgtggttcagacgattgaaattcttgttgctttattgaatcgttaacaataggtatttgcatggttttattaaggtcattttgattttgttcatcatagattttatgattcaaatcatctttagtgagtggtaccgttttagttttatctagctcgtatttttcttcattcaaacgattctcatgtaaagcacttgttaaatcgtcacacatttcttgaacagtatgatagcgatgatatttatctttctcggtagcacgtaaaacgacattactcaatgattgaggtacatcatctcttttatccgttgttatatttgggatactatcttgaatatgctttatagcaatactcactgcagtctctccattgaatggtggctctccaactaacatctcatataatacaattccaattgaatatatgtcagtactttcatcagtagcttcgcctttagcctgttcaggcgataaatattgaacagttcctaaaacatgatttgtttgagtcagcgacgtttcactcaatgctttagcaataccaaaatcaaaaatttgtaattttttattcttatcaattaatatattctgtggtttaatatcgcgatgaacaatt

SEQ ID NO: 4258 - DNA, 3053 bp, Artificial Sequence
  Description of Artificial Sequence: synthetic nucleic acid sequence
tgggtctagtcgtcgctccaggtgttactgaacgccttgcagaaaatctcatacaagaaatgcctaaaatgttatctacgcattatgatcatcagcaagaatggatttttgatttagttactgatccgcttactggttttgctgaatctgtagatgaaatttttgagaaagtagccgattatcacgataagagacaatgggattatgtgatagcaattacagatttaccgatgtttgctgacaaacaagtgatggcattagatattaatatggaaaatggtgcagctatattctcatatccggcatttggctggcgtccagtaaaaaaacgtttcaagcatgcgatttataatattattcaagaattaaatgaagctgaacaagaaagtcgtaattatgataataataatcaaatagaaaattcagtaaaaaaacaatttccgctctctaaaatagacaaagaaacaatatatatgaaagaaacagactcttatcacttaagatatttatcaagttcacgttctagaggcatgtttcgccttgttagtggaatgacatttgcgaataatccattaaatatgatggcaagtttaagtaatatagtagctattgcatttactacaggtgcatttggacttgtatttacaacgatgtggcaaatggcttataacttttcaatgtggcgtttatttggaatttcaattattgcgattattggaatgctaatatggataatgatgtcacatgatttatgggaaccagttaataaaagcaaccataagcgtattacttggttatacaatcttacaacaataatgacattgatttttgccattataatttattatattattctttatttactattcttaattgctgaaatcgtattattgccatcaggatttttaggtcagcaagttggattaaaaggtcctgcaggcattgatttatatttaagtattccatggtttgcagcttcaatttcgacagttgcaggtgcaataggtgctggtttacttaatgatgaactcattaaagaaagcacatatggatatcgtcagcgtgtaagatacgaagaacaacgtcgataaaagcagtcgcttttatcgacattttatttttgcaatacgaaatttaacagtttatctgtcatagaatatagcgattttatgagaattaatttaaaatattgataacaacttttttatagagataacttgaaagtagggattgaattgatttgttctaattgtggggcacatttagagaaggatgataaattttgtgttaattgtgggcagagtgtgttcgataatccaaagacaaaaactgaacataattttaatagtcaagatagacaatgtccaaagtgtcacaaagtagtaaatgtcgatgataagttttgtatcaattgtggtcattctcttcagcaaacattatcaaattcaaatgacaacatagcatcacatacatattcaaatacaaaacctgaaattgaaaatgaaactgcagatcatattcgattgacagaagaagccaagcatctatttaataacacaacgaaatcaataggtaggctagcagggaatgatgaaagtttaaaattaaatttgcgtgacatgttttctgaggtgtttaaatctcacaccaaagatgaagcggatgatgtatttattgctggaacaaaacgtacgacgccacatattaatgaagtttccgaggagtggggaagaccttgggtgttctcacgtgtatttttagctttaggtatcactttcctagcgttatggatattaacaaatatatttggtaatgccaatgccataccaggtatgatatttattggcgcactattagttcctatttcaggattaatcttcttcttcgaatctaatgcatttaaaaacattagtatctttgatgtaatgaggatgttctttattggtggtgtattatcactcattagtacaatgattttatatcaatttgttacatttagtactgaatcgcaatattatggaattatgactataacagatgcgttcatagtaggatttgttgaagagcttggaaaagcaactgttgttattttatttattaattatttaaaaacaaataaaatactcaatggattacttatcggtgctgctgttggtgcagggttcgcggtgtttgaatcagctggttatatctttaggtttggatttaatttatttgatggagttaataatattactgaaatcactatacaaagaggttggacagctttaggtagtcacctcgtttgggcagctattgttggtgctgcggcagtaatagtgaaagaaacaaagcatttcgaatgggcgaatatcatcgataaacgttttatatttttcttttttgtggcagtgacattacacggaatatgggatacggaaataacacttttaagtagtggttatttaaaatatatcttattaattatgattgcatggctatttatatttatacttatgaaagcagggctaactcaggtgaatcagttgcgtgatgaatacaatcgtttagaggaaaggtgatataaatgaaattctgccctcattgtggaaatccgataaaaaaggaacagtcattttgtaataaatgtggaaaacatttaaagacatcgacacaaagaaaaagtgaaaatcaaattgaacatatgcgtgaacagcaatcgtatatttcttgtgaggaaagacaacatcatgattcaacattttataaagaacaaaaacatactggttggctaattgtattatcaattatatttgtcttgttgatagcagcgctattgtatggtgcgtactatacttacaatcattatattagtgatgagcaaagtcatcaaacaacacagtctcagcaatcaaatgaaagtggtcaaaataaggatcaatccactggtccaagcattgatgtttttagtgatgactttgatcaaggttatatgaagtcagcttcaacaagtggatatagaggtgtttataatggaatgacacgtgaagaagttgaagataaatttggaacat

SEQ ID NO: 4259 - DNA, 3585 bp, Artificial Sequence
  Description of Artificial Sequence: synthetic nucleic acid sequence
taaataatgccaattataccaataatagatgaaataataatgacagcagttgaactacttacacctaagtattcatcaactttaaacattttattgaacactagggaaccagaatacaatactacaggcaagaaagatacgacataggtaaagataaataaaatggagacaaaacgtttagtaaatgtatcataacgtaattccaaaaactcagaaattgtattaacaccgtattttagatatttaggaagaaagacccaggccaacaatacaactgctacggcagccgtaacctcccaagccattacttccattccttgtgcatagctttgaccattttgcccaacaatttgttctgtcgacaaattggtcatgataattgtagaggcaactgtaaatccagtaaggctatttcctcccataaaataaccatctgaactattcgttttaatttttcttgattgcaaataggcataaaaagaaatgccacatacgaccataataaataaaataatcgatatccaattcatttaatatgttcctccttttcactttagtcgattggatataattaaaatgaatcctaaaaaacaatgatagtgacttatacgtaaaacaatgaatttatctacatcaacttaacaacatattattgtaaagtgataaatatttcatatgtgaattgcgtttgtcatttcgtgcacaactcatatatagacagaaatataaattttaaaacttcttttttgtttttaaattgaattgtgcactttagaacattttgtaatagcgacattttttcaatataattttttaaagtatcctcgcactaaatttaactatagaaatcactttatcattttaaaataataattaaatttttatactaaaaaagcgagaccgattcttttcagattcgtcgtctcgctcccttacaactgactatgattcgaaacagtcagcaacaagcatttttcaattcatttatttataataaaagtttcaaacattaaaacatatgatataagtatccaacctttaatacatttgtactatttgtatggttgattatcatgattatggttttctcgtttattttgatcattcaatgcgtgatcatgatgagatgttgatgtttgaccaatatgtggttcattcatattatattgttgttgttcacgtttcttttcttctggcacaacatgtgaatgtatgtcattactatattgagaattgatttggtcattttgtgtttgtggtttacgtactaaaagcatgatacctgctattaaccataaggcaccagcaataaaacttaaaaagagaccaatgattcctgtaataacaagtaatattcctgatactttggcatttttgccaattaaaatagcggcaactattgatacaattaataaaatgagaagtataataatgaggacaacacctaaacctaacatcaagttataagtttggtatgctaaatcatattcccccggattttcttctataaatccttgaatcatcccatttttaaaatcacttgtttgtgtcattatgaaaaatatgcctattaaaaatacatacaacagatgtaatccattgccaatccatgaaagtattaattcacctttacgttgtatcattcttgttcctccttttcacctattcatttaattccctatttttttaaaatatatgcattaaattagatatattgtaatttatctttcttaaaatatataaatattaatgcttatcatttatcatcgtataataaattctagaagtaatccagtacatcattgaataaaaaataataaatacaactatcacacctacgtaactagtagcatacagtcccaaatcatattgaccaacgattcctaatacagagtatatgatacgaaaagcagctagcgtatgtataattgcaacaattacaggaataagaaatacccatattacttgtttattaattgtttttttgattaaaatttcatctaatcctagttgtttcatcgttatatatgcatctctatcttcatgtccttctgaaacttgtttataatacatcataagaaatatacctattaataaaactagagatacaacacttcctacaaaaattaaacttgagttgacttgtttccacatcaataggttttgttttttcacttgaaattcaatatcgtgttgaacacctattttcttaatacgatgattcaacttatccttttcttttaatacattaaattcaaccgcagtttggacttgattaggagtgatgattaaattttcatcattgtgattacgatattcattaacaatacgatccatcagttgttgttgattcacaattaaagttataccatctgcatagagtaagttatctatatttgtcgactcaatatatttaactctgtatgttttcccgaatatattgagcgttttcatttttttaaataatgacacacttgtacttattgcaatttcatcatcatctaattttatttttttattgtttttattataatcacttttattatatatagaaataaaagagttgaatttttgcttatttccaaaattaaataaaccactcgatacagtttgtctttttagctttttatgttttaagcctccctgcaattccgctccaaccatacctcgtgcatagattttaaattgaccagttggaacttcttggcgaatatctttttttaaattttctatcttacgttgaattttgctatctttatgaaaatcaccaatataataacctgcgtaatcatttttaaatgcaaattcaaacctatgatccatatttctataagttgagactgtcatacttaacgtaacaatcagaaatgtacacataaatgaaatcgtagctaaaccaatcgcactagattttacgcgtgatttgagtcctgcaataaagaaaaaatgattgggtttataataataatgatctaatttttgtaacatttctaaaactattgatcctaagctaacaaagagcaaataggtaccgataagcgttgacaaaatcgcaaaaaatataatccccaaggaaccgatagccgtgttaggttttatagctaaataatagccaatccctataaaaattaatcctaaaattaaaaatattattaaccgtacacgtgacttttcatgcgtcttacttttatttttaatcaataactgtaaggagtttttaaatgatattttaaaattgttaataacaaacaatatgatcatcaaactgagtagcatggttaatgtgattttcattgacaaaacatcaaatggataatctgacaactgaggttgatgcgtattaactattttattaaataacataaaaaagagctcaccaaataagtaacctccaacaatgctcaagattgcagatataataaattgaatgaaaagttcaatcaagatgatgagtcttagatgttttttctccataccaagagccatatttaaggcaaattcctttttcctatgattcataacaaagtgatttgcataaattaaaaatatgaataataacatcgtcataaacactattccaataat

SEQ ID NO: 4260 - DNA, 3299 bp, Artificial Sequence
  Description of Artificial Sequence: synthetic nucleic acid sequence
acttttgtgatgaacatgatattaaagtaacagcttggatgcctttaatgcgcaataaagggttgcttgatgaccctgtaattacagatattgctcatcgttatgataaaacacctgcacaaattgtcttacgttggcatcttgcacataatcgtattatcattcctaaatcacaaacacctaaacgtattaaagaaaattttgatatttttgattttaatcttgagttaacagatgttgcagaaatagatagtttaaataaaaatgctagacaaggaaaagatcctgatgatgtcagtattggagatttgaaataaatataattaatcagttagagctttgtttcaatccattaccgaaccccaacttgctttgtctgttgaatttctcagtgaaattctctatgttgggaagattcatatataagcgtgttcaatcttcttctatttaaatgtaaataaagtctagaatatagacttatatcccagactttaaaatagtagatattattacatttccgttctacctgcaattgctttagataaagtcacttcatcagcatattctaaatcgccgcctacagataaaccttgtgccagtcttgtgactttaatcccaattggtttaaccaacctagatatatacattgcagtagactcgccttctaggttaggattcatagctaatataagctctttcacctcatcgtttttgaggcgttcaactaatgcaggtatattgatgtcttcaggcccaataccatccattggtgaaatcgaaccatgaagcacgtgatataaacctttatattcacgcattttttcattgctatgacatccttgtcatcttcaactacacatatgacagaacgatctcgctgtttatcttcacatatataacaaggatcattttctgtaatatgcccacaaacactacaataggtaagttctcttttaacatcaactagtgctttagcaaacttaacaacatcgtcttctttcatatctaaagtatgaaaagccagacgttgagccgtctttggtccaatgcctggcagtttcataaaactatcgataagctttgatataggttctggataatgcatatttcatcacattccagggatgtttaagccttgagtatgcttacctaaacgttgttgtgttaactcatctgctttattcatcgcttcatttgtagccgccaatactaaatcttgaagcatctcaatatcttctggatcaacagcttcttctttaatttctacatccacaacttctttatgacctgttacagtaacagtcaccatacctccgcctgctgttccagcaacgcgttcttcttttaatttctcttgttcttgagccattttcttttgcattttctgcatttgtttcatcatttgttgcatatttccgccaccgcgcataatttcatttcctccttaatagtaaacaatttctataaaaatttagcttttattacattatacataccaagatatcgcttgtcatgtatcagtcttcatcaactaagtgtacagtttcctcaccaaataagtctttagctttttgagcaatatctatttgttgagactgttgtgtgctttgtttttcgctttgatgtgtttcattggtgttacgattttgtaagtactctgctctcactctcagccattggtcagccggcactccaactactttgacagttttattaactatattacaaactacactttcaatattgtttctcttttcatcatctttatttactatttcacaatgaatttcttcatcaaatttaactaacacatgatcttcactagctgctactggttctgaattcagtagcaaacttactaaagactttttatcattactttttgcatgatcaatcacttcttgccaatggttcttcaacaatttgatatcatctttgtttgctttgtctaatactttcgctatttgttgcatagaaaacgtatttttagatcgttgaatcgtacgtgttggtttcttaggttgttgactaactttattagttttgatcccttgttcttttaaggttttaagctcattttcaagttgttctaaacgttgtaataacatctcattatctggttcattagctaccgatgctgttgctacattttgtacagtttgaggctgtgtcttaatcatttctgcaagtttaactagcaacacttcaaaatgaacactttgatttacactgaacctaatggatactagtgtatcattgatgatatctatcatcctgtataacatatctaagtcgaaatgaataagtgattcaaaatgaacggcaaatgcttaagtgtttaaaaaatgtacatgttgctgcaaacgagtatcaaggtgaactgatatttttgcataaagtcaaagatggcgctgtggatgatagctatggtattcaagtggcaaaattagcggatttacctaatgaagtcattgatagagcgcaagttatattaaatgcatttgagcaaaaaccttcgtatcaactctctcatgagaatactgacgatcaacaaacggttccgtcgtataacgattttggtcgaacagaagaagagcaatcagttatagaaacacatacatcaaatcataattatatttttgatggtgagattgtgcttatagatagaataactggtcgtatgctacctggaacaaagcttcagtctggtttacatcaagctatagaggctctggaaaatgttgaaatttctcaagatatgagtgtgatggcaaccataacattccaaaacttatttaagcaatttgatgaattttcaggtatgactggaacaggtaaattaggggaaaaagaattctttgatttatattcaaaagttgttatagagattccgactcacagtccgattgaacgagatgatagacctgatagagtatttgctaatggtgacaaaaagaacgatgcaattttaaagacagtgattggtatacatgaaactcaacaacctgtgttactaattacacgtactgcagaagcggcagaatatttttcagctgagttatttaaacgtgatatacccaacaatttattaatcgctcaaaatgtagctaaagaggcacaaatgattgctgaggcgggacaattatctgcagttactgttgctacaagtatggcagggcgtggaactgatataaagttatcaaaagaggttcatgatatcggtggcttagcagtgattattaatgaacatatggataatagccgtgttgatcgtcaattaagaggacgctcaggtcgcc

SEQ ID NO: 4261 - DNA, 4161 bp, Artificial Sequence
  Description of Artificial Sequence: synthetic nucleic acid sequence
tcatagccaatggtgtcgcccctactgcaattaaatttcgataggcttcagcaacaaccatttttccaccttcataaggttggttgaaaacataacgtgcttcaccatctatagttgaagcaatagctttttgtgttccttctacgcgcacaactgaagcttgtaaacctggcttaataattgtatttgctcctacttgttgatcgtattgttcatataaatgatgtttagatgctattgttgggtgttgtaataacttgataaatgtatcatgtacatctatattgctgtaatcgttttttgatgtattatattccttttcttctccttctaaaatatacactggtgcctcatcagcaagaggttgcacaggaatgtctgcatacacttcatcatcgtatgtaagcacgaatctatcagtgtctgttacttcaccgattactgcactatctagttcgtgtttattgaataaatctaaaaacttttgttctgtacctttttctacaactaacagcattctttcttgcgtttctgaaagcatcatttcatatggggaaattccaggttctcttgttggaacttgatcaagtcttaaatgtaaaccactaccacctttagctgccatttcagatgaagatgaagttaaaccagctgctcccatatcttgtatacctactagttcatcaaaagtaattgcttctaatgttgcttccattagctttttgcctacaaatggatctccaatttgtactgaaggtcttttactttcactttcctcagtaagttcttcagatgcaaatgttgcaccatgaataccgtcacgcccagtttttaaacctacatatataacggaattaccaacacccttagctgttcctttttggaccatatcatgatcaatgattcctacacacatagcattgactaatggattgccatcatagcgttcatcaaattcaatctcaccagccgtagtaggaataccaatacagttgccatatccaccaataccacttacaacacctttaagtaatcgttgattttgttttacagttaactcaccaaaacgaagactatttagtaaattaattggacgggcaccaattgaaacaatatctctaataatacctccgactccagttgccgcaccttgatatggttcaattgcagatggatgattgtgagactcaactttaaatactacggcttgattatcgcctatatctacaacacctgcaccttctcctggtcccattaatacgtgctctcctgtcgtaggaaattgttttaaaaatggtttagaatgtttatatgagcaatgttcgctccacatcactgagaaaattcctacttctgtgaagttgggttctctaccaagaatttcaaccactttgtcatattctttatcacttaatcccatatcttgataaagtttttcaagtttaatctcttcattacttggttcgataaatttagacattttgttccctccaacttttcaccattgattcaaacaatttcacaccactatttgttcctaataatgtttcaagtgcgcgttcagggtgtggcatcatcccacaaacgtttccctctttattaactattcctgcaatatcctcataagagccattagggttattcgtatatttaaggataatttgattgttatcgttgagttcacgatatatttcatcagtacaataataatgaccttcaccgtgtgctacaggataaacaacattctcatttttcacatataaatgcgtaaaaggtgtttgattattagtaatttttaaagtttcgtttctacttataaataaatgtgaatcattatgaagtaatgcgcctggtaacaatccatctcagttaaaatttgaaacccattacatactcctaaaacaggcttaccttctttcgcaaatcgcttaacttctttaataatcggagcaacacttgccatagctcccgatctcaaataatcgccaaatgaaaaaccaccaggtattaaaacaccatcaaaaccatctaaagtcgtttcacgataatcgacatacgctgcatcaacacctgatttaatagctgcgttatacatgtctctatcgcagtttgaaccagggaacacaagaactgcaaatttcatattatgctttctccttttcatcgataactttatagctatattcttcaatgactgtattagcaaataacttttcacttagtgtcgtaataatattatcaacagcctcgtcagttggttcattaactgtcatatataaaactttacctactcgaatgtcattcacttgttcataaccgagatcgtgaactgctcggtttaaagcttgtccttgtgtatctaaaacttgtggttgtaaagtgatatgtagttcaatcgttttcattatttaagatcctccaatttatttaaaaatgtttgataagtttcaatcaacgagccagtgttgtttctatatacatctttatcaaagttagtatccgtatttttatcccatattctacaagtgtcaggagagatttcatctgcaagtaaaatttttccaccattggttttaccaaattcaaccttaaaatctacaagtctcaaactcatttcattcatcaattgaatcagtacttgattaatatcttttgccatttgtttaagttgttttatttcttcatcgttcgctatgccgagtaattttacatggtcatcagtaataagcggatcattaagttcatcttttttgtagaagaattctactagaggttcttcaaatgtatgcccctttttaaaaccaagacgttttgtgatcgaaccagtggcaatgtttctaacaacaacttctaaaggtataatatcaacttgttggacgagttgttctgtttgtgaaagttgtttaataaagtgattgtcaatatgattatgagttaaataatcaaatataatagaagtaatttgattatttaacttacccttgccaatcatagtatctttttttgcaccgtttcctgctgttacctcatctttatattcaactcgtaattgtccatcaatatttgtcgtgaatactcttttagctttaccttcatataacaatgacacttacttgtctctcccttcaaatttcattaacatatattgttctgtttgattgacatcatccgtcagtaaagtcatgtgtcccatttttctatcaggttttctttctttcttaccgtaaatgtgaatatgccaatctggatgtctgctaaattcattttcaagtaaatccaaatcgcgacctaataaattcatcattactgttggctttaataattcaatagcttgcggaagtttttgaccagttatggctaaattaaaggcataacgaatgttaaatctgatttatcacagacgtatgaccaatatgaaataaaagttgaccaaaataaagctgcagataatggtatttctgctgcacaacttgcgatgaatcttaatgaaaacttacctgagaaaacaatttctacagttaatgaaaagggtaaatctatagatgtaaaggtcaaacaaaataagcaaacagattggtcttctcaaaaaattaaaaacattaaactaaataagcctacgggcggtacgattaaacttagtgaaatagcatctcttaaaaaatcatatacaccaagtaaactgactcaagaagatggcgattatgctacgactgttacaggtaaagtgactgataaagatgtgggtggtaaatctcaacaagttatggctaaagtgaaagaccttgagaaacctagtcatattaaaattaatgtcggcggtgcaactgatgacattgataaggctatttctcagcttgctatggcgatgatagcagcaattatcattgtttatttaattttagttattacatttagaggtggtctggcaccatttacaatcttgttctcattaccatttacggttatcggtgtagtacttgcactcatcattaccggagaaactatttcagttccaagtttaataggtatgcttatgttaattggtatcgttgttacgaatgctatagtattaatcgatcgtgttattaacaatgaaaaacaaggtatgccgatgaaacaggcattgatagaagcgggtggtacacggataagacctatatt

SEQ ID NO: 4262 - DNA, 4176 bp, Artificial Sequence
  Description of Artificial Sequence: synthetic nucleic acid sequence
gtagcatggctatgcataccattacgcagaatgacgagaaagactatgatattgatgtaggtatagtatttgaagcagattgtcttaatagtttgggtgcacaagctactcgtaatatggtagcaaacgctcttgaaagaaaaactaggcaatttgcacaaccacctgaagtaaagactagttgtgtacgtttaaagtatagttctcttggttatcatatggactttgctgtattccaacgtagtaaagaatatgagtgggacgataattatatatatgagcatgcagggacagaatggacagaaaggcacattaaggcattagaagagtggttcattaatcgagtaaagtattctggtgatgatttacgtaaaatagtgagattgtccaagatgttctgtaaatcaagggatagttggaaaaatatgccgagtggacttgttcaaacgatattatgtgactcaaagctaaaaaactattattcacgcttagatgagaaattttattacactatgcaagctattgtgcagcgtctggatattcacctcgatgttaacgctcctgtcgataatgggagagagctaataattagagatgttgattataagcgaatggaaaattggaaaaatcgattgagagcgagtctaaataagttggacatactttttgataaggaatgctcgcgagaagatgctctgcaagcttgggcattgtttttcaatcattcttattgggaggaattagccgaacaaaatcaaagaagcaatattagtgagagtcgtttcctaagtttcaatgatactgagcaatttatagaagaattatatccgatttatgaaaactataatgtttccatagactgtgatgtttcaggtaatggtttttctgttatgccgattgagaagttttttgataaactctccccacaacttaaaaagtttattccatataatttttctattaggtgtaggctcggggatactgattgtccgacctatgataaaattctttggaaggttagaaatatcggtattgaagctgaaaagcgaaattgtataagaggacagatagtagacaataggggtactgaaattatagagaattcaaattttgcaggattacattatatcgaatgttatttaattaaaaatgacatatgcgtaggtataggtcatgtagatataccaataggaggtatttaaaatgcaagaatataactattggaaaaaaattataaaaatgttaggtacatgtgttgtatttttgatacttatattgtttagcaattttttaagtaaggttaatatactatttggttcagaagttgttcttttatttgccggtgctattatacctgggatttggggaagtatgattgaattagctgataatagtaactggaagacatctcagagaaggttaaaaagagcgggtgtattacaagatgacactttaataagaatttcgtttgcatatctttatagaattaaaatagatgatagatattttttagtattgaataataggtcagggaaatatcaacctgtaggaggtgcatacaagttttatgaagaagagggagaatatctgtcaagatatatcccagctgaaagtgataatcgaatcccagtagatgaagtaactaaaagggactataggctactagttaagaacaaagatttaagaagatttgtaaaacgattcaataaaacatcatgtagagaaaatgtaaataatcttagtcgtgaatttgaagaagaaatatttgcaactggaatcttgaataaagatatttttggtgatttatcatacagatacattggtagacatataacgaaggtagaatacggacgagtgtttaatcattttgaactcctcttggcagatattcttgaagtaaaactgacagaaaaacaagaagaattattcagggaacttatgcatttaagttctgacaaatattgttttgcatcagctgatacaattaaaactcatggagttaaatacgggactcaaaaactaaaagacgatattgctaatcatacaccaaaaatattgaccgaaaatacagacgatttgactaatagaaataaaatcaaggacattatcacagttcgattataaattattttgaaactcaggattaactgttacaatgaagtgtactataaatggtgcggttttgataaggtacttcatactagagatattactaaataataaaattgtgccctcctttttaatacatctttcgtattttgtttaaatgcttttggattagaagttaagacattaaagtttgctacactaaccaatttattattaatcatttgaatttgactatttgataatatttctgataaaccacgtttatcgagtactttatttaaagtgttttcgactttttgtgtgaattgtttattttgattttgtttaatatctgctaaagcatttagagcttcatctgaatccgtcattatcttaattttcttctgaatttatacctaaatcatttattttttgatttgaatttttaatatcttcagcgtttaagtcgtaattttttcttcataagttttataaatacctgttaatgcgatctcacttgttacttgattaataaaagttatatgtatttctgaatttttattatccactgctatcgcagtattttgatattgtgtgaattttataatgttatctggtgtatcaatttttatatttaatcgttgtaattctaataataaatcttaggttactactgttggcaatatattcaaaagcaatagatatgttaaaattaaagtaattataatttaggggtgttacagtgattaaagataacgaaagctttaataatacagtaagtgaaaatagtgtttttttggaagaattgagagagaaaatacctaattattttagaagtaatgtttatgacgaagaaggaaatttaatagaattgggtggttttgactttgaaaaatttaataataatattaaaaattcacagcagtcattgtttagttcaagttattctttaaattttgtaggtaaaaattatgcgaaaaagcaggctggggaaaagccaacatctattatagtgccaaacaaaaagattaattttgaaaacaaaaatgaaaatttaattttttcaggtgataatttagaagttttacgtcatttgcaaaacaattatcaaagtagaatagaatatatatatattgatccaccttataatacaggatctgatggttttacatatccagataaatttgaatatagtgatgaaaaattaatggaaatatttaatttatcaaacgaagaattgattagatttaaatcaatacaaggaaaatctaatcattctgcttggctagcatttatgtatcctaggttattattagctagaaagctacttacagaaactggaaaaataagtgtctcaattgacgaaaatgaatttgcaactttgaaagtattattagatgaaatttttggtgaatcttcatttgttggtgatattataagaaaaactaaatctactacaaatgattctttgacggggtttaaccaacaacatgaacacaccttgttatatgctaaaaatattaatcaggtaaaaataaaaggtgatgctaaagaatttggaatttataaaaatattgataatgatcctaatggcccgtgggcgccagataatccaagtgccagaagtggtagtaaaaatacactgtttgaaattaaaaatccctatacaggtactatcgatcttccgccaaaaggtagatattgggctttttctaaaacaacatttgagaactgggttgaatcagggaaagtaaaatttaagaaggaagttaagggttcagaaagaggatttattgtgaaaaaatatttgaaagatgtaaaaagcaaatataatccagtgaattcactctttggtgctgataataaatttatgaatcaagtggctactaagtatttagtgaacttatttgatggcgagtctttatttacaagtccaaaaccagtagaatttgttgaaaaattagttagatacttttcagatgaaaattcaataatattagatttctttgggggatcaggtacgacagctgaagcggtaattgaagctaacataaaggaaaaaacaaatagaaaatatattatcgttcc

SEQ ID NO: 4263 - DNA, 4092 bp, Artificial Sequence
  Description of Artificial Sequence: synthetic nucleic acid sequence
cgtgggaacgttaatctttaccgtattggccatttttgtatttgaagtttatatttcttctccacaaataacagatatgcttaatggttttgtgcctcataaagaaattattacaaaccaagggatactttatattgcactaggtatcataggtgctactattatgccacataacttatatttacattcttctattgtacaatctcgaaaatatgatagacacagtattcatgaaaaagcacaagcgattaagtatgctactatcgactctaatatacagctatccatcgcttttgtagtcaattgcttattacttacacttggtgcagcgctattttttggaactaaaactgaagatttgggtggtttttatgatctttatttggctctaaaaacagaacctgctttaggtgcaacgcttggcggtattatgagtactttatttgctgttgcccttttagcttctggtcaaaattcaactataacgggaacgttagcaggccaaattgtgatggaaggatttcttaaattatccattccaaattggttacgtcgtcttatcactcggtctttagcagtgatacctgttatcatttgtcttatagtatttaaaggaaatactgaaaaaattgaacaattacttgtcttttctcaagtgttcttgagtattgctttgccattttcgttaataccgcttcaattagctacaagtaatcaaaatcttatgggtccttttaagaataaaacatggattaacatcatttcttggttactcataattgtcttaagtggacttaacgtatatcttatcattcaaacattccaagaattatgattaaatgaataacaaagaaaatgtatcctctattttgaaatgacgaattaaaaagtcattttctatcactatttattcatatagttaacttcaagttgtatagtccctttcttactttataaaaaatacgccttatcaattatttttactgatagggcgtatttttatggactgcattcaacatttaatagtcaaacatcaatctaaacctattaatatatatatggatcgtcctttttttgtttgttgatttcttgttcaggatcccaagcatctttctgttgttggttttgttgatgattccaatcactttggctctttgaatggttttgacgaagttgagccgtagcattttcatttacatctgttttatctttttttgcaaaaagtctaatcgcagcaatcatccataaaaccattgcgattaaattagtcgtaaataaacctacgatagccgctgctatgagtaaactagcagcaaggttttttctaccttcaattaccattgtaccaacaaaacctaatagcgttgaaaaacctaaaatgactaatgacgcaataagagaaactaaaaacatttcagatgacatatcttgattattacctgaaaactgcttcattaattcattatattgttgttgatttgatgtgttattaataacaaatatcgatagaataccaaaaattaaaaataataggctcaagatatttgcaatccacgctaatcttttttctacttttctattcaattaatatgtgcctcctaactcttaaaactatggttaatttaatcatactaaaaatttatctttatcgcgaataagtgtatttcatatattgattaagaagtaataagttgctatgatgtcaagttgatttatccaaaatccaactcactttctttgaaatagcgatatagtaataccctgtttattatgtattacatttaatctaaaattaaaaatcttgatatcatcctatataaaatctagttacagataatgaattttttaaaaatgcctaggacagcaataaatatcctaggcataattattaattttctttttttgaatcttcctgttgatttaagttattatctgtatcttcttgttcattattaatcatttgtcgacgttcttcataattcatacgtcgttggttaacagcacttggctggttttttcttcgttctttcatacgtttattatatgcttttctcttttcttttttcttagcacgtatttctgctttttctctttttctttgcgcttttagttctttaggatcaatttgtggttcaacaactcctatgtcatcaaattgattaccttccatatgttcctgttgcgcatcttcaaaatccgtatttttagattttttattgtacttagcttgtcttgacatgactgttggttcatcttcagtttgttgagatgcatattcactttcaactgctctttttggaaattgagaatatttatcttcattatctacatattcgtctgaataaagttgatcggaagatgtatcttcatcgggttgattatcagttataccattataggaatcttgttgctgagcatttctattgaattgacgtcttgtatttctatcttcctttttagtatgcataggttcatacacatcatcattatatccatgttcatttcttgactctggttcataaaaacctctctcatcatagtatggttgatcatattcattataataagatggcactgtttctattctatctcttctagcaaacatcatcattgcaatgataaagaataagataggaatgattagagttacaatcaacaatacaagcggaattgtgactatagcagctattaaaaaaagtaaaccagacaaaattcttatattcatagaaattaacgctaaaaacgagatgagcaaacaaacaataaaataaacaataattgcccaaactccattttgtaaccaaatcacaaattgagttgtacttaaatcattattggctaaaatttgttgtacgagttcattattattaagtgtgttttctaaattggcaattgacgtatcattactaaaagatacgagcgcaataaacattgaaacaatagttaatatgagtaagaatacccaactaaaccaacctaatattttttcagttagccgatttgctggacgcttaatttgtgtatattgctctcctaacattcgttacaactccttaacttacttatcacattattatattaaaaaattctaaaaataactaccatttgctattttaaagacattttaaaatttaaaaagctttcattatattcactgagagacgtttgacctaaatctttatagacttctaaccgttgctgttcttgatttgatggataaaatctataatcatttcttacctttttaggcaacttacttcgagctgctttattaggtgttgcatatcctacccattccgtattctgggcactattttgcgcgtctagtaagaaattcataaacttatacgcaccttctttattttgtgcagttttaggtatcaccatattatcaaaccataggttagagccttctttaggtatcacgtaattataacgagtattttcctgtacaagtggtgcagcaacgccactccaaactactgcaacatgtccttcgttttgttgaagcatcatagtaatttcgtcgcctactatccctctaacttgaggtgctaaattatgcaaatctttttctgcttgatgaatatgggtcggatttttgtcattaagactataccctaatttatttaatcccattccaattatctcgcgtgcaccgtctactaataaaatatcatttttgaattgagaatgatacaaatcgtcccaactatcgaacgtttcattaggatatttctctttatcatataaaattcctacggtaccaaagaaatatggaattgaatatcgattgtttgggtcatatgacaagttcatataatcattgtctaaatttctgatatttggaattttgtcatgatttaaagtctcaagcagtttagctttttttaatttttgaacagtatattcacttggaaaagctacatcatagtgtgtgcctccatttcgaattttcgcttccattgcttcatttgaatcaaaggtttcatatacgacttgtatacctgtttcttttttaaacttcttaattaagctaggatcaatatattctccccaattgtaaacatataacttctcatttgagtgggt

SEQ ID NO: 4264 - DNA, 3003 bp, Artificial Sequence
  Description of Artificial Sequence: synthetic nucleic acid sequence
tggatgataaatatccgttttatcttgacccaatgcctaatctatatttcacacgtgatcctcaagcttcaattggtagaggtatgacagtaaatcgtatgttttggagagcgagacgcagagaatcgattttcatttcatatattttaaaacatcatcctagatttaaagatgagaatattcctttatgggtggatcgtgactgtccgttcaacatcgaaggtggagacgaactggtgttatctaaagatgtacttgcaatagggatatctgaacgtacttctgcacaagcaattgaacgtttagcacgacgtatttttaaagatccgttatctacttttaaaaaggtggtggcgattgagattccaactagtcgaacatttatgcacttagatactgtttgtacaatgattgattacgacaaattcactacacattcagcaattcttaaatcagaaggaaacatgaatatctttattatcgaatatgatgataaagctgaagatatcaaaatccaacattctagtcatcttaaacaaacattagaagaagtgctcgatgttgatgaaatcacattaataccaactggaaatggtgatatcatcgacggtgctcgtgaacaatggaatgatggttcgaatactttatgcatacgtcccggtgtggttgtaacttatgatcgtaattatgtttctaatcaattgttacgtgagcatggtatcaaagttattgaaattcctggaagtgaacttgtacgtggtcgaggaggccctcgatgtatgagtcaacctttaataagagaagatctatagatataagatagggtgttgaatagatatagcttgaacatcacgaaatacattcacttatgctattaaatttgatagcgacttataaaatgaaaggggcgcatcccatgaaaaacatcaagaaaccctttgatttaaaaggtaagtcattgctaaaagagtatgatcttacaggtgaagaatttgaaggtctaatcgattttgctatgacattaaaaaaatataaacaacaaggcacaccacatcgatatttagagggtaagaatattgctttactcttcgaaaagacatctactcggacgcgtgccgcatttacagttgcatctattgatctaggtgcacaccctgaatttttagggaaaaatgatattcaattaggaaaaaaagaatctgttgaggatactgctaaagttttaggcagaatgtttgatggaattgaatttagaggtttttcccaaaaaactgttgaacaattggccgaattctctggagtaccagtatggaatgggttaactgatgattggcatcctacacaaatgttagctgattatatgacaattaaagaaaattttggatatttaaaaggcatcaacctaacttatgtaggaaacggacgtaataatgttgcacattcgcttatggtggcggtgctttcaatattcaatctgatatgggaggccacgctggaggattagcaattataattggatggttgattactgctataggaatgatttcattagcacttgtctttcaaaacctaactaatgaacgatctgatttagatggtggtatttatagttatgctcaagcaggttttggtgattttatagggtttgcaagtgcttggggatattggttctcagcttttttaggtaatgtcgcatatgcaacgttattaatgtcttctatagggaacttctttccaatatttaaagggggcaacacatttcctagtatcatagtggcatcaatattattgtggagtgtgcactttttaatattaaaaggagttgagacggctgctttaatcaatagtattgtcactattacaaaattaattcctatcttattagtgattatatgtatgattgtagcctttaattttaatacattcaagataggtttctttggaatggatggatatggatcattatcatttcatttcgctaatacgatgtcacaagttaaaagtacgatgttagtgacagtttgggtatttattggtattgaaggtgctgttgtattctccggaagagctaaaaataaaaaagatgttggaactgccactgttatcggacttatttcagtattgctcatttacttcttgctgactgtattagcacaaggtattgtaattcaaaatcatatttctaaacttgaggcaccatcaatggcacaaattttagcttatattgttggtgattggggagcaacatttgtcaatattggtcttattatttcagtattaggtgcatggctaggttggacattacttgccggagagttgccttttattgtagctaaagatggtttgtttcctaagtggtttgcaaaagaaaataaaaatggggcacctatgaacgccttattcattactaatgtgttagttcaaatattccttattagtatgctgtttaccaaaagtgcttatcattttgcattttctctcgcggcaagtgctatactttatccatacatgttcagtgcgttttatcaggtgaaatatacaatagaacacaagttaactgcaacgcctaaacaatggattataggaattctagcatctatttatgcaatttggctggtatacgcgtcaggtatagattacttgttacttaccatgttgctctatattccggggattatcgtctatgttgttgttcagaaaaataatcaaaagcgacttacacaatttgactatattttcttcagtcttatcgttattttagcattgatagggttattacgatgatgtaattcatatttctaaatgttatagatattgattaatcatgagttaaaagggagtttaatcgataaaaatcaaacaaagaaaatatttgatatttaaactattggtataataagaacagtggtccatgggtatatacagaattgtaataaattttaaatcggagatattttagcatcctctttgaccatagtctaaggcagtaaggagttattttta

SEQ ID NO: 4265 - DNA, 3775 bp, Artificial Sequence
  Description of Artificial Sequence: synthetic nucleic acid sequence
tagcagaaatgacgataccaacatgaccataacccccgccataatttctgttgaatatcacaacatctccgggcttagctaagaatgataatgtattttcataaacagtagcttctcctgtaaaattgttccatgtcggaatgtctgcagcacccacaccttttaaagtatgaccgaataaataaagccaatattggttagctacgtcgaaacattggaaaccataagcaccgtcagggtttaacgctttgccctctaaactttttaaatatgcaattgattgtttatatgttctaacagatgtcattagaaatcatctccgttcatttgaggtgctccgcctgttgagtctgttccagctttaacttcatgcaatttttgttgtcctttttgtgccgcgtgagagaaattattatttttccaccatgtccacagggaaactgcgccagtaataatagaactaatagtcacttcatctactggaataggcgaaatgtttttagtagctaaaaattggttaacccaagctaaaataaatacgattgttcttacaattgaacctacatctgttttcatactcatatctccttttttaaataaaataaaaagacctaatcactatcgattagatctgaaatcaaaattcactaattatttatctatatttatctcgaatgtagtacataccttttaatcctactttaattaatcatattttttaaaaagtcgaacaatggatggataagccaagccacaccacctcctccaacaaatatacctgtagcttttaaaataaactctttattttctttacctttctcttttgcttcttgttcttcttgacttaaatgttccctaaacattcgagcatctttttcgacgagagacaatcgttgaccttgttctatgatttgtcggtttgtctttttctgttcagcactcatctctttagttgcatctaccatttgattaagtgtaggtttaaattctgctaatagccacacttaaattgttataattattcgtatgtttttcatcgacttctcttattcttttatgaatctcatccttatcgtcatagtaactttgaggtaactcattgtttggcataatgcaacactccaaagtaagcataaccaccacacgttaaagtagttaaaaagtaaataagaggtgacatccaatttaaagaatcactaataccagctaacgtaatgacaaagaaaaacacagaacaaataatccctcctaaaataagagtgatactataaactttgttaatattcctataaggtaaagccatagctgcaattgctaaacataaacctcctataaagaatggaataccccaaatacttaagggtattatttcattaatactgctatacaatggacttttatcgacttgagtttcagaagcaaatataaaaaaagaacctcgagccatacctattgttccaataaataataaagaaataacattaatatattccatttcagtcatacggtgtattttcttcatgtttctacccactttctatcattaagtgcagcacaaatagcattagcataataatacatatcttctgtccaattatgtgtattttctctattctttttactaaaatcgtttcgactaaaaaattcttttctttgttgagtcgatatttcaatctgtacacccatgccataggggatggtataaattttgaaaagccttctgaagatttaagaaatgcacttccaataacttcagtacttatggctattattaaataaatataaggcatttttaactccttttaattttcgtattttatttaattttattctaaaggatggtataaattttgaaaagccttctgaagatttaagaaatgcacttccaataacttcagtacttatggctattattaaataaatataaggcatttttaactccttttaattttcgtattttatttaattttattctaagtattttttaattgtagtcttgtattttgagtgtcattcgcgtggtatttttgtggattgatggtttttgaaaggtttttgaaacgagttgaaaacgagtttcttcttgtcttgatactatatagaaataactcgattttaaaattatagctgtaatccttggtatgtaagggattatagctatttttcttgttgaaaggaatttttgacataaaaaaaccggttctgttgcaaagttgaatttatagtataattttaacaaaaaggagtcttctgtatgaactatttcagatataaacaatttaacaaggatgttatcactgtagccgttggctactatctaagatatgcattgagttatcgtgatatatctgaaatattaaggggacgtggtgtaaacgttcatcattcaacggtctaccgttgggttcaagaatatgccccaattttatatcaaatttggaagaaaaagcataaaaaagcttattacaaatggcgtattgatgagacgtacatcaaaataaaaggaaaatggagctatttatatcgtgccattgatgcagagggacatacattagatatttggttgcgtaagcaacgagataatcattcagcatatgcgtttattaaacgtctcattaaacaatttggtaaacctcaaaaggtaattacagatcaggcaccttcaacgaaggtagcaatggctaaagtaattaaagcttttaaacttaaacctgactgccattgtacatcgaaatatctgaataacctcattgagcaagatcaccgtcatattaaagtaagaaagacaaggtatcaaagtatcaatacagcaaagaatactttaaaaggtattgaatgtatttacgctctatataaaaagaaccgcaggtctcttcagatctacggattttcgccatgccacgaaattagcatcatgctagcaagttaagcgaacactgacatgataaattagtggttagctatattttttactttgcaacagaaccgttttttgtatatagtcttataggaattgctatattttttgtgccggtaacgattaataataactcttcaattttattagatcattttgtcacatggataagtagcgcattacctcttttaactaagatattcataatgattatcattatactaggtgctatttatccatttattaaagggacatggaatcggaataccgttgaaacaatttttagtttatttaaagttttgggagtcattataggcgttttgttaatttttaacattgggccaagttggttacttaatgaacaaacgggaatgtatgtttttaactatttggtaattccggtaggattaacagtacctgcaggaggcgcggtattagctttattagtaggatatggcttattagaatttgtaggtgtttatgcgcaaaaaattatgtacccgatatggaaaacgcctggacgttcagcagttaatgctttagcatcttttgttgctagttttgctgtgggtttacttataacgaataaagagttaatccctaaatttttcaaagcaatacctgcaccattaatagctatcatcgtattgactgctctttatatgtatacaggttctgacgtgagaactgttggtgatttaggaaatattaagcaagctttaccgcactttttaattcctaatgttccctttaatttagaaacacttcaaatcatttttccatactcgctatctatggctattgtaggtctagtagaaagtttacttactgctaaaattgtagatgatgcaacagaca

SEQ ID NO: 4266 - DNA, 3094 bp, Artificial Sequence
  Description of Artificial Sequence: synthetic nucleic acid sequence
tggttaaataatgcatttcttgaatacgtagatgctggtggttgtccaacaatccatacgattaatggaaacaatacaggtgcgaaaaatacacttagataacttaaagcccctaatacatcacccgttttatcatgataacttttatcaaaattttccatacaattaatcacctcaatttaaatataaacacattctgagaattcatttaagtgatatggaatacaattacaatattgtaagtttcgatacaaaaatactaatgattaaccacttaatgcttgtactaatgcgtatttaaatgttgataccggcacagcattagcatgacgttgttgtagtgctaaacgtgtttcaaattgaccacgatgatttcctatctctttcaaagcgttactcaactgacttatatcatttacaagaaactgattttctattgcaacgaaatcttgattatgaacaacctctttatatcccataattaacaattgatgattatatgcgcttcttacagcattccctatttcgttcccctcattaatatctaaatagatgtcacattgttgatataaggtttgaactgtttgttctttaattattggatataatttaacattttcatattgcgataaacttaataattttgaagacatctcagttttagcgcctatgtgaaattgataatctttatgcaaacgtaccaacgtttcaacatgtggtatttgatctgaatttgttaatgttaatacattcttagaataatgattccgtttatacgtgtcatataagtaaccagatgcatatactgcctgttgttcctccctagatagttgttccttgatcaatttgtattcattctgattagggacaataacggcaaagcgactttgaaggtttggtgataacatgactttcatatttcctgggacataaccctgagattgttcttgccaaaataaaataccttttttcaatgtcggcaaatgataaattgctaaaaatggtgttgataaagtattaaatataacttcttttatctcaatgcccatttcactcaagtaaaatttaatccactctgtatatgactcaaaaaaataagatttcccttcatattctacaactacatcgttagttacataattctcataaatcacttctttaccttcacgtgtcatatacttttttaatattgcattacctaacaaatcgtaaactgtttcagcaaatttaaatccttcttttgtataataatcaaccgaacgcaaacgctgttttgaatcaagccactctacatggctaactacacgtgtcttataatgttccttataaaagattttacctctaagctcacccatatctgtaatggtagccattgtcgcatctcctttaatttcccaaaaaggcggcgtatcaatatcattaaaaaaagcaggggtatcatcttcataaatttgatatgctgtgaaaaaacgatacggcgatgtcacatcatcaggtaaaaatccatcatcattaattacaatcgtaaagtgattgtaaccagcacgcttaagagattgatgtaattcctgtgtttcttgattataattttcgaataaattaatcatatagcacctcttcaatgagttgtctccatagatcaacaatatgcgatgttttaaatgattctgcaatgtcatacgatacctcatgtgcccttatgggaccatcttcaaaatatcgaataatcatatgagcgatttgcgttgtgatatcatcagtagacgcttgttcaaaatctatcggtatcaaatagccattttgatgatgtcgaataaatgtcggactgccataattcacatcaaatccaatcatacctaaaccagagccaaccgcttccattaatgtcagtccgaacccttcactttgtgaggccgctatgaataattcatattgctgatatattgtacgaagatttctatgtcctttaatttgtatgtaatcctcagcacgatgtttggtaataatatttttaattttttcttgttcttctccttgtccgtagatatcaaaactcaattgaggtaactgatgtttagctttaatcacagcttccactatccaatcaacatgtttttcgttagcaagacgtgatgcggtcatgatggaatatggttttctttctttttcaggatattgtaacgattctatactacctactggaattgtacgtatacgtggacaatcattcttatattgtttaaattgttcacttagtgtctgcctttgcaaatctgtcgctgtgataaagaaatcaatatgctgtgcattttcgaattgatactcataataattattccataaaatgtgagtcccatcagtcgcaccttcactgaaatgttcagcgtgaacgactacgccaactttactggatcccttgttttctaatatggcttgtcccacatcagttgctcgatcaataataatgatatcctctgaattcaatagcaattgacgtataaagtatgcgacgagtgcttgtttactgtataaacgtgcatcatcaaacacaaaaacatgttcatcttcatctatatattcgcgatatgcaattgatccattttcattataaaattgacgcatatatattttagctttattgttaaaaggagcataatactccgagaatgttcttacatagctataaaaatctttcctaattaacattccattcaccacaaactctgcacgatcaacgtaatgttcgttagcattttttaaatagcaggttacgaatgtttgctgattatttaaatagagtcgtaatactttaccgttttgttcttttcgagtaacctcattacctaactctgaaattaaatcatcaactgtgtacgttgtaggagcgatttttacgtctgtgaagtattgatatagccaaataacttcatcatctttaaaccctatgttgcttgtgagtgtttgaatattttctgattgaataaaatctaaaaatataaattttgttggataaggtaattgccttaatagttttgctcgatacacttgtgcatattcaacaccactactggcccaaccgattccaaaattgata

SEQ ID NO: 4267 - DNA, 3242 bp, Artificial Sequence
  Description of Artificial Sequence: synthetic nucleic acid sequence
taatcatgcttattaaaattggaattatcccttttgctatattcatatatttaaaattcatatcaacacctatttctttaatatggttcacttaagttattatgtcttcttttgaatatgtaatatgtcttctcacttcaaacatattcattctttctcattttacactatatcagtgttttatcattaattttacttaaagaacatttacttgaatactttaaatgtctacaaaatatcatactcattacatatacaataatgtataatgtgatttaacataaaatataattttaatgaggaggcgacacattgtttactaaaaaaatattgatttatattgcgctccttattaccttaattcgtttttttattccattacatccagactttgatacgttgttagtatggttgtttattctttacataattccaattattttatgtatcattggctttaaatcagataaactcatcgctactatgattatgattccaaatttaatgggtataggttatcgtctattcatcttctttaatgactttttgcatttaaaataaaacagcactatctattaaagatagtaccgttaaataatttattactcatgtaatgctttatcaaaacgatcttccaacttaaaaatcattacgcgttcaccggtaatagtacttaaatcactatgaaaacttttcacattaagtccagtcaaatctttaataatgcgactcaagtcctcttcaccagactctacaagttcagaacgtgtacgtttaatatttaaaagcccttcattcgttttacacacgcgatattcagcaggtgtcaaaataccttgtaaactaacaataaccatatcacgaagaatatctgtttttacagacaaagaacctcttcctaaaaaatctttctcccattgtgtaatggctttactaatttcagattcataaatacctttcgtctttttcataactggacgactcctatttcttgattacttatagtttaacattaaactgaaataatcaaaaaacttaatttcttctaatgaatctttaattgttaatctcaccgagtatttcctaccagtctttccaactattattttcatcaatactggcaagtcttatccattgatgatcaaccttttgtctaaagtgattatgatgttttaacaaacgttgaatatatgcatctggcgcttgaataacaattaaaagcctaataggtgcgtgatacgcctctttgtcattcatcattactgactgccatggtaagccatacattaaatcactagcatttccttgcatgacacctacaccacttgttacagtttgcgttgttttactaccgcttccataatagtgaggtgccacggttgaggcgtagtattgtaaattaatccattgtgctactagtgctggcccagaaataattgtatttaaaatctcaccgtcttcatcctttgtccaatcataattatgaagaaatgcccgtccctctagattactattttgggtgatttgacgtttcccaataatgaattcagcatttcgtgctagaccccattctggacgaacttcactccaatcgctagcgtgacgatgcgcttcagcattaggattatggtcagtgttatttatatttggcaacgatgccaaacgttctaaattggctttataacatacttttggcatcacatgcttaagttcgtcaaaggcattttgagcttctgtagttaaaggtggaacataaatatactctaactcatcaactgacgtttgatgttcagcagctataaacactgtatgtcttggaatgtcgattccttccatcaataatccacgtctaacattttcttgattacacattactgctaataatttcgcattgaacccactcgaggcaccgccgcaagccccacactctaatgaagcatgatagggattattatgtgattcactaccgtgtccgcatagaacaataagtggtgcaaaatcatctgttaagtccattaattgtaatgcttttttggaaaattgaatctgttcttctaaagtaaagccgattggtagttttgaatacgcatcttgctcacgctgaatagttaatttacctgttggtttacgtagccatttttgtgagaatcgatgaacaatacgttttgcttttttagggaaaattgtgttagctatagtcgcaatacttaaaaaaggaccacttaattctggtaaaagcaaacttggcaacacgttgtttttcattaatttaaagttgtaaaacatagatgtaagtgtatgttgttgttgattataaattttcatttcatgttgatcagcatattctttaatacgatatgcaggttctaccatcactggtaaagatggatgtgcaaattgttcatcaagtacttctttttgaattggcagaccaaagaacccagcaatccctattgtttcaaaaggcccttcactttctaaatgtcttctaaacggttcggatcgtacatcaatacaaaacgcaagttgtacttttgcttttgcttgatcagtatcttcggttggaacacgataaatttcatcaaccaatcgacgttcatgcgtttcttcccatgcatctaaccataactttttaaaataaaacgggctgaatcgtgtccccaattcaatgtatgcttgttgctttttagatgatagatttaaccactgctcaacattcatttgtatgttaaatagcaaataacgtatttgctctaactttttttgaagatatatagatttttttaataatgttgtatggtggtcatttaaaagtaccatctcaattgatagacgaatcgcaacatagtctgttaataagtacgcatcattactttgtgtctgtgaccgatgatacatgattcctgcccaacctggtaaagataataaatgactctcaatatatgattgtcgatgttcttcttttactcctaattcttgaaaggcgtactctattgcttcggttgcttgatttggcaaatgtgctaaagtaagtcgttgtttttttgtgaataatggatcatgtttaactaaacgttgccaggcatgatagaatcctttttctctttttggcatagtccaacttgattgaaagtcatcaacatataatttagaccacttaatcatatgagcatttaaaatatcaataagtcgtgtaccttcctttgtgaaaacactagcactttgcgctatcacatcttctt

SEQ ID NO: 4268 - DNA, 3111 bp, Artificial Sequence
  Description of Artificial Sequence: synthetic nucleic acid sequence
tggttgcaaaatgctgtcgaattaaatgaacgtggcgaggttatgattaatcgcgataacgcaacaaacgttcctggtatctttgcagctggtgacgttaccgatcaaaaaaataagcaaattattatttctatgggtgctggtgctaatgccgcacttaatgcattcgattatataattagaaattaatttttaaaacgttatttatcataaatattttaacttcacagagttcccatgttggagctctgttttttattataaaaaagcctattgaaacaggtatatcattcatataatccgccataatttagtcatatcttagtcatatctaacagtaaatgtagttctaaaatattcaaatatttttcgataaatgatactctaatagatgtataaatttaaaacactgtttaatgatagagacgtaaaaggagttactcaattctatgaaaaagagagtcattacatacttgatactagcgttgtctttaacacttgcagcatgctcaaatacgaacgataacaataatcaagagcatcacagcaacgctcatgcacctaaaaacgctaaaactttaaaggaaaaagatatcttttcttcaaacaaaaagggacaaaaaattagcgaaaaagagatgaagcaagctttagaaaaatatttacaagcgaatagcgatgtacttgataataagtatgtcatgcaacataaattagataaacaaagtgatagtaatcctaaaatcacagaatcacaagctgatcgtcttagcaagttatccaatttagcagttaagaacgatttacatttcaaaaaatttataaaaaacaatcacatccctgaagaatataaagatccaacagatcgcataattaattattttcacgctttaaatagtaccatttcaaatgtagatgaagacattgagaaattaaactaccaaccacaaaattcaattaacgttgttgatgtagccacaaaatattcaggtgatgtaaataaaaaacaacaagataaaattactactttccttaagaaaaaaggaatagacacagaagtatttaataaataaaacaaaatgttttttctatatcacattattttacttgcccaaaaaagatgttgtactaacatcttttttgggcttgtttttgatattcgagttaatttcatcaccccatctttttgaaacatgccttcgctattttgacaattcaatatatttattacacaataaaattaatatagcatatatattttttctaaataaaaagaaatgaggaaaatcattatgaagatacgtttaacatttattatcttagcaatactatccaccatcggcttagtacttgttttagcaaaatatccaacaggcccacacacaatcaactataacgaaccttatacagtactcatagccattacgacaatagttataatggctttaccagcactcatattaggtatatttaatcatcttgcatgtagaatcatatcggcgatattacaaataagtgcactgatgatgtgggggtttttagtaatcattagcttaattatgggacaaattgtcattatgcttatggcttccttaacgatacttgcattacttgttagttctattgtcacactttcagtgcacccatctacttcagataaaataaattaatcaaataaaggggcaagaaaggtagaatttacagtgaaattctctttgttggggcccatccccaacttgctttgcttgttgaatttctcagtgaaattctctttgttggggccccatccccaacttgctttgcttgttgaatttctcagtgaaattctctttgttggggcccatccccaacttgctttgcttgttgaatttctcagtgaaattctctttgttggggccccatcctcttgtaaaaaatggtttgatatgtgtgtatatttttaattctatcatttgactgattgtatgttatgaaagcctgggacatcgataatctatgccccaggcttcactcacaatcctatattatatataacaatattgctacggttgtttatagacatcaatcatatcttttgatagagaattaatatcaatttagccagcaattacaattttacaactcaaatgattatatatgtattcaaaacttcatttcttctttaattaaatatggatagcaattatgaatttccgtcgttaaggcttcttccttagttatcattttaaaatagacgaaaaaacatctaattacaacttggtgcgcaactatcactacacgtctctgctgttgattaagctcattttcaatgaaagtaaccactctatcatagacatcttgataactttctccttgtggtgctttttgcgaaaagctatgtctaaagtatttataattaggatcacggaaatatttttcgaaccgtttgtctttacaaacttcttctttatttttaccttcaaaaacacctaacgaacgctctcttaacgtctttgtatatattgttggaatatcataaggaaatagctcctcatacgtttgccttgttctttttaaatctgatacatatacattgtcaatgtatttatttttaaaataaacagatagttctttagcgctttttatacccctttccgtcaaagggacgtctaactgtccacaaaaatatagatacccgtgtttattatcataattggactgtgactcaccatgcctcactaaataaatttccattctgtctcctcatttctgacttagctacttttacttaataataaattaatagataagccaattaaaacaaaccctacaatataatcaaatatagccttgaatctcggtctgctgaataataatttaatatattgaaagatgaatacacaaaataaaaaccataagcatataactacaacaactgaaaaagcaaataacgcaacttcagatttcatatgtatattaccgttagaaaggaactgcgggaatatactaacataaaataataaagccttagggttaagacttgtacttaaaaaaccttgtctaaaagaagtgatataactcacatttctgacatcagctaaagcttgtttactaaaatcaacagaactgtgc

SEQ ID NO: 4269 - DNA, 3432 bp, Artificial Sequence
  Description of Artificial Sequence: synthetic nucleic acid sequence
atccaaaatctacattatcttttgaaaaaactccagcatcagtagtaagctctagttgcgcatttttaatttgataactaattctttttgggttacttttaacatcaggttgttcatcataataatgactcatttcttcacctctatttttatcattcaatccaaaagcatttagtatgcttgtattaattaattgaaaaaccccgttattggaataacggggttttaacttctcaaagaattcaggttgtatttgcattgaaatctatattaaataggttaaacatacattttcaacctaactatttaattagaaagtagaaactattttaattctacgctagctccaacttcttctaattgttctttaagtttttcagcatcttctttaggcatagcttctttaattactttaggagctccatctactaattctttagcatcttttaatcctaagccagttgcttctttaactgctttaacaactttaatttttgaagatccagctgaagttaattcaacatcaaattcagttttttcagctgctgcatctccgccaccagctgcacctgctgctgctactggagctgctgcagttacaccaaattcttcttcaattgcttttactaaatcgtttaattctaatactgacatttctttaattgcttcaatgatttgttcttgattagccattttatatttcctccattaatttaatttttatgcgcaattattcagcgctttcttctttttgttctccaacagctttaactgcataagcgaagttgcgtacaggtgcttgtaatacagataaaagcatagatacaagaccatcgtgtgaaggtaatgaaccaactgttttaacttcttcagcagagataacgttaccttccataacgcctgttttaacttctaaagcttcatgttcttttgcaaatcctgcaataacttttgctggtgcaacaacatcttcagtagaagttgcgattgctgtacaacgtgttaaaacagatcacggtaatgaaatagggatacgtcttaaacaacctattgacctacaatatggtgatattttatatcaagacgatacaaacatgattattgtcgatgttaatagcgaagacttattagttattaaacctagaaatttaaaggaaatgggagacattgctcatcaactaggtaatcgccatctgcctgcccaatttacagaaactgaaatgcttattcaatatgactatcttgttgaagatttattaaaagagttgggtatcccctactcacatgaagacagaaaggtcaatcaagcatttcgacatataggacattcacatgattgatcaccaacatttaagactttttcagttctgtgattctcagtttcctacaggtgcatttagtcattcttttggacttgaaacatatattcaacgagaaactgtacatgatactgagacatttattaaatggttacatttgtttataaacgaacaattaacttattcagatgggatagctatgagaattgtctaccacgcattaattaacaatgacaaagataaaattttagatattaaccaaaaactcttcgtacaaaatctacctaaagaaacgcgtattggcgctaagcaaatgggtacacgcatggtaaaattagctttagatctttatgatagtgaatggattcaatggtattataatcaaatgaaaaacaataaaattaagcttcatcctgctgtgtgctttactatgctaggacattttttaggtgtagatgtggaatccatcattgattattatttatatcaaaatatctctagccttacccaaaatgcagtaagagcgattcctttaggacaaacagctggacagcaagtcgtaactgaaatgatagcccatattgagaagacacgacatcacatactagaattggacgaaatcgattttggtatgactgctcccggcttggaacttaatcaaatggaacatgaaaatgttcatgttcgaatctttatttcataggaggcatatgagatgtcaaacccaattaaaattggtatcggggggcctgttggtgcaggtaaaacccaattaatagaaaaagtggttaaacgccttgcgaaaaaaatgagtattggcgttattactaatgatatctatactaaagaagatgaaaaaatactagttaatacaggtgttttaccagaagatagaattatcggtgtggaaactggaggttgtcctcatacagctattcgtgaagacgcctcaatgaacttcgcagccatagatgaattattagaacgtaatgatgatattgaacttatttttattgaatcaggtggcgataacttagcggctacttttagtccagaactcgttgacttttcaatttatatcattgatgttgctcagggcgaaaagattccacgtaaaggtggacaaggtatgattaaatctgatttcttcattattaataaaactgaccttgcaccatatgtgggtgcttcattagatcaaatggctaaagatactgaagtatttcgtggaaatcatccattcgcttttacaaatttaaaaactgatgaaggtttagaaaaagttattgagtggattgagcacgacgtcttactgaaagggttaacttaatggctgagcaacattggaccggtcaattagatttaacagttttcaataatggtgaaagttcgaaagcacgaaatatattttttgaaaaggcgctcaaagtattacgacctatatatttagaacaatctcctgtgccaactttctatattgtcaatgtgggtggaggttatctagatggagatagataccgtgtcaatgtcaacttagaagataatgcacaagtgacgcttacttctcaaggtgcaactaaaatatataaaacgcctaatgaccatgtagaacagtatcaaacgtttaatttatcaaatcaatcgtatatggaatttgtagcagatcctattattgcctatgaaaacgctaaatttttccaacataatacgtttaatcttaaagaagatagtgctatattttacacagatatattgactcccggctattcatctaatggccaagatttcacgtataattatatgcatcttactaatgaaatttacattgacaatcaattagttgttttcgataacatgatgttaagtcctgataaaagccgacttgacggtattgggtatatggaaaattatacacacttaggatcagcttattttattcatccagatgtaaaccaaagtttcatagacgatatttacgtggcggttgctgattttcaaaaacaatacgactgtagaataggtatctcacaattacctactcatggattggccgttcgtattttgactaaaagaactcaaataatagaagaaattttgactcgtgttcaatcat

SEQ ID NO: 4270 - DNA, 3119 bp, Artificial Sequence
  Description of Artificial Sequence: synthetic nucleic acid sequence
aacaaagaattgattaatgaatatgacaaagtacatctcgtgccaatgttacgtgagccagactttttatgtggtggaaatgtagtccctgaacctttttatttatctgatcaaacacttttgacgcaaatcatttgttatgacttgcgatttccagagatattgcgctatccagctagaaaaggtgctaaaattgctttttatgtagcgcagtggcctagctcaagactagatcattggttatcattactaaaagcgagagcaatcgaaaatgatatttttattgtagcttgtaatagttgtggtgatgatggtcacaccaattatgctggaaattcaattgtcattaatcctaatggtgaaattttagaccatttagatgataaagaaggtgtactaacaacacatatcgatgtagacttagtagatcaacaaagagaatatattccagttttcagaaatctaaaaccacatctttataaatagcatagttaaagccgtgagcttgggagagactcacggcttgataacttattattaagggaatgtttttacagttattttttcaatctattttttggggatgttattaattatgaaaaaattttagtgaatttatctatttaacatgataaattgaatgttgtttacgatagcttacatgctagaaataattacctatttaaggtagctaagaataatacgtaacactgagtccaaggaaactacagctactagcaaatgcttctcacttgcttagtttatattagtaaattattaagttgggatggctcaacaactcactaataatattaattatacgaagaaaacaaagttacaaaagttacaatagactcattcaaaaattattttttgaatttattaactgtatcgataatccattttactaaatcaccgattgtagaaatgatatctgctgccattataacttcactcctttcgaattaaggtaatggatacgaatgaatttaacattcactcgactagattaagcaaatttttcaactatctttcaatcacatctctgtgatatgagtctattaaaacatgatttttccatttaaagattaaaatttcgtaaatagcaatatttagtactcaactgtaaaactaaatatgataaaatatctaatagcacttaattaaaacacttaggtatatttttttaacagttaggcatgctttctaaaaaatgttgcgcaaaatagtataatgacacttgaggagagtagaaaacaagtgaaaatcatcgataaaaaaattgagcaatttgctcaatatttacaacgtaaaaataacttagatcacattgagtttctaaaagttcgtttagggatgcaagtagttgctggtaatattgaaaaaacagtggttctatatggactatcttatttttttgatttgctcatttttacatttttaactcatattagttactttctattaagaatatttgctcatggtgcacatgctaaaacaactcttcaatgtcatatacaaaatattctttattttttatttttaccttggctagtactacaccttcctcttagtacaaatatattttattttttagccatgattagttttttattagtaatatcttttgcaccggctgcaacaaagaaacaacctatacctaaacgtttacttaagaagaaaaaagtactctccatattaagttttattgtaatcataacaatcgctttaacactagaagaagtattcaaaaaaaatgttatctcgggtgttgtaatagagtctattacacttttaccaatattttttcctaaggaggattaacaaatatgaatttattaggtggcttacttttaaaaattttttcaaactttatggcagtaattggtaacgcatcaaaatacaacccttgtagtaattatctcgatgagccacaagtgccagaagaattaactaaactagatgagtagaattttgtagaaagagtgtattcaatgggtaaacttgactttttaccatttgcagctatacaagtgtttcttttggtttgggttacaaaaactattgctaatattaaatttgtaagaaaggattatattttcattactggaattataatcctttctgcaatattatataatgtttatgcaagccaagcacttgtacttgtagtaataatgattataattttcttctattcaaaagtaagatggtattctattgttatagtgttaatgagcactttgttgtcatatttaacaaattttattacagtagctatcagtttatatactgaaaatataatacataatatttatttttataatatctttcatttttcaatttttatcattttatctttaattttggcacatttatttaaacacttattaattaggtttaggtattcttatttatatttaagcaaaaggtattacattattatttcttttgtattagctattgcttttatatacttctatataatttcacaaactaatttacaagaaagtaatagcttgaacttttatgctattatttttgtttctattaccgtacttttgagtttggttatattattgttatcggctttcgcactacgtgaaatgaaatataaacgtaagctacaagaaatcgaagcatattatgagtacacgttacgtatagaaagcattaacaatgaaatgcgtaagttccggcatgattatgtgaatatcctcaccactctttcagattacattagagaagatgatatgcctggattacgtaaatattttaatgaaaatatcgttccaatgaaagataaattaaaaactcgctctattaaaatgaatggtattgaaaagttgaaagtgagagaaattaaagggctgattactactaaaattattcaagctcaagaaaaacgtattccaattagtattgaggttcctgatgaaattgatcgtatctctatgaatactgttgagcttagtcgtattatcggtattatagttgataatgctattgaagcttcagaaaatcttgaggaaccactcatcaatatcgcattcatcgataatgaggaatctgtcacttttatcgttatgaataaatgtagtgatgatatccctaaaatt

SEQ ID NO: 4271 - DNA, 3801 bp, Artificial Sequence
  Description of Artificial Sequence: synthetic nucleic acid sequence
ttaacagctttacttgtaggattaatttctaatgcactttttttaattggtttttctttagaactattactacatccagtagcagttagaactaaaataagagaaataataatactaaatattgcttttttcattctgatcatccttttttgcttattcaagattaccatattcttcatttaaatattttgatattaaattttcaatttgtttagatatattaataccatattttgtttggttctgttgcaaagttgaatttatagtataattttaacaaaaaggagccttctgtatgaactatttcagatataaacaatttaacaaggatgttatcactgtagccgttgggttcaagaatatgccccaattttatatcaaatttggaagaaaaagcatcaaaaagcttattacaaatggcgtattgatgagacgtacatcaaaataaaaggaaaatggagctatttatatcgtgccattgatgcagagggacatacattagatatttggttgcgtaagcaacgagataatcattcagcatatgcgtttatcaaacgtctcattaaacaatttggtaaacctcaaaaggtaattacagatcaggcaccttcaacgaaggtagcaatggctaaagtaattaaagcttttaaacttaaacctgactgtcattgtacatcgaaatatctgaataacctcattgagcaagatcaccgtcatattaaagtaagaaagacaaggtatcaaagtatcaatacagcaaagaatactttaaaaggtattgaatgtatttacgctctatataaaaagaaccgcaggtctcttcagatctacggattttcgccatgccacgaaattagcatcatgctagcaagttaagcgaacactgacatgataaattagtggttagctatatttttcactttacaacagaaccgacgcatttttctttaaaaacaccaaaatagtttgaatttatggaagactatttgaattattcattaaaaatattatacctaggcatattttgacgacgcatattcaacgcatgtaattcttctagttctgttttaatcgattgcattaaataaccttgcatagcttcaactgtttcattcttttgtaacaacatcgctttaaaacgttttaaaacactagtaatttcaaattcaacatcttctaaacggtaatatgtattatttgtattattaaaaaactttttcccttttagtaaaacacttttaatagtacgaatatctttaacttcaaaattacttaaataagttttgatttgatctggtaattcttcaagtaattggaattttaaagcatcattgttaaattcagtgtttagatgatttgcatgacttgaatgtgttttggttaaaatatcattcatatcattcatatcattactattagtctttatatagttagtattattaaattcagtatcattattgtattcttttgatatgtcatgagatatcttattaatatctcttgacgtatcattatcatatttctggatgtatgataatgatacctccttgttataccggccttctatatcattttcttgttttgaaatatagtatatatcagtctctgttacttcaggtcttttaatatataatttattaggtttatttaaaccaacccttatttgactaaataaatcagcttgagataattctttttttatttttgataatttatttggactactaatatttaatatcgacttgagtttttcattggtataaataaaaaatatatctccattttcatctacccagttatttcttatagataaatctaaacgatctctcaatatcgaccaagttattttggcatcattagacagtttagtatatttaggattagtaaaaaatactttaggtaattgatagaatttctctttttggatttctttaatattaaagtttgacatagaaaaacctctttcatatttaagttttaaaaagaggtaataaaaaagttataagtatgtttatatgtattcgacttgcactaacaattcttagtatatataataagaatataacaactatataaacaaacaaagcacttgttttattaccgaagagacttgactattcccgtagccaagtctctttatatatttatagtaacactttttagaggtttgttaaattatttatatgcatttgattatatgtattttcaaaataatgttcttatatataaaaggctattatatatagcgtataaacctatataaatcctgatatatcaagtataaataatatataaatatatgaaacggtcattacatgtttatacgtaaaattatatataattttactataaaacaattcacttacaagtatagaaggtgtataatggtataaatgttatgtatataattatatggaggcattatatgaagagtatgaagcaaatcgctgatgaattaaacgtaacaaagatgactgtttataataatgctaagaaagcaaatgtgaaatttcaaaaaattgaaaatgtaaattatttatcttccgaagatgaagttatagtagctaatagaataaaaaaaaatcaaaataaaactgattacttcgataatgaaaaaaaggtagaaaccaaacccaacaatgataatcttgtaaaaatgaaacgattaaacatttatataaccaattagatatatataaagagcagtcaaaaagagataaagaacaaataaagacactgaatagacttctagaaaatcaacaaatattaactttagaaagtaataaaaagattcaaaaattagagaatcaattagaggaagagagacaacttagttattctttcggttcatcgatgaatgataaacaaaatattaatgcccaagaagcgaaattgactgaagaagttaaaaatgttagtcaacaacacgaaagtcaaacaacagaagatattgaaaatagaaataaagaggttcccgaagagggcaaggaacaaaacttagaagaatatgaattactgaatgataataatctatctgaaaaaataaagactaataatcatgatgataaggaagaacaaccacctaaaaaaggtttctggagtcgtttgttcggtaattaattctattaaaaagacacgataaatttgtaaacttatcgtgtctttttatatggatcgaacttctgatactcagtaattatgtgaacaaaaataaatatcttaaaatgttatttgaaattatgattacgttaaagtttatatactgaaataattaacaatacacattactgtgtattgtttttttatattgtaaaatagactttattaaattactaaggtacccttagtcgtctcaaaataaaactcaatccttttatggattgagttagacagactattttacaatgataacgggaatttttgaacgtttagccactttgtgactgacgctacccaataccatttcttgtaaactatttagaccacgagaccctaaaacaattgcttgatatttaccactattagcaactgaaaccactgtttctgcaggaagaccatgtgcaatttttacttcataatttacattatgttctacaaatagttcagttatactggataatttgtcttctctttcatttgttaaactatgtccttgtttaccatgtaaaacatctgttttcgattcttcaacatttacaactgtaattaaagtaactatagtattttcatctataaagttcaaaacttcctgtgctgaacgtaaactattttctgacccatcggctgctaataaaattgatt

SEQ ID NO: 4272 - DNA, 2995 bp, Artificial Sequence
  Description of Artificial Sequence: synthetic nucleic acid sequence
ggttatgtaaaaattttaatgcttcacttattccggtatattcttttgattgatgtatttcatcgttgctaaaacaatgattgtattcatctattaatttttctatttgataaaaagacagttcatgtgaagctagcgctttaaaattgttatataaatttaaatgatatgtatgtaaaatagcttgttctgtaggttcatctaaatttaatcttttaaaagcgctttgcgtagctttgacgtgacatgttgttgtatcaattagcgttccatcaaaatcaaaaatataactatcaaaattcatgatgttcacctcatagttaaagttatattataaatatacacttaaaggagtaatgttgcaccatttattaaaaaagcacctttgtctaatcatagacaaaagtgctcatctctcattctagttattctaaattagcatgattctcttgcattgttttttcactaatgtgaaatgcatccattaaaggtaatacaacactatctaagaatataagtgaagcctgttcaaataaactaccaagtggttgtttcgaaccctcaacatcatgtttagtacctgcaggcaattcaacaaccgtctctgcaagattaccgattggcgattccgcatttgtagttaataagacaatttttgcaccctcagattgtgctttttcagctaataatcttaaatgttctgtagaacctgaacctgaaataataataaacaaatcatgttctttaattgaaggtgttgttgactcacctacaacgtaggcatttttacctaattgatttaagcgcattgcaaaactattagcaacaaaacctgaacgacctttaccagctgtaaatatgcgatctgcacctataacatcattagcaaaacgttcatactctgtattatctacttgagataaagtagaatctaactcttcaagaataagacgataattattaaattcactcatcttatttaccttcaatagctgctctacattgttttgctgcttctacaggatcgtcagcattcgcaataccgccaccaacaataactaaatctggatcttcagcaacaatatctttgatagtatctggtttaataccacctgctactgcaaccttagagtttttgataacagatttaactgtacgcaagctgtctaatggagattttccttcagcttgtaagtcgtaacctgtatgaactgcgatatagtctgcacccatctcatctagttctttagcacgttgttctaagttttgcactgctatcatatcaacaagcaatgcttttccatgtttatgcgcttcttcaactgctgctttaattgaagcatcttcagcaacacctaaaattgtaacaatatctgcaccatattttactgcttggctcacttcgtaatctgctgcatccataattttcaagtcagctaatactttagcattattaatattttcatttaaatgttgaactgcaggtaacccttcattaattacaattggcgtaccaatttcaacaatatctacatattcttcaactttttgagctaattttgctgcttcttctttatttaataaatcaatggctaattgtagttccaatgaaattcatcctttcgttttgggaaattctcttttgcttatagttgtatacccttcgctaaacttattaaacatataaaatattttgtatataaaacaactatataattataaacaatctggcgctgcttcatcgtctacataaacttcaacattagggtgtgtgtgtaaaatggtcgcaggtacatcttcggtaacctgttcatttaacagtttacttatagcctcttttttctttggaccaaatgcgagtaggataatcctttttgcttttaaaatactttttacccccattgaaactgcttgtctaggaacatccttttcattgtcaaaaaatcgactatttgcttttatggtgctttctgttaagttcaccacatgtgtttcactattgaagtcagtccctggttcattaaaaccaatgtgaccattttctccaattcctaaaatttgaatatcgattggccctctttcatctaataaattgttatatcgttccgcttctgcttctagattttctgataagccatcaggaatatgaatgtgatttttaacaaaatgaggatattgctcaaatagcactttattcatgtaggtatggtaactttgttgatgacttgcttttaaacctacatattcatttaaattaaatgtttcaacctgcgacacatcaactttatttttgattaataaatttactaagtaatgatatacgtcagtcatagttccaccagttgctaaaccgagtttggcatgagggtgctgctgtatttgtttaaacaactcgcatgctacataaaatgacgcaagattttttgaatctaaattaataattttcaatatcaaacacctctaatttcaatatcacaatgattgatgactaacgccttactcttttatatctcttaaattatactgtaacaaatgattaagattttaaacatattaacgctctatatgtaatattcaacgttatttcttgaatttttcctaattaaatcgagcattcgtgtacaaatatacatagctttctagtaaaatagatagataaacgagtttgctggtaaataatatgtttatcggtagtccgtcactgacatattgtttagtttaagggagtgaacgtgttggaaccaattaaagaacaagaagtgctagatttattaacttcttactcaaatcagcctgtttacctacacgttgaaacaacaaatggtgcttatgcaaatcatttcgatcaacgcgtatttaacgctggaacatttttaagaaatattgtcgtgacttttgaacatgcacaacttaaaggcggcgacaaagatccatatcgtgtaggtcttaaattaaaagatggtggctgggtttacgtgcaaggacttacgcacta

SEQ ID NO: 4273 - DNA, 4155 bp, Artificial Sequence
  Description of Artificial Sequence: synthetic nucleic acid sequence
tacattatatccttcttccgctaattgcaatgcaatgcttctaccaataccacgagaagcacctgtaactaaagcacttttattcatgattattccatcctttcacatcttcgagtgtttgaattgaagtgatttttacatctcgatttatttttttgataagtccagataatacttttcccggtccaatttcaataaagtgatcgacaccttgattaatcaaccactccgttgattgaataaattgaacaggtgaatataattgtttaaccatattgcgtttaattacttcagcatcggtttctccctttgcattaacattctgaacaactggataattagcattatgccattcaaattgattaatgaaattagcaaaatcctcttcaataactttcatcattgaagaatgaaaaggaccggaaacagctaatggaagaacgcgtttagcaccaagttctttgcccttttctactaattcatcaattaaagatttatgtccagacaccacgatttgacctggtgagttaatattagcaggttcaattaactgttcttttgtagataacgtttgacatatcttatcaacatcatcataatccaaacctaatactgctgccatacctccaacaccgttaggaaacgctcgagccataagttggccacgtttacgcacaattctaaccgcatcttcaaaagataatacaccactagcaactaagcttgaatattctcctaagctatgtcccatagtataatctacttttaaatgatttaatgattctagtaacgcaacactatgtaacctgaaagtgttggaccgattgcaggtgctaatatcattgcaatacccattgtccccattgccacaccgcgtttttcaggtgggaaaatggtaacaataacgttagaacctaacggcatcaatatacctgcgcctatggcttgtaatacacgtccactcatcataattgggaaattaaatgagattgcacaaactaaggaacctaatgtaaatagtgctaaacctataataaataattttctataagaatatttattaaataaaaaggcactaataggtattaatataccattcactaacataaaaccagtcattaaccattgaccagttgaggcagaaatattaaactctgtatttattttaggcaatgccacatttaatagagtttggtttagaatcgcgataaacataccaaataacattgccgctaaaattttacctctagttatgcctttaccaaaaataaagttagactcttgatttttaattctttcattaactctaccttcagtagaatttggatcgatagggttcaacacatcgttcgatgcgtcatcttcctcttggttcttatgacttaacgcgtttctatcctctttactatctgtattgatagattgagatgcattatctatttctgagtcaaagtgattttttcgtttttcatcttcaatatcgtttgattgcgttgggtcagtatttgacttagttgtttgttctaaatcgcttgctttaaatttagattgattgctttctctcttagaatctattgtcgaacgttgttccactcttttgtctttattttttcttttacgcttaattaaaaagaaattaataaaaccaatgagtatgagcgctactacaatatatataataatgaaggtcgctgtcataaaatgacccccttaatttttatgaattttaacttcagcgttcatacctgggacaacatttttagatggattagaatctaaagagatttttacgggtactacctgagaaactttcgtatagttaccgtcgctatttgatgatggcatcaatgaaaagctagctgcagtcgcttggcctacttcttcaaccttacctttgattgatgctttttgaccgtcgatatctacatcaacgtcgttgcctttttccacgtcagaaatatctttttcatctacattagcagttatatatagatcatctaaattatatgcatatgcaattgggttccctgcttgagtcatagaaccttcgataccatctgttttaacaatagtacctttttgtggcattttgatgttcatatcttttgattgcccatcttggccttgtgctaaaacttctgctactttatcacctttatcaagtttgtctccttgcttaacattaagagatttaatttgtccagatgcaggacttgagatttttatttgatctccatcaacttttgcattgtcagttgtcacataacttgttgtgttatgccagaaccaaaagcctaacacaccaataacaactaggacaatgatagtaatcacattgattaatatcatttttttcatgaatataccctcctatttgcttttaaaattcactttatctattatagagatgtgtaaataaaaaatacaccaacatttttaataattgtgttggtttagagtttatttatttaaattttctttttgatttaggtgaatatatgaaacaacgtgcgaaatataaaataataaaaagtttaatcgaacttttagaatactatccttttgatgaaataaccattaaaatgatatgtgcatatagtggcgtgaatcgctctactttttatgatcattttcaagataaatatcaattactagataagatccaaaattatcatttaaacaaatatatatctttactacaatctttctataacgattttcatcatatcaaaacagatcaaaaaaaattatataaatttttcttattgatagccaaatatattaaacgtaaagaagcgttctacagagcaacacttgtaacatatcctaataaagatattgcattagattacattaacgccactaaaacatgttatgaaaaagtcatgaatagatatgaaacctcaataaataataaacgtatgtttatcatttattcagtcggtggtcaagcaggtgtatttatcgattggttacgtaatggatgcatcgaatctcctcaagaggtcgctcaagttcttttagctaatacaattaaattacaacgataaaaaagctaaaactcattgaaaaatcactcaattttatcaatgaattttagcttttttaaatatcttcacattaatcaactgtaaaaccataagaattattgctgtaataacgataacgattatataaggtatcgcattactgtctcccttaataccaacaagtggagagatgacgccaccaagtaaagtttgaaacaatcccaacaaacttgaagaactacctttggcccctttactctcatccattgctatcgaaaatcctaacgttgcaatccctgtaactggtgccactaaaatcacaaagccacaagaaagtatccaaaaagtccaatggttgagtaaagttagtgatacgattataacaccaataacttgtatagtagacatgattctcagcaacagtaatctatctatatagtcaacaagttttccggttaattggcttgaaataatgagtgtaacgcctataaaagcaaacataatactgaagtttaatggcgttaaaccataaattgtttgaactataaaaggagatgcagaaatataagtaaatagtaatacaaatgacaccccttgtatcaacatgggtaatacaaaacggggtgttttaaaaagttctttgaaattaattagcatcgtacctatgttactactttcccttaggctcttttcaagcgactcaggaactttaaataaagttcctattaacatgacaatcccaaacattgttagtattacaaatacaattcgccatggcccataatttaaaatgataccgccaagcgcaggtgcgataattggcgcaatgccattgacaagcattaataatgataaaaatttagttagcgcattacctgagtacatatcactagcaatggctcttgagatgactgcacctgcaccaccagttaatccttgaataaatcgtaaaataatcataatccatatatttgtgacgaatataatacctaaactcgcaatagtaaaaataatcagtgagaaaattaatggtttttttctaccagtaatatcagatatggggccagccaaaaaatttcctaacgctaatccaatcataaaaaaggagatagtaagctgagttgta

SEQ ID NO: 4274 - DNA, 4534 bp, Artificial Sequence
  Description of Artificial Sequence: synthetic nucleic acid sequence
aacttccatgcctaagcgaactgttgagagtacgtttcgatttctgactgtgttagcctggaagtgcttgtcccaaccttgtttctgagcatgaacgcccgcaagccaacatgttagttgaagcatcagggcgattagcagcatgatatcaaaacgctctgagctgctcgttcggctatggcgtaggcctagtccgtaggcaggacttttcaagtctcggaaggtttcttcaatctgcattcgcttcgaatagatattaacaagttgtttgggtgttcgaatttcaacaggtaagttagttgctagaacccatggctcctttgccgacgctgagtagattttaggtgacgggtggtgacaatgagtccgtgtcgagcgctgattttttcggcctttagagcgagatttatacaatagaatttggcatgagattggattgcttttagtcagcctcttatagcctaaagtctttgagtgactagatgacatatcatgtaagttgctgataggtttccagttttccgctcctaggtctgcatattgtacttttcctcttactcgacttaaccagtaccaacccagcttctcaacggatttataccatggcactttaaagccagcatcactgacaatgagcggtgtggtgttactcggtagaatgctcgcaaggtcggctagaaattggtcatgagctttctttgaacattgctctgaaagcgggaacgctttctcataaagagtaacagaacgaccgtgtagtgcgactgaagctcgcaataccataagtcgtttttgctcacgaatatcagaccagtcaacaagtacaatgggcatcgtattgcccgaacagataaagctagcatgccaacggtatacagcgagtcgctctttgtggaggtgacgattacctaacaatcggtcgattcgtttgatgttatgttttgttctcgctttggttggcaggttacggccaagttcggtaagagtgagagttttacagtcaagtaatgcgtggcaagccaacgttaagctgttgagtcgttttaagtgtaattcggggcagaattggtaaagagagtcgtgtaaaatatcgagttcgcacatcttgttgtctgattattgatttttcgcgaaaccatttgatcatatgacaagatgtgtatccaccttaacttaatgatttttaccaaaatcattaggggattcatcagtctaaagcatcctttagtatgtttaaaataatttttggaaaagagaaaaataaggtggttaagacaatgaaagttttagtagccatggatgaatttaatggaattatttctagttaccaagctaatagatatgttgaagaagcggtagcaagtcaaattgaagatgcagatatcgttcaagttccactatttaacggtcgtcacgaattattagattcagtctttctttggcaatcaggaaataaatatcgtgtgagtgcgcatgatgctgacatgaaagaaaccgaagcaatatatggacaaacggatagtggtatgactattatcgaaggtcacttatttttaaatggcaaaaaacctattcaacatcgatcaagttacggtttgggagaggttataaaagcagcattggacaatcatacagaacatcttgttatttctttaggtggaataggaagttttgatggcggtgcaggcatgttgcaagcattgggtgcaacattttatgatgatgaagcacaaattgtcgatatgaggaaaggtgcatatttaataaaatatattagacgtattgatttatcaggtgttcatccacaattaacaaaggtaaacattcaattaatgtcagatttctcaagtcgattgtatgggaaaaaaagtgaaatcatgcaaacatacgaatcattagatttgtctcaaaatgaagcagccgagatagataatttaatttggtattttagtgaattatttaagaatgaattgaaaatagcaatgggaccaatcgagcgcggtggtgctggaggtggtatagcagctgtattaaatagtctctatcaagctgagattttaacaagccatgaattagtgaatcaaatcacacatttagaaaacttaattcaacaggcagatcttattattttcggagaaggtttgaaagaagaagatcaaattctagagactacaacaatacgtatagcagaacttacccaacaatacagcaagccagctattgcaatttgtgctacaaatgataaatttgatttgtttgaatcattgaatgttacagcaatgtttaatacatttattgatatgcctgattcatatacagattttaagatgggtattcaaatcagacattacacagtacaagcactaaaattattgaaaacgcaaataaacttaccgctttcatcctaatattagaaaaagtttttatacacatttaatttaaaagccattgacagtaagagtagctttagagctacatactgacaatggctttttatgttatttataagattgatggctgtttgctacttcttgagcaataccaacgacaacatgaacagccttttccattacatcgatagaagcgtattcaaaaggaccgtggaaattgccacaaccagtaaaaatattaggtgtaggtaaccccataaaagataattgtgatccatctgtaccacctcgaataggttcagtgttaggtacgatgtctaaagcctcaaagacacgtttaggtatatcaatgatgtgtttcaaaggttcaattttttctgccatgttaaaatattggtcatgcacatctactttaattggaaaatgattataatgaacattaatatcatcacgaatttccatcatgcgttttttacgtagctcaaactgttctttgtcatggtcgcgaataatatattgtagagttgctttttcaacattacctgtaaaattcattaaatgatagaacccttcgtatccttcagttctttcaggcacttcatgtgagggaagtaaactattaaactgttgacctaaactaattgcattaaccatggcatttttagctgaacctggatgaacgttaacaccatggcaagtgacagttacctctgccgcattgaaactttcgaattgtagttctcctaattgactgccatccattgtatatgcaaaatctgcattaaatcgactaacatcaaattgatgcgggcctcgtccaatttcttcatcgggtgtaaagccaactcgaattgtaccgtgtttaatgtcaggatgatcaattaaatactttatcccttccattatttctacaacacctgctttatcatcggcgcctagtagagatgtaccatctgtcaccattagtgtatgacccacaactttatttaattcaggaaaaacatcaggatctaagatacgctgagattcaccaagtttgataggttgcccattataggcttcaatgatttgcggatttacatgagaagcattgaaatctggtgaagtgtctacatgtgctaaaaaaccgacagtaggtacattataattaatattgctttcgagtgtagcaaataagtaaccatgttcatccatgtctgttttaagacctaatgattgaagctcttcttctaatagatttaataaatcccactgtttattcgtagatggtgtcgtcttggaatcaggattagattgtgtatcaatttttacatatctcgttaatctttcgataatttgtttcttcatacgagttcatccccttagatttatactctattattcatattataggattttttataagttttacccttgattttaccataagattgcttgatgcgtgaataaatgtaatagactatttcagatacaagtataccgaatgcaattgcaccagaaattaatgttacctctaaaaaagtattaactgcattcgtataattatttgatactaaaaatcttgtagcttcatatgctgcgccacctggaacgagaggtataatgccggggacgataaatataataacaggttgcttgtaccgtctactcattgtatgactcattaatcctaatattagacttcctaaaaatgaagcgccaactttacctaaatccatacctactgtcatctgatatattgtccaagcaacagctccaacaaatccacaagctaatagcaattttttaggtgcattaaatataattgaaaaaaggactgtggcaatgaaactaatgataaagtgaaacagataaataaacataactaacagcctttcttataataatagtaatacaatagctactcctgcaccaatagcaaatgcagttaaagcagcttcaacaccacgtgacataccagcaagtaactctccggcaagtaagtcacgaatagcgttagtaatcaaaataccgggaacgagaggcatgacacttgcaatagtaataatgtcttgatttttagctatacctagtttagtgaatattgctgcaatactaataacaacagcagatgctacaaactctgaaaagaatttaatttgtat

SEQ ID NO: 4275 - DNA, 3427 bp, Artificial Sequence
  Description of Artificial Sequence: synthetic nucleic acid sequence
gctaagtgaaattatgtataaaaagagtctcgaagcccatatatgattcaattaaatctttcttagatgctgtaacttagagggataattagtgaaatgcatatatgacattcaagactatgctcaatagtatatcatatttttctgaaaattaagataacttattcgacatttaattcaaaacattaatttttttaattaaaatacacttcataacctttagtttaaatactaacgttatgaagtgttagctaactcgtcctatttgaaataataagtgctttactcttcctcatttttaattttagctttgcgagattcttttttatatttttgatacatcaatagcatgataacaaaccatacgggtgcagaaagtacggcataacgcgttgcactattaatcaatagtataataaaaataaatgcaaagaaccctaaaatactgtaagccatgtattttccgccccacattttatagttactttctttatgctgtttcggttcatgtcttaaataacctagatacgcgatcataataattgtccaaatcataatatttaaaacagttgaaaatgttgtaatttgtacgaacactttagtcgcatctttaaaaattgcatttaacacgactgaaatacttaataagccacatgtcactaaaatagcataatgtggtacgccgtgcttattggttctatgtaagaatgctggaccttgctttcttccagctaatccaaacatcgtacggctattagcaaatataccactattacaagaagaggctgcagctgtaagtacaacaaagttaataatacctgctgcaaaagggattccaactaatccaaacattttaacgtatggactgtcagcaggattcaattgttgccatggtacaacagacatgataactgccaacgatcctatataaaataataatattctaaacggtacattattaattgcttgaggaattgttttgtgaggatctttagtctcccctgcagttattccaatcaactcaataccaataaatgagaaaattgccatttggaatgacatgaagaaaccttgtgcaccattagggaaaaagcctccgtctttccatatattcgttaccgttgcagggccatagcttgtcttcattccaaatacaatcataacaacaccaacggctatcaaagctaaaatagtcaaaactttaataatagatagccaaaattctaattctccaaataatttagcactgaatagatttaaagcaactaaaactaaaatagtcgctgcagctgttaaccagtttggaattgttggataccagaaggaaacatacttggcaacagcagtcacttctgccattcctgaaataatccatgttaaccaatatgtccaccccaccataaaacctgccatagaaccaatatgatgatgagcaatgtcaccaaacgatttaaatcctaaattggataacagtaattctcccatagctctcatgaacataaagagaacaaaacctactattatgtatgttagtaagatagatgggcctgctaaatgaatagattggccagcaccaagaaataaacctgttccaatagccccgccaatagcaattaattgtatatgtctattgcttaattctctttgcagtttatctgccataatcttttcttctccatttcatagagtaaatcactgactgaaaattatgtcgtacgtcatacccctttttttataataaatttcttttaatcacagaaaaatcgtattacaaatttaaatataccctatttttaaaattttcaatcaatcttatgtttaaaaacctcactaaagcccgttgatatctttagtgaggtcgatgttctttattctaaaatgattttcatagagcgttgtacactatcagcatacataccaccaaatttaagtaaatgtatcataagtaaatataatctataaaattctatacgcttttgtgatcccttggctagtggtaactgttgattatattcatcatagaactcttgtgtaaatccaccaaatactgtagtgattcctatgtcaaattctctatctccatatagtggtgcaggatcaaataaagcaggttggccatttgttaagaacatgtagttacctccccataaatcaccatgtaacagagagggcttactagtatgatttgaaagttcatcaacaataacttttcttacacgttcatacatttttttatcttcttgtttccacaatcctacacgtaataactcatcttgtaagtgatccattctacgatttataaaaatctctttccatgtctcagtccatgaattatcaaaggaaatatctgcaccttcatgtggtaaacggaatccaaatttattatcttgttggtattggctatgcattctagcaactaatcgagcaagctctctttgactcccttgactaccttcttcaagaaaacttaataataaatatgcatctccatttatctctccacttgcaattactcttggagctgttatacctgcattttcaaattcatttagtcctgcaatttctgcggcataaaaggcttctgatcgttgacgttgaacgagtagaaaaaaaatatcttcttcaactgtagtgactttaaatgcttcatttacatctccgccacttactggagaaatgtctttcacattgtcaagtggcaatgcgctcatccattgttcattcattttctcaccctcttaactttatattatatctacattattatattacctataatgaaaacattaatcttaaattctttatattattaaattaagtcaattttttaactttctaatatttaactatgaaattttacatgaaaatgctagtctattaaaagaatgaatttcaaacatattaactggggatagtaagcctcaaatataatgaaataggagcatttatatgtacaaattagttaagcctttattattcaaattagatcctgaacgagcacatggtttgaccatcaatgcgttgaagtgtgttcaaaaatgttcacccattttacctatcgttaataagttatttacttataacaatccaatattaacgcaacacattcacggtatttcttttgataatcctatcgggttagctgcaggttttgataaatcttgtgaagttccaaaagcacttgaaaacattggcttcggtgcaattgaactcggcggtataacacctaagcctcaaccaggtaatccaaaaccacgcatgtatcgtttactagaagatgatgcactcatcaatcgtatgggattcaataataagggtatgaataaagcactaagtaatttacgtaatcattcatgctcaataccagtaggattaaatgttggtgtgaataaaacaacttcctatgaaaatcgctatcaagattaca

SEQ ID NO: 4276 - DNA, 3241 bp, Artificial Sequence
  Description of Artificial Sequence: synthetic nucleic acid sequence
atgaagaagataagttccaaaagaacaagtttgatttttcaaacgctaatgtatcttcattatatttttatgtttttgattgggtagatattgaaaacgacaatctagaaatagtggatttaaaatataaagtagcaaaaatttatttatctaaattcgaaaaggtttctgatgacgaaaaaataaagaaaaaagaaatacatcatgacttaaatgttatgtataatttaatacttcaaaaaaaatctcaaaagtattatgaatataacaaagtaataaggaatcataaaatagaaatcattcaacgaaaaatagaattaaaaaatgaacttaataaaaaattaatgagcatgatggtattcattcccgtaactatttatggtttatatataacaatccaaaagagcaaagaatcactaaacattttcaataatgactttaatattatttatttcagttctctagttgcacttatatttataatattatctttaataaatgatgtgaaatctattaatagtgactatgaaacaattattttagaaatcataaatacatataaaataaacaaaagtatggacgattttggaaataatataagtttaagtgattttaaattttctttattttggatttttataatgattataactcttataatttttattttaattaagtgagaatccatttattttttaaaatttggaaaggttaatttaaggtttccatttataaagaaatcaaatgaaaaagattctgatctacatgtttaacaaagttttgttgcaaaattagaaaaaatatggttaattatcattttaatatgttagtatttctgaactgctcaacgtatgactgacttcatgacacgacgagaatccttaaatctaaaggtacctacggtgctttttgtatagtccataattatattcaatccctttgggtgtattccttgctatattgatactttatttcgataaatatctcatcaatacgccatttataatagacttttttattctttttccaaagagttgaatattcttaaacccaactatagatcgttaaatgatgaacgttaataccatgttctcttactatgtaagatacatcatgataactcagtacgtatcttacatagtagacaacggctacagtgattacgtctttattaaattgtttatatctgaaataattcatacagaatgctcttttttattaaattacattataaaataaactttataacagaatcaaaaataagttaggtcttgatatttttaaaagtatggctttgcattcctaacctatatgatgatatactatatttaacaaagagaattccataggtacaccaatcccctcactaccggaaatagtgaggggattttttggtgcagctatgtcgccttattatttgttacgattgtttagccaaaacgtgaaaatcgcaacaatgcatcctgaaatcacaggtgcaattatactaacaaagagaatttccacaggccccacctccttccatagtaatttcgcctatggaagttaaggcgacctgtatattatatcatctcttaatatacgataatagctaactgccgataagtcattttatgtaatgatagtgagatccagaaccatttctatgatatctaaaggcaaaagagatactttataagtatatttcaagtttattatagtaattaaatacatcactataagtaaataaatttactagtttactaatgactattgcatttttaatagaattattgattttatacttattttccaataatactttttagcaccttttaaagtctaatatgtttttccttgatcctatatactcttaaatttgcgtcatttcatttaacagctttcctaataattttcgctttgaacattaaaaaattgattatgatttatgttttctttaatttataggagaaaaatcatgattctgttaatttatgaaatcttattatttttaataatttcattctcgtattttttattcaaactatttttatggagattcattttggaatcttagcttcaatattcggaatgtttacagcaaatttgtttatatattacatgcttctatataaaagtccagaatacaatgacaagaaaatctctaagacttttataaacttaattaatctcgtaataataattattagcctaataatactcattttattaactgtaaaatgagtacagaattagagttgaaattaatgtattaacattgatttttgaaactcttaacaattccaaaacttgtagaattgtcgacttcatcgctcacactatacgccattcgtcttaaaatttagttagagagcctcacaacattattaaaatttcttagcataaatgtgtgctctacttttgtttttacgcttgtctaacatatgaaaaaacggcgcataaatcctacaaaaattaatcaaaatattccattatttcgctcgattatttaacaagccccccctaaaaaaatgcagaaattgttaatgacttagaatgaattttatatcgaaaacgtatactaagtttcggtgtaattacttaaataaaagcataaacttttaaatttagataacgctgaagatggtaatttaattcaaacaattgataaagaaaaaacacattcaattacagcaattggaaacttcgaaaagcaaaattacttcttaaaaaatttgtaatgctgtctaaatataataatattttttgtaaggatttcataaaaatgtataccaaatggttccatttttatgtctccattcggtagccatttttaatttttgggatctattcagtatctttttagtatacattcagtctccatataacaaatttcagcgcataaaaaggaattctatttgacactgtcaaatcaatgtttttaacaaaaatggctaccgaatggagacatttttgtgcaggattcctcttatgctctttaaaatacaaaagttacattatacacccacttttcaggttttagcttttttctaagaagaacaattgagataaaaaatatatttttctttctgaaagtgttgagaaataaattttaaaatgatttatagcctctctgttgaacgaaaaagtttttagtcattggtttttatacgtggaataataaaatgtcctagaaagggcttaaaatgcaaaataaaagaaccactcaaaaatgagtggtctggagaatagctataatgct

SEQ ID NO: 4277 - DNA, 3365 bp, Artificial Sequence
  Description of Artificial Sequence: synthetic nucleic acid sequence
atgctttgttaaaataaattttaataacttattgattagagggtcgaggacaaagtgaatgtccttggctctttttaatatttttgattcaagttatataaatgaaaataagagatttatcttatatattaagcgatagtgtgaatgacaaaggtaattattttttatgttgaaaacaatttcaatatatgaatatgttttcactatatttgatattgcttcaataccaaatccaacagctatataatgattatgaattttaatctatagatagggggattaacgatgattaaagccattgcggtagatatggatggaacatttcttgacacaaataaacagtttgatcgaaatcgttttgaaactatttttaaagaattaatagataaaaatattaagtttatagctgcgagtgggaatcaatttgcaaagctaaaatcaatttttggagatagggaaatgttctttatatctgaaaatggagcagtcatctataaaggtaatcaactttacaattatcgaagttttgatcagtatatttttcaaaaagttgtaaattatttaaatttgaatcaaaagataaacaatttgattatttgtggtgtaaaaagtgcatatattttaaaagaaacaagcgaagcatttaagcaagatgcacgtacatattatcaccaactaatagaggttgactccttacaaacattacctgatgatgattatgtgaaaattgctttcaatataaatcgtcagactcatccagacttagatgagaaattagctcttaagtttaaagacgatattaaactagtatcaagtgggagagatagtatagatgttattatgccaaatatgactaagggtcaagctttgtctagattattaaaagaatggcaaatgcctgcttcacatttaatggcatttggagatgcaaataacgataaagatatgttggagcttgccgaacatagttatgttatggctaatagtgaagatcaatcattatttaatatagcgagtcatgtggcaccttccaatgatgaacaaggcgtactatcaacaatcgaaaatgttgttctcggttattccaataaataataaaatggttaaatgtctgaaacgttaacatgtacagacacttaaccatttttttagaaaagtaaagtcttttttattttattcgcaacaataccaagtgatattgtgatgtaatgatataggttaagtaaatcgaaataatgataaataatatcttgattacagtgattactgactttattcgtattagtttaatcgcgtatcacatgtgccagtattaattactgataatgctgcattcaaaccaccctctactaaattttgtactgcttcatcggagaaaaaggcaatatgaggtgtaactaaaatattttcatttctaattaggtctaataatattgggtcgtcaatcgtttgatttgaacaatcaaatgtgaaataattagcttcattttcatatgtgtcaatggcagcacctgataatgtaccattatttactgcttcaattaaatcaggcgtgtttatcacagctcctcttgcggcattgactaaaacggcaccttttttaacatttttaaacatattgttatcaaataaatggaaactatctttattagcgggtacatgtaatgagataatatcagcatctttaattgcatcctctactgtttctttatattctaagaaagataaagaatgattaggatatgcatcataaccaactactctcgcaccaaaaccagcatagattttaccagttgcagcaccaatacgccctgtaccgatgattgctacagtcatattttttactggacgagacataataggggacgcccatgtgaaattatgtgcttgcacacgtttttcaattgttgggaattttcgtacgagttgcagagcgatagataccgaatattcagcaattgtttcaggtgaataactaggtatattcgagataataatttcatgtttttttgcaagttctaagtcatacatatcaaatccagccgtacgttgtgcaatttgtttaataccataggactctaatttagggtaaacttcaggttctaatttaccgaactgcattgttgtaacaccgtcataatcttttaattgatcgacagtatctacacttaaaagttctgttgatgtagtgacatcgatattatttttctttccccaacgtaatgccatgtccttctcatatgctcttgtgccgaaaaacataatttttgtcattaaaaattaccccatttctaaaatttgtaattaataaatagtaaaaacattcacaagtcagtacttatgattttttaattatatgtgatttaattcactaaacaagttacttcataggtcttttaaatttctaaattatactaactatataagtgagctgaagagattagaaatcaattactttagttactttttgaagtcgtatataatttgtatcaacagaagtaaagagaggaaggtatgattatgaatcagatgaatcaaacgattattgatgcattccattttagacatgcgacaaaagaatttgaccctacgaaaaaaattagtgatgaagattttaatacgattttagaaacaggtagattatctccaagttcactaggtttagaaccttggcactttgtagtggttcaaaataaagaattgagagaaaaattgaaagcctatagttggggagcacaaaagcaacttgatacagcaagtcactttgtattaatttttgctcgtaagaatgtgacggctcatacagattacgtgcaacatttacttcgtggcgtcaaaaaatatgaagaaagtacaattccagcagttgaaaataaatttgatgatttccaagaaagtttccatattgccgataatgaacgaacattatatgactgggcgagtaaacaaacatatattgcattagcaaacatgatgacaagtgctgcattactaggtatcgactcatgtccaattgaaggatttgatttagataaagtgactgaaattctttcagatgagggtgttttagatacggaacaatttggtatttcagttatggtaggctttggttacagagcacaagaacctaaacatggcaaagttagacaaaacgaagacgacatcattagttggattgaataaagaaattctatgaaacccagggtataacatggatttatgttaaatatcatagttaactcacgatagtgagaactttaatctagtacgattatacgaatgtaagattaagtgagttatcaataattaatatataagcaacctgagacttttacttgaagtctcaggttgttttgttgaatata

SEQ ID NO: 4278 - DNA, 3632 bp, Artificial Sequence
  Description of Artificial Sequence: synthetic nucleic acid sequence
gaatttcttaaaattatacaacctttgcatacctctgtgtataaaatctaatttattgagtgtgagtccttgtaccaaatatgtgagataaagtttctcatagtcattcattgattcaagaattgaccaaatatcttcagtcattagtatttcttttccatttaattgatgaagtaaaaaaataccgtaaagtcgataatgattattatcatctagtaataatggtaacactcgtgattcaaataccgttttactttcctcaattacccaaggtgcataaccaacatcaacttcagaaatttgagtgagcttgttccacatctcaatactttcgtctttatttcctaggtaataaaaattgaaactcaatgcattatacatttgaatagagacaaatttaccttttttataaagtggataaagtaaattttgagaagcacgatactgttttaaataactcaatacgattcctaatttaaaggtttcgtcgtcatttagtggtactactttattaagtattttaagatatttttgatatttttctgtttcttttttattataaagtaataatgtgtagtgacaaagtgcatgcacgtctgaattatcttcctttaaaagttcttcaaacattgctttggcgctatcatactcacctagatacaaataacacattgcaagtaaattcctaatcaccctatgctgttgtatctcgtaagattgattcaaaatatatgttcgggcttcttctaacctaccttgcgaaaagagaaattgaaataaaagttgtgttgaaaacaattgtgcttctaattcaattttttgttcatttgtatacgtgacttcgaatgttttttcaagcatttctctaaaatctttatcctctgacaatattacataattaataccaaacaagaatgccttgtttggctcgtttaattctatatttaattgacttagttcatagaaactttctgctacatgaaagtctttaacaatattctcataaaatagacgttctgcttttttgccgatatttaatttaactaaacattgagcatagtgttgttgaatatcaaaatccttaggtgacaactcaagcactttttcataatattctgccgccttcttgtagtcctgttgtcgccacttttgggtagccattttacgataaaaagcctcatcaaaaatcattggaatgatgttattttctttttgtgccattcattgtcacctcctgaatctaattgtatttgcataggattaccaaatgcaaaactgtaatcgggaacatctttagacacaaccgtacccgcaccaattttaacatgatttcctatggttattcctggtaatattgtcgtatttgcacctattaaagtgtaatcgcctataatgacttttcctactctccactcatcaacaagtacttcgtgagttaatattgttgtattataaccaatgactgtattcttgccaaccgaaatgtattctggataaaacaaatcaggcaacactttatatgcaaatgaagtatgattcccgacatccatttttaaaagctttttatatattttatttttaagtttcatactaggaacaaatcttgcaatttctataatcaacgtttgctttagcacttttacgaatttaatttttctatactttacgtaagataaatgcaattcaaccagaggttacaaaagctattaatatacttcaagataaagaagataatagcgaacttgttagagcaaaagaaaaattagatcaagcgattaatagtcaaccatcactaaatggtatgactcaagaatctattaataattacacaacaaaacgtagagaagcacaaaatatagcaagttctgctgacactattattaataatggggatgcatctattgaacaaataacagaaaataaaattcgagttgaagaggcaactaatgcacttaacgaagcaaaacaacatttaacggcagatacaacttctttaaaaactgaagtacggaaattaagtaggagaggcgacacaaacaacaaaaagcctagcagtgttagtgcttataacaatactattcattcgctacaatctgaaattacacagactgaaaatagagcaaatactatcatcaataagcctattcgttctgttgaagaagtaaataatgcattgcatgaagtaaaccaattgaaccaacgcttaacagatacaattaacttattacaacctttagcgaataaagaaagcttaaaagaagctcgtaatcgacttgaaagtaaaattaatgaaaccgttcaaacagacggtatgactcaacaatctgttgagaattataagcaagctaaaataaaagctcaaaatgaatctagtattgcacaaactcttattaataatggtgatgcatctgatcaagaagtttctacagaaatagaaaaattaaatcaaaagctgtctgaattaacaaattcaatcaatcacttaacagttaataaagaacctttagaaactgccaaaaatcagttacaagcaaatattgaccaaaaacctagcactgatggtatgacgcaacaatctgtacaaagctatgaacgtaaactacaagaagccaaagataaaataaactcaattaataatgtcttagctaacaatccagatgttaatgctatcagaacaaacaaagttgagacggaacaaatcaataatgaattaacacaggcgaaacaaggtcttactgttgataaacaaccattgattaatgcaaaaactgctttgcaacaaagtctagataatcaaccaagtactactggtatgactgaagcaacaattcaaaattataacgctaaacgtcaaaaagcagagcaagttatacaaaatgcaaataaaattattgaaaacgctcaacctagtgtacaacaagtgtctgatgagaaatctaaggtagagcaagcactcagtgaattgaacaacgccaaatcagcgcttagagctgataaacaagaattacagcaagcatataatcagttgattcaaccaacggatttaaataataagaaaccagcttctatcactgcgtacaatcaaagatatcaacaatttagtaacgaattgaacagcactaaaacaaatacagatcgcattttaaaagagcaaaatccaagtgtagctgatgtcaacaatgcactaaataaagtaagagaagtacaacaaaaattaaacgaagccagagcacttttacaaaataaagaagataatagtgcactagttcgagccaaagaacaacttcaacaggcagttgaccaagtcccttcaacagaaggtatgacgcaacaaactaaagatgattacaattcaaaacaacaagctgctcaacaagaaatatcaaaagcacaacaagttatcgataatggcgatgcgactacacaacaaatttctaacgccaaaacaaatgttgaacgcgctttagaagcattaaataatgcaaaaactggtttaagagcagataaagaggaacttcaaaatgcatataatcaattaactcaaaatattgatacgagcggtaaaacgcctgcaagtatcaggaaatacaatgaagctaagtcacgtattcaaactcaaattgattcagcta

SEQ ID NO: 4279 - DNA, 3958 bp, Artificial Sequence
  Description of Artificial Sequence: synthetic nucleic acid sequence
agacaatcagaatgatacaaatattgaaaactcagtatctaacacagataatagtgaagctaatgctagcgattcagaaaataattcagaagaaagtatcaaggatgaagagtcagagtctcaagatactaaaattaaagaattagaaaagcttgcaaatgacaatgaagaaaaatatttaagattatatgctgaattcgaaaattataaacgtcgaattcaaaaagaaaatcaaattaatgctacttataaagctcaaggtgttttaactgacattttaccgtctatagataatattgagcgtgcactacaaattgaaggtgatgatgaatcgttcaaatcacttcaaaaaggagtgcagatggttcatgaaagtttactaagagctttaaaagacaatggtcttgaagaaattttagctgaaggtaaggaattcgatcctaatttacatcaagctgtcgttcaagatgacaatcctgattttaaatcaggagaagttactcaagaattacaaaaaggatacaaacttaaggatcgtgttttaagaccatcaatggtaaaagtaaatcaataatttgattgaaaatacattgaaataaataaaatgattaaattggaggaattatattatgggtaaagtaattggaattgatttaggtacaactaactcttgtgtttctatcttagaaggagatgaaccaaaagtaattcaaaacccagaaggtgcacgtactacaccatcagtggttgcatttaaaaatggtgaaactcaagtgggtgaagtagcaaaacgacaagctatcacaaaccctaacactgtacaatctattaaacgtcatatgggtacagattataaagtagatattgaaggtaaatcatatacaccacaagaactttcagcaatgattttacaaaatttaaaaagcactgcagaaaactatttaggggatacagtagacaaagctgttatcactgtccctgcttatttcaatgatggtgaacgtcaagcaactaaagatgctggtaaaattgcaggcttagaagttgaacgtattatcaacgaacctacagctgctgcacttgcttatggtttagataaaactgaaacagatcaaaaggttctcgtatttgacttaggtgggggaacatttgacgtatctattctagagttaggcgacggcgtatttgaagtattatcaactgccggagataataaacttggtggcgatgacttcgaccaagtgattattgattatcttgtttcagaattcaagaaagagaatggtgtagatttatcacaagataaaatggcattacaaagattaaaagatgctgccgaaaaagctaaaaaagatttatcaggtgtttctcaaactcaaatttcattaccattcatttctgctggagaaaatggcccattacacttagaaattagtttaactcgttctaaatttgaggaattagctgattcattaatcaaaaaaactatggaaccgactcgtcaagcattaaaagatgctggtttatctacttcagaaatagatgaagttattttagttggtggttcaacacgtattccggccgttcaagaagctgttaaaaaagaaattgggaaagaaccacataaaggtgttaacccagatgaagttgtagcaatgggtgctgctattcaagctggtgtaatcacaggtgatgttaaagatgtagtattacttgatgttacgccattatctttaggtatcgaaattatgggtggacgtatgaacacattaattgaacgtaatactactattccaacttccaaatcacaagtttattctacagcagctgacaatcaaccagcagtagtgtaatgctgcagctttaacgaaacaacgtttttgagctttattaatatcaaatgttgtcgcgctaccctttgctaaagatttgtttctaaaatccaatactggaagccattctgtttcagtttgtccttttacagttactgacacttgtacgaagtaaccctctggagtagctaaataaggtacaaaatagttatctagtggcacatcagggtgtacaaattcatgtgttttaatactgtagttgctgtctatcttctttaattcttgatgagcgtatgaccatgctaggtaggttaatccatttttcttttctacatgatcgttaacatctttttgatttaactgattaaatagtgtttcttcagtcatactcaacctcctcatattcagttgtttctgttactttctttttaattgctctgtgcttagtcatgtcgatactcacatcttctagtcctgcaaattctcttgctctccgtctatctcttgaataagaagtatcttcttcgttgttaggtttattagtgatatacaggtcgaaaggagcgtctttcagtttaattagatatgtcactgtttctttcatcaatcaaacactcccctgcaatgacttcttttgctagttcaaatttttgttgtaattcttcatctgtgaaaaattcgtagaaattcagatgattacaattactttcatatttttgagaatagtgccaaaaggtaataccaacttctccattatcaaaagtatgaaattctgctttcactttttcatcactatgcaaaatcaatttatttatttaaatcattggccgtttttaataatttgtgtctcaacttgactacctccgtatattttgattaaattaagttgtatattttgattagattctgactgttacttgttggcgcaagtttcagtcttttttgttatctcaagccacttttcccagaagaatgtgctaaagataagtgttaacattgaaaatgctattaccgtaaagaaaccacctcctaaaagtaatgtgatgatcattgcgataaacatcgtcatgtaacttaatagatatttcatttatcattctctcctttcatttctaaaagtttttcgatatatcctctttcttcagtaaaactcctctaaagtgacgtttctgacaccattaaattttgttctataaagtcaattgccggtctaatcttgatgtagcgtttatgattcttgccaaatctgtacatacatttctcttggaactctttattgctataaacgtgcttttctaaatcgtttttagaaattccacttattttcacaaactcgatagcgtccgcaaatccaatgtattccattgctatcactccttatacttcgttttcaaagtccatttctaattgtttgatgacatacattgttgattgagatggaaaccaatttgtgatcatattcattacgtcatcgaaatgtttttgttttaattgtgttcttgttttaataccagccatcgtatttacgttactgttaatatctctatataaaggtttgttaacttctttattattaggtagtccgtgaatttgtctgatataagcaacgcgttgatgaactgtttttgttatcaatccgtattctcctgcatctagcttttgattttctttgatatcaataacatctgctttaacagttgctatttcttctttggtttgtttttgtgcgtcgaacataagttgcaatgcgtccattggattatcaggaacttgataagtacctgttttacgaatggaaggtaaaacatcttcggttacccaacgtttaaaacgtttagctttctttctaatactttcgtttttactttgtttagcagcgtcaaagattaagctgtataaaccagattcgttgatgattaccatgtttcgtttttgacctgatgcactaacttggtgcgtcagcttatcttcatcatcaacatgatttctaattgcattatcagatcttgtgtaacctaatatttctgccacgtctttacctaaaaaatatggttctccatctacttctatttttcttactggtaaatcttcaaaattaaatacttgtaaatcttgcatattgttta

SEQ ID NO: 4280 - DNA, 3543 bp, Artificial Sequence
  Description of Artificial Sequence: synthetic nucleic acid sequence
aaatgaatatgattggcatcatagttaaaatatttatgttgtttaaaatactctattgtatctttatgattaatgtcacttgtcataatataccaattaattgtgtggccggtttcttcttttaaacgaatcagttgacgcgcctgaagttcaaataaactcgtaccctctatttcaaaagaacctttaggccctttatatcctaaacgcgtaccttgtcctccagccatcaataatacagcaaattcaccatttcgtattgcctcataacctttttgttcatatgtatgtcgttcttcttcattgagtcgtgatttcacttcatatttgacttcagatacagaagatacatcatcaatagtttttctattaacatataaatcttgatataaatcttgaatttctgcaagatttaactgatctactttttcatctaaagcattcttttcattactactcattaatttttcatattcatacaaatgctcttggttatacttttccaattgatttttgtctaacatgataacgctccttatgtatacgtaattttaattgttatttttctcataataatcttatttgattaaccaatagtgcatcatagtatttaaatatggttgaaataaagtatatatcgcaccaacacttaatgcagtagctagagatacatctactagtcccccagttttaaaatgaatgggtgatacgatattaaatggtaaaggatataatagtttaacacctcttggggttaatatatcaagtataacatgcgaaaacataccaataacaattgcaaccatataatacatcggagtttgtatgaagtacagtaaaaaactaattcctataataaataaaagtgaatgcgtaaatgttctatgaccaaataaaattctgacaaaaaaactagtaagcctaaatcgtcttcctattttactttgtgtatgacatatatctggcaatatacttgaaatgactgaaagtacaatcactgatatagaagtaaatatatctgtatgaaaatattgtgtggttattgcaccgactaaaaagccacatgatgcgtgtgttttacctgtcatgttttgttctcctttataaaaatattttagcatatttcatcctataatgcgaacatactttcgtacttatattttattagtatgacataattttaaaaagtatcacataaatacttgaaaacgattacacaatcatttatgataggtttataaattaattaaaggaagtgttttcaatggcaatgacagttaagaaaaacgataatgaagttcgtattcaatggagagtagcagatatcaaaattccaaataatgaaattaaaaatgttactcaagatcaagatattcatgccgtaccagaagagaatggtaaagaaatctctcgtattggttctactttcggaaaaacaaatcgcgtattaattgataccgatcaacacttatatattatttacactcaaaatgatcaaaaagtatataatgagttaacaaaataaattacagatttatatttttcaacataactttataattagactgtcgacataattcaatacaatgtcgacagttttttaatgtgatatttacaaaattgcaaagctaaatgataaatattatattgaagaaaatagacttggaggtaattagaatgttcgttgttacaaatagaatcactgtaaaaaaaggatatgcaaaacaaatggcgcctaattttactaaaggaggacctattgaatctttaaagggctttgaaggtattgaagtttggcaaattgataaagatgattatagcgaagatatgtatgtaaatagttggtgggaaactgaagaagattttaaaaattgggtgaatagtgatgtatttaaacaagcacataaaaatactggaaaatccgaagattcaccagtcattaaaagcgaaattgttaaatcaaatgttttatcttctttgaacagaagataaattatctaaagggagtgggctagaatacgtatatgatttattgtctaatttttataattataaaaattagaacaagtttgatatatgagaatttttatttcaaccattagtaatttatattactgttgttatgattttcttccccccactctcactaaattaaaaatgagtatatcttttatccgataaataaatgcgctaataaagcaattattggaagcgtaatgatagtacgaattaaaaaaatcataaataatttacttatactaactggaattttagaaccaagaatcacgccgcctacttcagataaatacacaagttgtgagatactcaatgctccaattacaaaacgtgttacatcattttgaaccccttcaataagaattgaaggtaagaacatatcggcaaacccaattaaaattgtttgtgatgcttcatgtgcttctggaatttgtaacaattctagtactggaacaaatggttttcctataatttcaaaaacaggcgtgtagttagcaataatggtagctattgttcctatactcataacaactggtaaaattacaaaccacatatctacaactgttttaaaacctgaaattaaaaattctttaaaccctggcgatttaattccaacttcagttgctaaatcaaaaccatattttaatgctgttttgccttctggtagctgttcattacgagcctcttcacttacttctttagcatattcgtcaggaatatttttaagtggccaaattcttggcataatcattgctgcaattaagcatgaaatgacaactgttaaataaaaatagaaaaattgatcttgcattctaattgtttcggcaatgacaatagcgaacgtaatagatacaacactaaaggttgtggatattactgttgcttctcttctagagtaatatccttcaccatattgtctactagtaattaaaacaccaactgtaccatcacctataaatgaagctagattatcaactgtcgatctaccaggtaaagtaaacaaaggtcgcatgataggtctaaagatgggtccaagtaattctaatagaccatactccattaataaaggtaaaaagattgcagcaaataaaaatactgctacaagagtaggtaataaacttgaaaatactaatccacctgtatcttcagatttaatcatttcaggtccaatatttaaaaatgttaaccaagaaaagaagacagctaatactctcaaaacaagccatcctattttaacgttgaaagcactgctcattaaaccttgaggatttaatttatttttataaattgtagagcataatattgttaaaatacctgatacagttatgatggttacaattaaaattggcatgataccaccaagccaatcttttaataaaccagctaaaaaagctataggaagtgtcgtttgctgctttccatcttgaacgactggtataggaactaaaaataatataatccctaacaatgacatagtgataaatttaattctacctcttactatgtcaacttttttaaatccattca

SEQ ID NO: 4281 - DNA, 3146 bp, Artificial Sequence
  Description of Artificial Sequence: synthetic nucleic acid sequence
atcgtaatctcccagcaaaaataccattattagatcatgtttcatttttaccttttgacggtaaaggtacggacggtaaaaatgcttacaaagaagcaggtgcgaaagaaaactattggtttggtactgatcaacttggacgtgatttatggacacgtacttggaaaggtgctcaaatttcactttatattggtgtagttgctgcattattagatatttgtattggcgttgtatatggagccgtttctggtttctttggaggcagggtagatgatgtgatgcaaaggattttagaaattattgcttctatacccaatttaattgtcgttattttattcgtacttatttttgaaccatcaatttggactattatattagctatgtcaattactggctggctggggatgagtagagtggtacgtggagaatttttaaaattgaaaaatcaagaatttgttttggcatctcaaacattgggtgcttctaaattcaagttaatctttaaacatatattacctaacacattaggagcaattgtcgttacatcaatgtttactgttccaagtgcaatatttttcgaagcatttttaagctttattggaataggggtgcctgcgcctaagacgtcattaggatctcttgtcaatgatgggcgtgcaatgttgttgatacatcctcatgaattatttattccagcaatcattttaagtttattgattttattcttctatctatttagtgatggactacgtgatgcattcgacccaaaaatgcgaaaataaaggaggtaaaagtaatgacagaaacggtattagaagtaaatgatttgcacgtttcctttgatattgctgcaggagaagtgcaagctgtcagaggcgtggattttcatttaaataaaggggaaacgttagccattgttggagaatctggatctggaaaatctgtaacaactaaggcaattacaaaactttttcaaaaggatacaggaagaataaaaaagggagaaatcttatttttaggtgaggacttagctcagaaaagtgaaaaagaactgatacagctaagaggtcgagatatttcaatgatatttcaggatcctatgacttctttaaatccaacaatgcaaatcggaaagcaagtcatggaacctttgattaaacataagaaattaagtaaagcaaaggccaagcaaagagcattggaaattttgaatttagttgggttacctcgtgctgaaaaacgatttaaagcttatccacatcaattttcaggaggacaacgtcagagaatagttattgcaatagcattggcatgtgagcctaaaatattaattgctgatgagcctacaactgctttagatgtgacaatgcaggctcaaattttagatcttatgaaagaactacaaaataagattgaaacttcaattatctttattacgcatgatttaggcgttgtagcaaatattgcggacaaagtagccgtaatgtatgggggacagatggttgaaacaggggatgtgaatgaaatattttatgatcctaaacatccctatacctggggattgctttcttcaatgcctgatttaacaaccagtaatgacacggacttaattgcaattccaggtacaccaccagatttacttcatccaccaattggtgatgctttcgcacgtagaagtcgatatgctttagatattgattttaaagaagaaccaccttggttcaaaatttcacccacacattttgttaaatcttggttattagatgcaagagctccaaaagttacgccaccttcaatggttcaaaaacgattaagaacaatgccaagtaattatgaacaaccacatagagtagagagggtggcttttaatgagtaatgaaaatgtattattacaagttaaaaatttaaaacagtattttaatcaaggtaaacataatgaagttaaagcgattgataatataagttttgatgtttataaaggggaaactttaggcctagtaggagagtctggatgtggtaaatcaacgactggaaaagccattatcaaattaaatgatattactgatggcgcaatcgagtatgatggtaaagatattcatcaaattagaaaacgtaaagagcgattgaagtttaataagaaaattcaaatgatatttcaagatccttatgcatctctaaatcctcggttaaaggtaatggatatcgtagctgaaggaatagatattcacaaacttgctagtagtcagcgtgatcgaaagaaacgtgtatacgaccttttagaaacagttggtttaggtaaagaacacgcgaatcgttacccacatgagttttcaggcggacaaagacaacgtattggtatcgcacgtgcattagctgtagagccagaatttattattgcagatgaaccgatatcagcattagatgtatcgattcaagctcaagtcgttaatcttttattaaagctacaacgtgaacgtgatattactttattgtttattgctcatgatttatcaatggtgaaatatatttccgatagaattgcagtgatgcacttcggtaaaattgtagaaattggaccggctgatgatatttataattatccattacatgattatactaagtcattattaagtgccattccacagcctgatcctgatgttgagagaaatcgtcaacgtgttttatatcatgaagatgcaacgcttaatgaagaacgtcaattaaatgaaattagaccacaacattatgtattttctactcaaaacgaagcagttaaattgaaacaaaagtatggtttgtctgtttaataagttaagaaaggaggaattaaaggatgaaaggttttaaagtcttaattattttattaagtgtatgcataattttatctgcttgtagtaataagcagagtttatattcagaccaggggcaagtttttaggaaggtaatcacacaagatatgactacactagatacagctttaattacagatgctgtttctggtgatatagcagctcaagcttttgaaggattatatactttaaataaagaagacaaagctgaaccagctattgctaaatcttttccaaagaaaagtaatggtggcaaaacacttacgattaatttaagaaaaaatgcaaaatggtccc

SEQ ID NO: 4282 - DNA, 3206 bp, Artificial Sequence
  Description of Artificial Sequence: synthetic nucleic acid sequence
gaattccatatgtactctgaggcatataaatttttgatagctttgtcttcataaatacctctacctgtttcgtcgtaagctagtttagctaaatgcatatgctgatcaacagcagccatgctcatctgatgtacaatgtcattaatctcatgttgtgattttttagatagttcttttagagcttcttgtcctttttctgctaatgaatcaatcatttgtgtgacttcatctttgtttgattcatatgtattttttttagttacagataacatatacaaccactccttagatattgtgaaataattcacaaacattatagtacagctctttccaaattaaaagaaaatacagactattaaagagtcaattgtgatgtttatatgaacacatttttaacctatatatttagtcggggttgaggtgtaagacttgatgcaatgggaacaagacgtatttggtagttaaaaaaatctatttttaaaagaagtaaattttaaaaaaattattgtaagtattcttactaaaaataatgaggggtgttgtaatgaaattatcgtctcacccgactaacgatgttatcagtttataaaataaaaaactgagacaatcatttatgtctcagtagctcatgctttaaaaataaattgataaagaataagtgaaatttatattaattattttgttcagttgcagtaagaagttgtatcgctttgggtaatacttgaatctcaattggtgtttctaaattaatttcgccatcaatatccactttcatactagggtttgttgagagtgtgatgtgcttacctgatatgtgatcaataccttgtgtgatttcgttccaattcatactatcacgtttttttaatatatcattcaatatatttagtgtttgatcattaaatacaaatgtgtttgctcttccatcttgtggcgataaatcggttagcggaatttgtccaccacctatattgggaccgtttgctattaacatcatcgaagtattgccttcttttgtttcaccatcaacagtcaatgagaaatcaaatttaacaggatttaataacgttttaacggttgatccaatatagctgaatttaccgaatatatctttagaaccatcttgaacattctctgcattttgtactattaagccaagtccaacgaaattaagtacatataagtcgttcacttttaacacatcatatgattcagcatgtgatgttaataattgctcactagctgttttaaaattagggtgcagttgaagtgtttttgtaaaatcgttaaaggtaccacctggtattacaccgattggtaaatttaactgatactgcataacgccatttactagttcattaagtgtaccatctccacctaaaataaataaaacgtctacatcagagctataattttcatttttaatagatttacaatatttaataatatcgcctttattttcactgagttgaagagagaggtgtttacacattgaactaagagattttgcaacttctcctatgccattatgtatatctttcaaaccgctatgttcatgatagaaaagaacaccatggttatacggttgtttcataaatatatacctactttcgataaatagtttgtgtaattagattgtttgaactttcctttatgtttgatttacattataaattaaaatttatggtattgaaacttaagtgttctataaagatagatgttccaaataaaataacataaatttaagagtaagaatattaagttggtaaaaatttatgtagacatataatattatttttaatatcattttgggatgctataatgttgcgcaacgatgctgtctgaattcagtacctggaatttttttacaatatcattcacatattgtgacatatcatgtgtggagataattactgaagtttccattggtagagtatgtttagtcatatgataatttttatacataagacaccccgttaatttagtttattggtatttattaaattatacgaaagggccttattttttaagtatttcaatgtaaaattacatataaacacaaagtattttggtgagactcttgagggaacaggacaagttgaagactataggctgaagttgtccgctaagaaaccaagccaacaatacaaagtattataaataaaaagccagtaaatgaatttataaaaaactcatttactggctatttttctaggatttatattctatccacattttagtgtaatgattaacgaatacctttcattgctttagaaatcttaggaataaacgctaatataattaacgtaatcacggttgcaacaacacctaagaagataaagtaattggtttgaccaagtggtttaattaatttaactaatgtaccgttaatggcctgagctgaagcgttagttaataaccaaaggctcatcatttgtgcgttaaatgccttaggtgctaatttaactgctgcactactaccagttggagagagacaaagctcaccaataacacagataacgtatgaaagaataacccagttaactgagaattgtgtatccccataaatatgaccgattgctcccataagtatgtaggatgcgcctgctaaaatagtaccaattgcaaacttaataggtaggctaggttgtttctttcctagcttttgccataaaagagtaaccacgggtgcaaataataaaataaataatgggttaatggtttggaaaatagcttcaccaaaatgtgttttccaaccaaataaatttaatttcatatcagagttttcaataccatagatatttaatacattagatccttgttcttgaattgaccaaaataacatgcctaaaatgaataacggaataaatgcttttactcttgatctttcagtatcagtaacttctttacttctaatcattgttgtaaagtaaatgattggtaaagcaatacctaaaattaaaacagtattactgattaaattaaatgatagcgtatgcgtaaagtaagcaatcataaggattaatactattgctataacaacgattccgatgattgttccgtactttttcttttcagaagaagataatgggtttgtcggtttcataccgatactacccaaagtttttcggttaaatagtaagtaccaaactaatccaagagccatccctattgctgcaatcaagaagccgccatggaaatttcta

SEQ ID NO: 4283 - DNA, 3332 bp, Artificial Sequence
  Description of Artificial Sequence: synthetic nucleic acid sequence
aaaggacaattttacctgcctgtaaagatgggataatcttttcaacaaggtgttcacgtctagatgcagcgaacagcatagcttcagttcgaatgtctatactatctccatcaagtacaatacgacgtatttcttcactagttaatactccaccaggttcacgtgttgtaacaatatcatattctttagctaatctttcgcttacttttttaattactgaggtctttcctgctccttctggaccttcaaacgttataaatgtagacatttcttattcatccttaactaatatttttttatgatttaaaccttcaactttaatattttgtttatcatatttatttaataagtctatcatatgagacgtcacgacttctcctttaaacatcaccggtatacctggagggtatggaacgatatgttgtgctaaaactttaccttctgcccttttaatagacacttctttcgtattttgaaaatgaacagttttgtattcgctaaaacccgtcataaaattaagaggttttatgtcgcgcgtacatttttttggcacgttaatttctctaattttttcaatcaacaacttaaaaggaaatttatctccttcatgccatagggggagaacgagtaacacttgatacatatcagctaattctacataaatttctttatcctcaaaccatttttgcacatcataaccttcaacaccctcaaaactcacaaccaattttaaaggatcctctggttctataactgtaaatcccatatttactaataaatcaattaacatctttcttcgttggtcaaataatgtagaatcatattctttataaaatttattcgctaattctaaactagacataatgaggtacgaaggacttgacgtttggaaataagttaaataatctatgacttgttgtcttaatggtgcatctttatgtatatatataactgatcccattgttagtgcagggagtgttttgtgatatgactgcacaacgtaatcagcattaaaattcattgaggattctggaaatccatataaaccaaaatgtgcaccatgcgcttcatctactaatatcggtatccctctgtgatgtaattgtttgatatattgagaaatatcaaaagtttcaccgtaataattagggtatgtacagatggcaagtttataatattgatttttatcttgatttatctttggatttacatattgattcgttttcttactgacatctgtcttagttattgtcgcttgttgttgtgttatgtctaaaccgtgaaatactgatttatgaacatttctactaattaaatatttaccttttcttgtcgaaaacgcttggataaccgataatatacctgaagtcgttccgttaactaataagaaagcatcatagtttttatgtttcctaaaattctccatgctttctaaaataattccttcaggataatgcatatcatctaatccagtaatttctgtcatatccattgctaaatcaagcctatttaagtagccgattgtcatgtttttatgtccaggaacatgcatagagatagcttttttctctatcaagtgatttaatttttgaattattggtcttttcatattaataactctctctaaatttaatttttcatcttatatgagacaaatcatcatcattcttattaacccaattcctttttaacaagcccattacatagcaatctctatattctccccttgtatagaagtgttcctttaacgttccttctatttcgaaattattactttgatagatatgtactgctttctcattcttaatatccacatataagtataccttattcatatttaatactaaaaaagcatagtcaatagccattttaaaggcttttttcgcgtacccattatttgcatactgcggatcgataataattaacacttcacaagttctatgtataaagttaatttctaataactctaccacgcctacagatgttgatccctcttcaacaatgaaacgtcgctctgtttcatctaaaatatgctttgtatataaattttctaattcgcttaatgattgataaggctcttcaaaccaatacgacataatggaatactcattattcaaatgatgtataaatgataaatctgtcttctccaatgccctaataatcaaagtcatccctctttcttaatttcttgttatttattactagtgtattagaaaacacaaattttctctaatacttaactaacttcttaatcattgtcatttcaacttacttagatgttcgatttaaaattgctttattaaaaagaaaattttcccaaacctaattattgtaattatttaatataaaaaagagacctttcggtctcgtactttgtctggtaacatcttattctatcgaaacgttagtccaactaccatcatcggatgctaagaagtttccttcactcaagacaagcgctaggctctcactttatatatagtgttcattaactcgtttagattatctaaattcattgtctctctcatttattcataagttcctaatactttctcctcgccgagaaacctattttttagaactatttttgtataaaaaaaagagacctttcggtctcgattaggctcatcgcatcttatacgatatttgcctggcaacgtcctactctagcggaacgtcagtccgactaccatcggcgctaaggagcttaacttctgtgttcggcatgggaacaggtgtgacctccttgccattgtcaccagacaaatgaatgattatacattcaaaactagatagtaagtaagattttgcgtcgcaaaacgttttttaaaaattgattaagtcttcgatcgattagtattcgtcagctccacgtgtcaccacgcttccacctcgaacctattaacctcgtcatcttcgagggatcttataaccgaagttgggaaatctcatcttgaggggggcttcatgcttagatgctttcagcacttatcccgtccatacatagctacccagctatgccgttggcacgacaactggtacaccagaggtatgtccatcccggtcctctcgtactaaggacagctcctctcaaatttcctacgcccacgacggatagggaccgaactgtctcacgacgttctgaacccagctcgcgtaccgctttaatgggcgaacagcccaacccttgggaccgactacagccccaggatgcgatgagccgacatcgaggtgccaaacctccccgtcgatgtgaactcttgggggagataagcctgttatccccggggtagcttttatccgttgagcgatggcccttccatgcggaacca

SEQ ID NO: 4284 - DNA, 3018 bp, Artificial Sequence
  Description of Artificial Sequence: synthetic nucleic acid sequence
tcgacgccttcaattgaaaaacgtttagccccaacaaaatttttgtgcaaatatttttcaaaaccttctacgtgtgcgagttttttgaaaagttcttttttttgattatcgtttaaacttgctttataaggcgtttcaattcttctttttaaccacacacgttctttattattattaatgtgagtgtattcaaaagctatcggtcctttgtaacgtctttccatacgaacaattgcatcataggcattgtcataaatgtctttaaaatgttcagagacaattccagatgatattttttccaaagtttctttatctaaatcaaaatcttcgatttccaatttaggaacattttgacgctctggaggatttactggataaatatctgcttttaaatgtccgtattgacgaatattatcgattaagcgcataacacgtttaattgtgctatctcccgcttgtgaaccacccccatcagtggtaggtttagcttcgatatgagcttcacctgttttaattgtactgaacaagacttgtaaatcttcaggtacggatgatggattttgtagataatcatcatacaaatctagcataaggccaagatttgcgccgaagtttacaggagcctctgtaaattctttcttgttcttagtcatttaacaccctccacaaaaatgatgaaacgcttacatggttatcatagcattatttcatatattgttaaagtacatttacctattattatacaaaataggagcaagacagaatttactccaaattcatagtctcgctcccgtataattgctatctccgtctatcaagtttagctcgtcgattctatagtaagagaacctttgtgaagaaggtctcctctcattagtatgacatgatatagctattcaagtcagcatcttagtgtagtgactggaatctttatttataatgataggtgtcaatggatttaatcatttatagtactagtttaaggattgttaatatttaagccctgtaataatttatttgtaacttgtttaatcgtaatcattcgttacttaaaaaatactattcatttagtttagtactggaaaactgattttgaaagtcgtgtacttttgtagttcactttctacttgaatcataccaccgttaagttgcacaattttttctgctattgatagtcctaatccattgcctccttgactacgagcacgtgatttatctacacgataaaatctatcaaagataaattctaagtcagcttttggtatacccataccatgatcagtaatatcaatcataatcattttattttttagttgagtaacaattttaatgtgcttatgttcagtgtcgtatttcattgcattatcaataaatatgagtaagagttgttcaaactgatgacggttaatttttaattggataggcttagtagcaagatgtgtttcaaaagtataatctggatgtaggtgttgcagtgacttcacacgtgattgaatctcgctatttacgtctacattttcacattccaaaacattatgattgactctatctttggtaagtaaaagtagttcttcgacaagttttgttattcgattcacttcttcaattgaaatattcaaagattcttccaaaactgctggatcttttttcccccaacgttggattaaatttagatgaccttgaataatctgcagtggcgttcttaattcgtgtgaagcatcctcgacaaattgacgttgctgattaaaagattcttctatttgatacatcatttcattaaaagtatcaattaaattatctgtttcttcataatttgtagttaattcaagtttattttgaaaaccatctcttctaatttgattcattttattggacattgtaactatcggtttagtaatttgcgaagaaaagatataactcacgccggcagtaataatggttgcaattaatccaaaagcaagtgcaacgatataaagtgatttaacgagattatcataattttgaagagaatggactaatacactgtatccagaaaaatctttcgaacgtataggttcagttattactaagtaattaataccgtggcttctttgaatatgtatacgttcaggatgtttgaaatcaattttgttatcataagcaagtgtattatcatttgatgtttgaattaactttctaccgttatcatcatagatcagtatttcttgaaaattttctaaggatgcatttaaatccaatgcagatatatcacttaaagatttagaatggaacagattggcgatatcatttgaacttctttcagcttcgtcaatttcactacttcgtaaagtatcttttaaaaagaaaataataattaagcagaaaagtaatattgtcgtgaaggtaatgagcgtcgtaataagcatccatttatattttaatttttggcgcttaatcatcgaatcacataccctacgccacgtactgtttctatggatttttctttattaaaaggtttgagtttattacgtaaataacgaatgtaaacatcaacgacattcgtttctacttcactattatacccccatacgtgatcgagaatttgttcacgctgcatgacgtggttacgattttcagctaaaacatataataaatcgtattctgttttagttaattctaattgatggccattaacagtaactttaaaggcatctttatcaatgataataccattgatatctaaaacatctttatctggctgtctgcgcaataccgctcttattcttgcgagcaattcttctatatcaaagggttttacaatgtagtcatctgccccatagtccaacccagctactttatcatatgtctcgctttttgcagtaatgatgataattggagtagttgttttttgacgaatttgtctacaaatttctagaccatttatgtttggaagcattaagtctaaaatatataaatcatagggcttagataatgctttatccaaacccacctttccatcattctctatatcaacagtat

SEQ ID NO: 4285 - DNA, 4321 bp, Artificial Sequence
  Description of Artificial Sequence: synthetic nucleic acid sequence
atcctagcatcacttgcggtcatggcaattaacgatattattttaacagaatgatgataaaaatcttttttaaacttttttgtaagttcgtaaggtaaatctggaataattaaaccataaacaccagcttcatcacacttatccaaaaataattcttctccataagcacttagaatattataataagtcattaatacatacttagatgaaatagtatttttattttttattaattcatcaaaaatgaatttaatgtttgaaccctcgtcaatagcgttgcgccctgctttcatgattataggtccatctgcaacaggatcagaaaatggcacaccaatttcaacaatgtctgctccattctcagttaatgtttttaaatgatgaataaaatttaaatcacccataatatacggaatgaataatttactcattttgttcaccaccgttttctttgtattgtttaattgtttccatatctttatctccacgacctgaaatagtcacaacaataatttctttttcatccatatttggcgctaatttttcaacataactcaatgcatgtgcactttcaattgctggaatgataccttcaacttttgagaatgttataagtgcttccatagcttcattatctgtagcacttacatatgatacacgaccaatatcattataatacgaatgttcaggtccaatacctggataatctagtcccgctgatatagagtgtgccaattcaatttgtccatcatcattttgaataaggtacattttggaaccatgtaatacacctggtttacctttccctatagctaaagcatgattatgcgtatgacttccttttcccgcagcttctaccccatataatttaacatcatcttgtataaatggatagaacgtacctattgaattggatcctccaccaacacacgcgactaacgcatctggaagtcgtccttctttacttaaaatttggcttttaatttcattaccaatcacactctgaaaatctctgaccatagttggaaacggatcaggtcccaacgctgagcctaataaataatgtgtatcctcgacatgattcacccaatattgcaaagctttatttacagcatctgatagtgttccttgcccatctgacacagacactactttagctcctagcaattccattctaaatacgttaagttgttgacgtttgatatcttcacttcccatgaaaacaataagatccatatcgaataaagcagcgatggtggcacttgctacaccatgttgaccagcacctgtttcggctactaatttagttttccccatccttttagctaatagtgcctgtcctatcgcgttattaattttatgagcaccagtgtgatttaagtcttctcttttaagatatattttggcaccacctaacaattttgtgtatgattcagcaaatgttaaaggcgtttctctaccaacatattcacttaaataataattaaattctttcttgaagtgagtatctgatttcgcgtcctcatatgcttttttaagttcaataatagctggcatcaatgtttcaggtacatattggccaccatattcaccgaaaaagcccaattcatctacttctgtttgaattttcattaatcattcgtctcctttcaaaaattttaatattcgagtcatcttattaaaatctttttcattatgtgactcaatgccagttgagatgtcataaccacattgtccaaatgaatatatttctaatcgttttatcttttcaaaatccaaaccacccgcaatgagaaaatcaacgccctttattttttttaataatttccagtcaaaactttgacctgtccctccgtatgtgattgatggtgtatctataataaacatgtctatctcatctttatacttttgaatgttattatttaaatttcttgttgctggaattgcttttatgattcttatttttgaattaagtttcttaatatttctaattaattgaatgctttcatttccatgtaattggattgtgttaatatcagtttgattaattattctctttatggtggacatttgaggatttactacgaccactactttctctatatgatctggcactattttagccaaatattttaattgtttcagtgagacatgtctcttactatcgggataatgtataaaccctactgcatcaacttctaattttttaattttcttaatatcactttcggttttaaaaccacaaaatttaactatcatagagattcttctttaactttaaactaggcaaaaactgacttaagtcatttgttttcattaatgcctcccctacaagtaaaccgtcaatacttgaatctactattttctcaacatcttcttttgtatgaatgccactctctgaaatgtagcagcaattagactttttaaacttaagtaatttatttgtatgtagaacatcggtttcaaatcgttttaaatcacgattattaacaccaataattttagggttaatttggtgtgcacgttcaagttctctaattgtatgaacttctactagagcttctaaattatggtttgttgcatatgaatacaattcttttaattggtcatcacttaaaatatttactattaataaaataatagatgcaccagcttgtccatactgacgataatgcaataaatgtagatgtattaccaccacaacaagctgacggtaaagcgactaatccagaacaattatttgctgcaggttacgcttcatgctttaatggtgcatttgatttaattttaaaacaaaataaagtgcgcgatgctgaacctgaagtaacgttaacggtacgcttggaagacgatccagatgccgaaagcccaaaacttagcgttgatattcatgcaaaagttaaaaatgttttatcacaagaagatgctgaaaaatatttacaagatgcgcacgacttttgtccgtattcaaaagctacacgtggcaatatcgatgtaaacttaaatgttgaagtagtagaataacattttatcgattaattatattctccacccacaatttgtgttatcaaattgtgggtggttttttgaggctgggacaaaaaggttcaagataagtaaaaaagacaatttctattgaaaaaatatagaaattgtcttttttataatttttttgattattttcagctcgttgagctgttacttttcttatattaagccacaatgatgtctgaattcatcgaattcagtatcgggaattgtttctacaatatcatttacatgtcgtgaaatatcatttgtggggataagaactgaagtttccattggcagagtatgttgagtcaagttatattctttatacataaggcacctcgttaatttagtttattgatatttattacattatacgaaagggctttattttttaaaagtattttggcgagactcttgagggaacaggacaagctgaagactacaggctgaagctgtcccctaagaaagcgagccaacaatacgaagtaaaatacaacttgaatcgacacatcttgtagagtacatggatgataaatatccgttttatcttgacccaatgcctaatctatatttcacacgtgatcctcaagcttcaattggtagaggtatgacagtaaatcgtatgttttggagagcgagacgcagagaatcgattttcatttcatatattttaaaacatcatcctagatttaaagatgagaatattcctttatgggtggatcgtgactgtccgttcaacatcgaaggtggagacgaactggtgttatctaaagatgtacttgcaatagggatatctgaacgtacttctgcacaagcaattgaacgtttagcacgacgtatttttaaagatccgttatctacttttaaaaaggtggtggcgattgagattccaactagtcgaacatttatgcacttagatactgtttgtacaatgattgattacgacaaattcactacacattcagcaattcttaaatcagaaggaaacatgaatatctttattatcgaatatgatgataaagctgaagatatcaaaatccaacattctagtcatcttaaacaaacattagaagaagtgctcgatgttgatgaaatcacattaataccaactggaaatggtgatatcatcgacggtgctcgtgaacaatggaatgatggttcgaatactttatgcatacgtcccggtgtggttgtaacttatgatcgtaattatgtttctaatcaattgttacgtgagcatggtatcaaagttattgaaattcctggaagtgaacttgtacgtggtcga

SEQ ID NO: 4286 - DNA, 2978 bp, Artificial Sequence
  Description of Artificial Sequence: synthetic nucleic acid sequence
ggtgttggtgaagcgccaatgtatccatccaatgcagtttttaactctttttggttcgctaaaaatgaaaaaggtcgtgcatctagtgcgttgttagcaggatcttattttggtccagttttagcacctatcatcacgatagccattgtcaatgcttttaactggcaagccgttttctatattttcggggttgtaggaattttaatggcagttctttgggcaattattgctaaagacttaccagaacaacataaaatggtaaacgatgccgagaaaagatttattactcaaaatcgtgatattgtcgcaactgagaaatctttaccaccgtggaaacgttttttaagtcatttcagtttctacgcaatcgcattgcaatactttgtagttcagtttgttatcgcgttgttcctaatatggttaccaacatatttaactgaacaatatcatgtgaatttcaaagaaatgactatcagtgcattaccttggttatttatgttcttcttaattttatttgctggagctatttcagacaagattttgaatacaggtcaatcacgttttgttgcacgtggcgtaattgcgattgcgggatttgtggtattctcaatttcaattttcttagcagtacatacagacaacttatatgtaaccattttctggttatcactttgtttaggtggcgtaggtatttctatgggaatgagttgggctgcagccactgacttaggtcgtaatttctctggaactgtgtcaggttggatgaacttatggggaaatgttggcgcacttattagtcctttacttgcaggaattgttgtagatcatttaggatggtcaatgacattacaactcttaatcgttccggctattatagcagcaattctatggttcttcgttaaaccagacaaacctcttattgttagtgaagaacacgttaataaataatatttttcaaacacatgcaatgacattcatatcattgcgtgtgtttattcttttattatgtggtatagaacatggaagcgataagcgaattgttttttttatcagttataaactgctaaacttataattaatatgtataggagttgactaaaatgattataattaatgctaaattaaaaatcgatgctaataaacgcgaggattatctaaaacttatgaaagaattagtcataaattctagaaaagaagacggtaatttattctatcatcattacgaagatgtaactgagaaaaatgtctttgtcgtagttgaaaactataaagacgaacaagcggttcaagcacacaatcaatcagatcactttaaagtttttagtgataatattagtcaatatttaattgaagaacctcaaattgatgtaagtcaacctattcaattataatcacaatctgtacttactctaaagtgacaatgtgataaaataataattaaatatcataattctcaacaatgttgatgaagggcagaacaataaatgtatgaagtatatgttctgtccttttttaattgaatttgtgggatgttagagaaaggaagattgggatgcaacaaatcattaactctttgatacacttcgaccgttcaaaaattgatatagctaaaggaatacgacaaggatttttaatgatactaccagcattgataggttacttattaggattccctatgtttggtattctaatatcaacaggtacgctagcacatgtctacgtttttagtggatcaccacaatctatgttaaaaacagtcatcacctgttcactatcatttactatttgcatgattcttggcactttaacagtatctcagcctattttatttggattactattactgattgttgttacaatcccatattatacgtttaatgcactaaaaatcgctggtccatcatcgacattctttttagtaacgttttgcttatctataaacttaccgatagccccagaagaagcgcttttacgtggatctgcaattctcattggtggtatattggctaccataacagtaattttaacaatcatatttgctaaagagaaagcagaagacagagcaattcatgcggattttaaaacattacataacttgctacatcattttgatgagccagaggatttcaaagcatatgctcgaaacgctgttacagaatttagaaattctgaaaaacttttaattacctcaacatcaggtggtaatggaaaattaagtaaaaggtttcagaaattaattttattacacacatcagcacaagggatatattcagaattactagaactcaatgaaaatcatattcgtccattaccaagtgacttagttgaaatgatggatcatatcattaatagtgttcaacaacctaaacaacaatatcgaccgtggtcaaaagttgttgatgtggcaccagaatttcaaaatttaatggatcatattttgaaaatagatgaaatgattcacgcaaacgataatcaaattaaatatgaagcagatattcgcaagcctttatatagtaagcgaatatatcaaaatctaactttcgactcaattgtatttagaaatgctttgcaatatacagttattatggcagtagctatatttattgctctagcgtttaacattcaaaaagcgtattgggtgccattgtcagcgcataccatcatgttaggtaatgtgacaacgattcgtacgttagacaggtcacttgctagaggtattggaacgataatcgggactattgttttgtcgggaatcttggcatttcatatcgatcctattttcgctattatcattatgggattttctgccatgatgacggaagcgtttgtggcatctaactatgcatttgcagtcatttttattacgacacaagtcattatgctcaatggtctagcctctcaaaatttaaatattgagatagcgtacacccgaattattgacgttctgataggtatagctattgcagttattggtatat

SEQ ID NO: 4287 - DNA, 4036 bp, Artificial Sequence
  Description of Artificial Sequence: synthetic nucleic acid sequence
acaacagagttaagaaaattaagctccatgtaagtggatttaaaactttaaatacatcccaatattgtaatacattggaagcaacaatgatatctacacttgttacaagtgaccacataccccaatacaaccaacccattgtaaaaccaagtgacgaatcaacaaatctggtagagtatgaactaaaagaaccagaaaccggatagaaagttgctaattctcctattgatgacattaaaaaataaagcataataccaattagtatataagctaatatagctcctcctgggccagcttgagaaatgacacttccagttgccacaaaaagtccagtacctatagcgccacctattgctatcatggatatatgtctcgaattgagaccacgtttcatattattatcttccatatgccgtctcccatctatcttaaaatatatccctcattttaatctttttaaagatactattcaataactttttagtactttaaagcgtaattgttaaatttttctgatatttcttatatttttctatcaataactttaaaataagtttatttgctatcggaaaagggtttaattaaaatagatactacatagtaatcaatattaaatataaaagtgagggggagcttgctatgtcaaaacaggatggaaaattaactggactttttggtgcgccagtttcggatagagaaaatagtttaatatattaaacaaacaatgcctggaacacaaaataatgttccaggcattgttaatgtataagcaactgttgactaaaataatctctgtttcagtcactgcctattctttttatattaactaagtttattaatatcaattaacgtaatttttgtacttgatgtttttgcattgaatcttttttgtttttacgagtaggatctaaacgtttttctagataacgtaatcctatatctatgataattgctattaaagcaattggtatggcacctgctaagatgaatgttgttccatctgttgaatttgtaccacgaataataatatcacctagtgttggagcaccgataaatgacccaatcgctactattccgatagcaacaacaagtgcaattctaacaccaccaataataacagataaagataatggtaactctatcattcttaatatttgattccccgtcattcccatacctttaccagcgtctttaatattttcatcaacttctacaataccagtataagtatttttaataataggtaataacgaatataggaatacagttacaacaacagttgttggtcctaatcccatagccaacataagtatggctaacatagcgattgctggaacagtttgtataatatttgcaattgtaattaccggccacgataaacgtttatacttggctatgaaaataccaataggaattccaattatacatgcaaacaacacaccatataccgacattaatagatgtttgaagaacagttctagaagaaaggcccagttcagtgagtaatattcgatgattgaatgtaacaaattacctttcattacttatgaccacctttcttttcttcaaagtaatgatgtttctttaaatattcttcagctatcactgcaggttccttaccttttccatccgcttcataatttaacttctgcatttcttctgttgagattttaccttctaatttttttagtgccttatcgatttctggattatcctttattaattgttcatttgcaagtggactaccgtcataaggcgggaagaatttgcgatcatcttccaatattttcaaatcataagctgcaatacgtccatctgttgaatacccaactgctacatctaatttattattttttaatgcatcatatactaaaccaatttgcattggacgtgcactatcaaatttaaatccataatctttaacaaaagctggatatccatcacctgcacggttcatccattgggtatccattccaagacgtagttcatctttatatttctctaaatctgatactttttctaagtgatactttttagccgtttcttttgtcaccatgaatgcgtatgtattcgcaaacccaagtgaatgataatacttttcatcatatttctttttaaataagcgttgtgtttcagacatggccttatcaggatctttagtaggtttagctgctaatacactcgtcaattcagtacctgtgtaacgtaccgctgacatatttgcatcaccacgttgtaacgcattatgttgaataatgctagaacctaggttcccaatcaacgtcggtttgatttttccatcagtttcatgttcaattaataatttttccatatgacctataatcttagtttcacttgtttcagtcgttgtgattttcacatcatcttttgcatttccatcacctaaacctggtaaactgcatccagataacacgatgagagacaatgcaatcagaatcagtgtatagttaagatacttcttcaatgtcaattcctcccatttatctagatacttttaatcctttaggtacaacccatttttcaactaatgaaagtataaagtcaataactaatgctaataaagtaacaacaatcgctgcactaataatcataggtggttgatagagatttaatccattaaatacaagatccccaagtccacctgcacctacataacttgcgagtgttgcccaactaatgacgtatacacttgatagacgaataccactaataataagtggtaaagctaaaggcatttctacatctttcattaattgaaatttagtcattcccatactttgaccagcttgaatgacatttttatcgatatttttaacacctaatactgtattatttaaaattggtaataatacatagataaataatgcaacaatagctggtgtttttcctaccccaaatattggaatcatgatagctagcacagccaaagtaggaatggtttgaagcacgccagcaactgttaataccacattagctgtgcgttgcgtttttgataataaaatacctaaagggacagctccacctaaaacacgagcagtatctttggtagactcttttttacccatttgagaacctgttggcccaaggtatgttacatgtgcaccttgatcataagccgctgtttcaaatgcacatcgagtgcgtgttgaatctttttcaaaaagtagagcgatatttttacctttcattttttgttgttctattcctgcatattttgcgcgtttaagatcttcagataaattaagtaaaaattccatttctttttgtgtgaagtctaacaaagttaaaaagtttctatttcttaaatttttcattttgaatatctccttttcaattaatattttattcatgttatttttttataatccaatttcttttatcttgatatataatattttctatttttaattctctgattatttcaccagtagtttttctgttaagtccagataaattacttattaattgaacagtcataatttgttttaattcatagaattctccattatcatccccaattgaaaggcataaaatttgtagtattctttcaattctttctttagctgaattagctcttaacgccataatatattctacttgaaattgaatagtctcattaagtttcttgaagagactttcaaatatttcattatgctttctacataaatactcaagtaaatctttcggtaaagttaatattttacaatctgtcaaagctgtacatatttcatatggtgcaggggtttcattaaatatgaagttcattggaaatatattttcgtctttacttaatcttaaataattgtcaccagtaatattagaagattcatgtaaaatacaaccatttactaaaaagtatacaaattttatttgatcagttgaatgatatatgacttgtccttttttatattgataaagtgttaaatcctctttataaggtctaacaatactaacaggaatatttaagtatgatgctaattgtttaagattattatcaaattcatattctgaattt

SEQ ID NO: 4288 - DNA, 3254 bp, Artificial Sequence
  Description of Artificial Sequence: synthetic nucleic acid sequence
tgaaccaaaacgtaccattaattcatcttgtaaagataggtaaaaacgactatctcctctatcaccttggcgtcctgaacgtccacgtaattgatcatcaatacgtcttgattcatgacgctcagtaccaataacagcaagtccacctaactcttcaacaccatcaccaagtttaatatctgttccacgtccagccatatttgtggcaattgtaactgcacctttttgccccgcgtttgaaacgatttcagcttcgcgttcatgatttttagcgtttaatacgtcatgtctgacaccacgtttttttagtaaatttgaaatatattcagaagtctcaacagcaacagtacctagtaagacgggttgtccttttttatgtttttctacaacatcttcaactaccgcatcaaactttcctttttgactaatataaattaagtctgaattatctttacgttgaacaggtttgtttgttggaatttgggtaactgtcatattatagatattacgaaattcttcctcttcggttttcgctgtaccagtcatccccgctaacttattatacattctgaaatagttttggaaagtaatggatgccatcgttttagactcattttgaattgctacaccttctttagcctcaattgcttggtgtaaaccttcagaaaaacgacgtccaggcattgtacgtccagtaaattggtcaacaattaatacttcaccgtcaacgaccatgtaatcaacatcgcgttgcaaagtaacatgagctcttaaagctgtattaatatgactaatcacttccacattttgaacatcataaagattatctactttgaacatacgttcagctttatctgcaccttgttctgtaagatgtacagctttggttttttcatcataattataatcatcttccgctttaagcatttttgcaaaaacatttgcttgagtatataaagaagtagatttttccgcttcaccagaaataattaaaggtgttcttgcttcgtcgatcaatatggaatcgacctcatcaataattgcaaaatgtagaggacgcattactctctcttcagcatagttcaccatattatctctaagataatcaaacccaagttcattattcgtactataagtgatatcttgtgcgtaagcctcacgtttttcttcagttgacttactatttaagttcaaacctacagttaagccaagatagttatatagttcagccatttcttcactttgtgaacttgatagatattcattgactgtaataacatgtacacctctaccagctaaagcattcaaatacgtcggcatggttgcagtcaatgttttcccttcacctgttctcatttctgcaatatcacctttatgtatagcaataccacccattacttgtactttataaggaatcatattaaatactctctttgacccctcacgtacaagtgcataagcttcaggtaaaattttatctaaataatcattttgtttttttacatcttcaatttctgctaactctttttgaaaagattttgttttttcacgtatttcttcatcggttaatatcgcagtatcttcctctaaagcaagtactttatctgctaacttacctaatcttttaatttcttttttattgccgtcaacaattttcgataaaaatcccattgcacgcgtcgctcctttaactaaaaactgtttggcttacaacaatttatcttatcatttatatcgctaaatttatacttatatactcatgaagtaatgcgtgttaactcaatttttcacaacacttcactttgattcgactggcaacagcctttttctatagacaatcatttatattataaaatgtatataaacatttcaattaacaataattttattttaacacgttgcaatcatttttttctcgcaatcaaacacgtttttaaaaaataacgcaacgcgatacctttaactaatatagaaatttaaaatcaaagtttaaatataaatcgtcaaatcacactagcatatttgtaagcatactgtctattaaatactcatttaattggttaattcaaaatttaagcaaacaaaataagctgagacacttattaagaatacgaactccaaagcttgattaatgtcatatctactttgaagtgaacatatcaaaacaatgccccagcctatgtttattaagttctattttgtagtcaagcaaactaagaatacatatgtgtattagtaaccctgattctattaatcattattaccttattcaataaactgataagaattcttaattcaacttcggcaatattatagtctataatatacaagtcaatttattcagttgtttcaatcagaccgtatttgccatcttttcgtctataaacaatgcttgtgccatcagtttctctatcggtaaaaataaagaaatcatgtcccaataaattcatttgcaatactgcttcttcagaatccattggttttaagctgaattgtttagaacgaataatttcaatatcattttcactttctatatcatctgcatgattgtttgttgtagactcttgtacttcagcaacaaagatatcttgatctccacgatctctatgtttacgatttacacgagttttgtatttacgtacttgtctttccaatttgttagtaattaaatcaatgcctgcatataaatcatcatgtctttcttcagctctaagagtgacatcttttaaaggaattgtaacttcaattttagttgtagaattagaataagttttaactctaacatgtgctacagcatttggcacattgttaaagtatctttctaatttacctactttctcctcaatatagttgcgaattgcatctgtgatagtgaggttatctccatgaatttcaaatctaatcatagtaatctctccttaaacctctatattgatacttcttacctatattttaccatgtttatgttatcgtgcaaacgcaaacactttgaattttctgacttttttatcgtacaatttacaccctgcgtgatgaatagttaaccctgttgtataaatatcatctatgagtagtattactttcccttcgatatttatctcttcatcttttatataaaatggattaggggcttttgaacgttcaatctttcctaactttgactgcttaggacgtatatgtgtacctaatacatcttgatatgagatgcccattttatctaagacagtggtcacaggattaaatgtacgttcaat

SEQ ID NO: 4289 - DNA, 3427 bp, Artificial Sequence
  Description of Artificial Sequence: synthetic nucleic acid sequence
acttccttaattataggcataaataagtctgtttcataatttgttcttacattttgtgagatagacgtcatacgttctaatcccatgccagtatcaatatttttatttggtagtggtgtgtaagtattgtctttattgtgattaaactcactaaacactagattccaaacttctaaatatctttcattttcaccaccaggatacatttcttcagcaggatcatcttttccataagccgatccacgatcatagaaaatttctgtatttggtccagatggtccttccccgatatcccaaaaattgccttctattcgaatgatgcgactttcctctaaaccaatgtcttcatgccaaattctaaaagcttcagtatcttcaggatgaatagtcacatatagcttctcaggttccatgcccatccatttatcacttgttagaaattcccaagcaaattcaatcgcttcatgtttaaagtagtcaccgattgaaaaattacctagcatctcaaaaaaagtatgatggcgagcagtaaaaccgacgttttctatatcgtttgttcgtatagctttttgagaattgacaattcttggttttttaggagtttcgcgtccgtcaaagtattttttcaaggtagctacaccagaattgatccacaataatgaatcatcatcgataggtacaagtggtgcagacggttcaatcatatgtcctttttctacaaagaaattcaaatatttttgcctaatttcactagctttcatttttttcataaataaaaactctccttcatacgtttttgttatcgcagttagatagtcatagttgagtattattcaagaatataaaaacgttcatccacaaagggacgaacgttatcgcggtaccaccctagttataagaattgtgacctatttacatacttgaattttgtttgtctactatttcttatcactttgtatactttatttaactaatatagagtagcattcaataattttgtttgtacttttcaccaaccagtacatctctataattcaaaagttatttactcgtctctatacttacttaatttcatttattttctttttattgatttgtcaacgttcaacgaagtcatatggcgtcatttcccccatattaatcattggatcgatttggaaaattgtcgactcgtttaattggatatcattttctttttcatttttcaaatccagatgattgttattttctttttgttcgttaatcgtttgtttatttgtagttaaattatctttgttttgtccaaaatacgattttaacaaatcatttaattgcgttaatcgtatttgtccatttgtttttaaacctatatcaaatgcttcttgttcaccaagcaaaacaagtgattgtttagctctagttaatcctgtataaagaatgggacgttgtaacatcctataatattgtctaacaataggcataattacaataggaaattctgaaccttgtgatttatggatagatgtacaatatgcatgtgttagttccattaaatcttgtttagtaaatgtaatttcattaccttcaaaatctacaactaacacatccttatttagagcattttctttggcccaaaatatacctactattatacctatatccccattaaatatattatcattaggtcgattaactaactgaagtactttatccccttttctaaacacagcttcaccaaattctatttcacgatcatcttgttgcttcggattaagaatagattgtagaacttggttaagtctcttaataccagcgttacctttatacataggagccaaaacttgtatatcactcatatcatagcctttagctacagcgcttttaactactttatcaacaacgtctggaatttgattcgtaccacaacgaataaaactacgatcatgataacgtttagtaatatcgataggttcatttaatttcatacggtgagctaagtcaataatactggaaccatcttgctgaagtaacgcatatacaactaaggcgataattgccggaagtctcccaattccgaaaattggtatcatcaaaccaagtagtgccagtgatggaattgtttgtagaacagctgcaatattcatgacgatttctgaaagtttttttgttttagtgagcaaaattgcaattggtactgctataagagttgcaatgaaaagcgctataaaagaaagttgaatgtgttcaattatagtagaaaatagctgcccttttctatcacttaatgtcgcaaagaactcattcatgtgtcgcttcctccttattaagagataaataagtaaacacatcttctctatttaacaaatatcgacgatgttgttctttatcgttgaccacaactgcatcataatgagacaaatcttcataaatattatttaagtacaactcagcatctacttcaggataatgaataacgcttgcattgtcatctacagaccgattaattcctaaatctttaatcttcacttgattcacaatattatgcgttgtatccaaatgactacccatgaattgctttacaaagtcacttttaggtcgcgttctaaaactatcaggtgtatcaatttgttcaacacgcccttcattgagtaaacaaattctgtcacctagtttcatcgcttcttgaatatcatgcgttacaaaaactattgttttcttaatttgagtttgcaaatgaatcaaatcgtcctgcaacttctctctgctaattgggtcaagagcactaaaaggctcatccatgataataacgggaggatctgcagctaatgctcgcactacaccaaccctttgtcgttgtccacccgatagttcatcaggttttctatttttaaattgctcaggatttaaacctaccattgtcaataattcatccacacgtaaatcaatatcgttatctttccactttttcatttggggtacttgtgcaatgttttctttgatagtcatatgaggaaataatgcaatttgttgtagtacatatccaatatcccaacgcatttcgtaaactggataatcactaattggtttatctttaaaatatatgtaaccttcgcttaaaggaattaaacgattgatcattttaagtgttgttgtcttaccacaacctgaaggaccaattaacacaaaaaattctccttctttaatattaaaacttacattatctacagcaatattattagcatatcgctttgtgacatttttaaatttaatcactttttcaccttcattccctctacaaaatagtagaccattttaatctatattccctattaaatcatttttaattgaaaattaacatttattgtatttcaaaattcaaattaacaaaaagtattatgaatacttaatatccaacttcatataattaaaaaacgacgaaatcaaaaga

SEQ ID NO: 4290 - DNA, 3044 bp, Artificial Sequence
  Description of Artificial Sequence: synthetic nucleic acid sequence
gttttttctagttaccactaacaagatgccaagaggtatacctattaaagcaccgattacaagtgatacagtcaccatatacaatgtttcgtatagagcttgtaataattgagatgaatctaaacttgaaccaaacatatttatataacctcctcataccgaatatgtcgttttgaaaggtaatcagtaagtttaaaatcattaaatgactcatcatgctcaaatctcaaccacaaataacaaaccgtttcatcttgaatttctgacatagaagaaaataatacgttaacgttaagatgatgctcgttgataagctcgttcaatattggcaattgaatttgttcagagtctaaaaacagtttataatctgtgaaatttgaatcttttctcgagttaaaagaggcccgtaactcttttgaaggctcagtgttaatcaccgtcgaaacgaaattttttgcagtgttcgtttgtggatgactaaagacatctttaactgtccccatttctatcacttcgccattttccatgacagctacacgatgacaaattttttgaattacgctcatttcatgtgtaatcatcataatcgtcacaccaaatgttcgattcacattacttaataaatttaaaattgagcttgtagtagctggatccagagcacttgtcgcttcatcacataataatattttaggatgcgttactaatgctcttgcgatggcaacacgttgtttttgtccacctgataattcatctggaaattgatcttttttatcagcaagccccacaaattctaacatttcgtcaactttttccttaatttctttcttatttgtcttacttaaaataagtggcattgcaacatttttatagactgatttagaattaagcaaattgaaatgttgaaagatcataccgatatcttttttaatatcacgtaaatctttttctttatatgtatcaatctcatgaccatcaacaataacttgaccatctgatactgtctcaagttgattgactaaccgaactaatgtacttttaccagcaccactataaccaataacaccaaaaatatcatgttggtcaatcttaaatgatacatttttcaaagcttgaatagtttctctttttttgcgaaaaactttgttaacatttttgaattcaatcacctaatctctccctccaatttccgattaaaattatctgaatatttgcattatattgaattgatgtcgtaccgtcaacaatcttttttgatttttccaaaattaattaatattctgaaaaataatgttctacaattggttacttatctcaaaaattgtggaaattacgcaactcaatagtaaatataaaacaagagattaagatgcaaaacgtttcatttcatcatcttaatctctaaataagtgatattatctcaaagtatttaaggcttgttctaaatcattaactaagtcttctgtgtcttcaataccaatagataaacgaatgagaccatccgtaataccttccttggctcttacatctgatgggatggacgcatgcgtcataagtgccggtacagaaattagactttcaactgcccctaaactctctgccagtgtaaagtagtttgttgcgtgaatcacttgtttagccgcttctgtatctttaacttcaaaagatactacccctgtatgcccagttgcttgattttgatggatagtatagttcatatgttccttaatactaggatggaatacttgttgaactttagggtgcttttgtaacatttgcacaataccttcaacgtttcggtttatttgctccattcttagacctagcgttttaatacctctgattaataaatagctatcttgaggtccaagtacaccacctgtagaatttgaaataaagcctagacgttctgctaaatcatcatcagcagtagcaacaagaccagctacaacatcactatggcctccaatatattttgtagccgaatgcaatacgatatcaataccaaagtctaaagggttttggtagtaaggtgtcataaatgtattatcgactacagatatcaaatcatatttttttgcaatttttgctgatgctttaatatcagtcacacgcaataatggatttgaaggtgtttctacatataacattttagtttcaggtttaatatattgttcaatgttttcaattttagttgtatcaacaaaatctacgtctataccaaagcgagtaaatactttagttaatgcacgatatgtgccaccataaacatcagaattaagaactaagtgatctcctttatctaataacatgataactgcactaattgctgccattcctgaaccaaaagcaaaaccatgcttaccatgttctaaattagcaataacactttcaagagacgcacgtgtaggatttgcagtacgtgaatattcgtacccttgtcttaaatcaccaatatcatcttgtaaataagtacttgtttgataaataggtgttgtcactgctccagtatagttgtctgtcgtatgtcccccatgtatcatttgcgtttttttattcattattaaaactctccttatagttgaatatttgtttggacatgtatcgatcgcttccatctggaaagatggtaacaatcacaccattttgaatgcttttttttaattccaacgctccttgtaatgccgctcccgaagaactaccaactaacaatccttctttattcgcgacaagtttaacattattaaaagcatctttatcggcaacagtaaaaataccatctactaattctttttctaaaaatgatggccacttttcagaaccaatcccttcagttgcatgaggatgactgacaccaccatttaagacagagccttctggttctacaatataattttttacatcatacgtttttaagtgttgtgcaactcctgtaaacgtaccaccggacccaacacctgccacaaaataatcaatatgtgaaagttcatctgtgagttgtttggcaagtgtttgtgtatatgccccaggattatctttagtttcga

SEQ ID NO: 4291 - DNA, 3554 bp, Artificial Sequence
  Description of Artificial Sequence: synthetic nucleic acid sequence
gaataaggtgttaaactatatttgattgtacgtttggctaatgtggtgacatttgataatcgtacaatttatgattcattacaagataatgaattgtttttaataatcgatttatacaagcaatgatggcagtcttatgaggtttctcattaggctgctttcttagtttgtagtaataatcgacgacatgattgtcataatgatgctgccctcttattatattcataatcacccaaaataaaagttttctcgcttttttattaccacgcttgttgatggtatctctacagtgtgtatgacctgattgatatcgtttgatatcaatgccaacaaaagcattgagttgtttatttgatttaaatcgcttaatatcaccaatctccccaataatcatagctgtgcttagcttaccaataccaggtatcgaatgaatattttcaaaataatcgagttgttgtgctaattgaatcatggcatcatctaattgtttgagatgatgaatagattgttttaattgttgaataagtaagcgtaatttttcgactagaaaggaatgtctatcgacattaggatagctttcttgagcaatcacccttaattgaagtgcatattttgtagctttatccattgacattcccttatctgtagaattgaatatatgtgtaatcagtacctccttgtcgatatcaagaaccatgtctggatgagtaaagatttctgcgatgttgagtgcaatgattgaatatcgactactaaataatctttctaaaccagggaatgtttgatggagtaattcaaggatctgaaatttaagtcgattttgttcattctcgatttctagatgaaaacggacgcgttctcttaattcaaagaatattaactcatgtataggtaagttgtctgtttgtttaagcgtcggtcctaaacaagcaagcttatgagcatctgcctgatcagttttccatgatcttagagcgctcgttttaaatttggcttctaacggattcatttgaatatagttaatttgatttacacaacaaaatcgttccatacttcttgaatagatacctgtagattcaaaaatgagttgtgggtggtctaagtcattcaaatacttgagtaaatagttgtaaccatttttattattttggatgaaaaactctttttggaatttttcatttttataatgtgcaactacactacttcttttactaatatcaacacctaagtaatcgataaaaaaacctcctttgaataattgagaagctaaaaactttacttaacctttctcatttcattttcctatacacggtttcaagaacccaacatactacaaacgaatttcaaaaggcgagagtaaagctgacttgttttttatacggatttaaaatccaagagtctggacagtctacttctctctataactataaaaaatagctatgaaaaaatctatcgtcatagatttcttcatagctaatcttagtatgtttttcattaattatattctgcctctacttctttacgtgttggtatagaagcttgtgctccttttcgttgtaccgttagagacgacgcttgatttgcaagtcgaatagccgattctatattactcaaatctttatttaactcacttaaaaaagcacctataaatgtatctcctgctgctgtcgtatctattgcttttacattacacgcaggaatcattttgtattgttcttgatatgcacaatacgtgccttgctcccctaaagtaattaatactgcagatatacctaaatcgagaaaatatgttgctgtttctttcatatcactttcattattgattgaaatacctgttaataattctgcttccgtttcgtttggaataattatatcagttaactctaaaagtgacttaggcaattcaattgccggtgcaggatttaatacagtagtgatattttgtttacgagcaattttaaatgcttgttctatcgcctcaaatggaacttcaagctgcgctacaacaaagtctgcaccaataaacgcatccgcactcatctcaacatcagttgcacttaatgtcatattcgcaccaccgtaaacaagaatcgtattttgtcctgcttcatcaacagtgataaatgcttgcccagtttcttcactttctgaagttaaaatatattgtgtatgaatacctgcttttttgaaatcttccaatataaagttggcattgccatctttaccaactttactgataaatgttgtatctgctgctaatctactagctgctatggcttgattggctcccttgcccccaccaaactccttttgagcttgattaatatgtaatgtctcaccgggttttggaaaccttttaacattaagaaatttatctacatttgttgatccaattacaatcactttatttttattcatttcaacttcacctactttatctttttaaaagcacaatcacatgactattaagcttaaaaagtcacattagattctaggataatgttagaaaaaggggtgatttcaccagtacgtatatttcctttatttaaaggagattttaacatttctttcatctcagaatgcgcaataaatttaatttctacatcatcattgattaatttcttaattgcttttaattgctgtgcattcgcagttttaatttcttctgctaaatatattttttgtatttccatttcagttaacactgtctccaacacatcaatgaaacatggcaatgacttagtcactgctaaatctatacgtttgtcatcattaggtataggcatacccgcatcattaatcgttaataaatcatagtgacctagtgtggagattgcgcttgaaatgtgactatttaatactgctgttttcttcatcttattcgtcccttcttaatattatttaataaacactgtgattgatgctgcaactaaaataagaactaatcccacaattgtaatcattaattcttttgatgtttttttctgatttaagaaaaaaatgcctgttagcgttgctaatactacagatgtttgagatagaacaaatcctgttgctaaaccattcatattaggttgtgctgaaattaaataagttaaagcagcaaacgcaaagaaaaatccggatattgtttgttgccaacttactttctctttaaaagcattacctttagacatattcatcaacgcatagatgacagccacaatgaccattcctatagcttgaggtaaaaaagctttaaatccaccaatatccgttgcttgaggtgcagcagaatatatccaatagccaatttcacctacaagtaataagatcactgcacttcgtagatttttactatattcttgttgctttgtttcagtccatacagtcatacgtgcacctataaggattacgagtaaagctagaaatccaatgattttgtttgttataccgggccagttgccaagcgcaaaaacgccccataaagatgcaccaagtaattgaaatgcagtagtaattggcatcgctcttgatgaacctactaattcgaacgctttaaaagtaataatttg

SEQ ID NO: 4292 - DNA, 3016 bp, Artificial Sequence
  Description of Artificial Sequence: synthetic nucleic acid sequence
tgtgcagtttaaacgaccaaggcacgtttaacattaagtcagcatttggagaaaacatgaataaatgtctaaaccatatcgcaatggtttgacataatcaaattcaggttgaatcgcattggttacaagcgtagaataacaacccattattaaaataatcaacaaaacgatattcacaaatatatctgaaaatgaacttaatcgtctaacgtttttgatggatagtcgtcttaaagttagcaacaacattcctattaatgttattataccaaaaacactacctatataaactgcacctatatgatagatatgattatttactcctatcgcctctaaccaattagcgggaatcaataatcccacaacatgaccaaagaataccggaataatacctaaatgaaaaagtaaacttccccattttaatcgtttcttttcaatcatttcactcgactttgctgtccatgaaaattgatcatatttatatcttgcgatatgtccaataacaaatattgctaaacataaatatggataaataacccatacaaattgattaagcatgattttccacctctttcaaaggcacgatacacgcttttaacgtttttcttaatgcactgacaacatatgcatagggattattgttttcagctagggtatttgccatttcatacgtaccatcttcaataatcataatgacaagttgaaggttttcctgtgctcgactatcatttttaaaatcagcaacttgcaaaaactgtagcatcaatgggagaaaatcagataattcattatcaaccatttttagtccaaacatttcgtataaaacctttaatttagctagcatttgaccccgttccttttgcgtgtcaaatttattaaatgtcatatagagtgggtgttttttactaaaatcaaatgtatctgtatagatagctttaatttctgacaaagtataattcatcatgacttctctatatgcaagcaaatcttcgtagccggggtgagacttagaaatagtttcttcaaatatttttggatgaaatgtcattttttctggaaaattcatttgttgaccaagatagcctaagctatcttggtatagacttaattgttcaaggttaatcacggaagatccctccatagaaattttcattataaatttcttgtccagttttacctgattgaactgcaacaccacaaccttcacaattagagccaaagtactctccaccgtaaccttgacttccttgcgctttataagtatctaaatatgtttctttatgggaagaaggcacaacaaaacgatcttcatatttagcaatacctagtaagcgatacatttcagtcatctgtctttcagtaagtcctaatcgttctaatttagaagtatcgaaaggttggtttgttatttgagaacgcatataacttctcatcatcgccattttttgtaagccctctttaacaggttttgtgtcgccagcagttaataaatttgctaagtattgaataggtaaacgcatttcctcaatagctgggaaaatcatatctggattttgacctgcattttcaccttcgaaataactcataataggacttaaaggtggacaataccacaccatcggcatagttctaaattcaggatgcaatggaaaggccattttatattctattgccaatttatacactggtgagttttgagctgctgtaatccattcttgatttattccatctttttcagcttgtgcaatgacttcctcatcaaatggatcaaggaataggtctaattgtttttcgtataagtctttttcatctttagctgaagccgcttcttgaacgcgatctgcgtcatataataaaacacctaaatatctcatacgtcaaattcggttcaaatctagacttattcgaatcaatcaaaccatataacattactacaatgttggcttcagcagttaaaaatgtacctttaattaaatattcaattgatcaaatgatcaaaactaaagaaggttgtatgaactatttaagaacatttattcctgatgctaaagatgaagattgggaactttacactgctggtaaacgtgttcaagttattaaagatagtgaacaacacgggaaaggtttcgtagtatttggtactgaagttgtcaattcagacgacaattctatgattgcattattaggtgaatctccaggggcttcaacatcattatcagttgtattagaagttttagagaaaaacttcgctgatgacaaagaagcatgggaacctgttgttaaagaaatggtaccaacatacggtcgttcattaattaatgacgaaaaattaatgagagaaacacgtcgcgaaacttctaaaaacttacatttaaatagataagtattttaaaaatagaatgacatgtcacgaaataaccacatgatgtgtgcaccccgtagcattaggtagaaagtctaatgttacggggtgttttttataggaaataggaaggaggtgcgatttaattgaataaaggagatatgtgcgatagtgaggtataaagacaaaaaatgaacaatgtgagttcatcttaaaaatgagaatgaaagagatgaattaatgcgaaaatgtgaggataaacaaagtgctcagtattgagtgtcttattattttaaaaggtgaaactcaagttcatttttgatgaaattaattgttgaatatttaagttgaacaaaagagtgtgagttcgttttattataaatagcattgattttttattaattaagtaaataaaataaaaacattaattttattgttcgagacattttgttttggtactataatattgtagttatttgttaagtttacaacaaaaatgattgacgtataacgttgttaaaactaagtatctatctttgttattcgaaatcatcttaatatgtgatatattgaggcagaatcatcattcattatcatcatttttaaaatttgaagtaaaattcttgctttcaaacatatctttgcaatggtaat

SEQ ID NO: 4293 - DNA, 1233 bp, Artificial Sequence
  Description of Artificial Sequence: synthetic nucleic acid sequence
atttatgaacgaatataaaatataatataaacaaagccattaaaaagtacataattggatgaacttctttatactttttagtgataatcattgttattggataaaaaataaatccacatgcaataccagtggcaatagaataagacaatggcatcataatgattgtaataaaagctggtactgcaacttcaaattgcttccaatttatatcagcaaaattagccgccatcaatacacctactacgactaaagcaggtgtagttactgcacttgttacaacttctattaacggactaaagaataatgctaataagaaacaaatacccgtgactatacttgcaaatcctgttctagcccctacagctacgccagaagtagactcaatatatgatgttgtggtagttgtaccaaacacagaacctacaatagttgctaaagagtcagagaataacgctcttccagctctcggtaatttgttatctttcatcaatcctgcttgcgtggcaacagctactaacgtaccagctgtatcaaagaaatcaatgaacaagaatgttaaaataacaattaggaattgaatagtaaacagttgaccaggatctttaaatgattcaaatgccgcaccaaaggttggcttgatacttggaacttctccaattattcctgatggtggatgaatttgaccagttagcatacccgctacggcagttacaatcattcctataaaaattgaaccaggaattttcatagcatataaaatgaccgtaacaatgattccgaaaatcgctaaaagtactggtgcttcagtcaaatgtcctaattttactaaagttgaatcacttttaattattatccctgaactttgtaaccccacaaatgtgataaataaaccaatccctgccgaaacagctagcttcatttgatgagggatagcattgataataacttctcttaaaccagtaacagtaagtaatgcaaaaaatataccagagaatagaacacctgttaatcctacttgccaaggaattcccatagttaatactactgtaaaagcaaaaaatgcatttaaccccataccaggtgctaaagcaattggatatttagcaattaatcccataaataatgatccaacaaacgctgctaaagctgtcgctacaaagatggcaccttgatccatcttcatatcacttgttgcaccttttacaccagctaaacttaaaatttgcgggttta

SEQ ID NO: 4294 - DNA, 3204 bp, Artificial Sequence
  Description of Artificial Sequence: synthetic nucleic acid sequence
tgtaagaaaaatgttccaaccataggagatttaatctcttgctggtcatttgatatggactcttgcttttcatctaaggatttaatattctcttgttgaatatcttgagatgattgttgcgaatgttgttgagatgctccattagtaaaatcaagttctatttcattatgagagtccttatacttaaatttttttacatcattagcttttaccaatttaatgacttcctcaatttttttaatatccatttatctatcctccttaattatttctgcgattttattagaagtatgtctaagttgatttaggttaaacaatggttgctcatcaaaacgctttaataattgttcaaatttagtattaaattctttaagcttttttgaagcttcttcaacagttatccatttaaactgtataatgtctccaggcttcatctgtgctaattttcttaaatctaattgtgttaccgttgcaatttttgtataaccaccaattgtttgcttatcatttaaaagaataatgggattaccatcgttaggtacttgaatacttcccaaagcgacaggttcagaaatgatatcagcactatttttaggtggtactgtattaccttttaatctgtatcccattcgatctgattgatcagaaattttgaaatcgctatttacgaatttagctatcgtttcttcatcaaattcattgatctgaggtccttcaatgacgtgtatgtaattattatcaggtatagatgagaaatcaattgtttttcctaaattagttttatagttatgatttacttgagttgcaataacatcgtatttctttaatgcacgacctttaaatccgcccattccacttctaacatgtgtagaatagctttgagccactttattaattttaagtgggtgtccaaaaacaatatatcctcttgctccttcagtgatttgaccaatgtctaattggtctccatttcttacatgataaacagttaataagtcaattttgttaccattaagtttcggttctgaatcaccaccgacaatggcaaaagtattgtctgttaaaaattctatattaggacctactaaagtatattcaattgctggtccatgatttccgataagtttttgggcaatagataaactatagtaatctaatgcacctgcttcagaaaatcctaaatcctgataccctaatctacctatatcttgaattgttgaaaacaggccaggctttaaaattttaatactcatcttgatatgtcacccacttatctatatcaaattttcctttattaatatcgtttgatattttttcaaactcttgataatttatactataaaattgtatgtaatcaccagcttcatataacgtcattggtgtcctatttaaatcaaagacttttattggtgtgcgaccaattatctgccaaccaccaggtgagtccataggatataaacctgtttgattatttgctattccaacagaaccagcgttaattttgattctaggttcagaccgtctaggtgtgtgcaacttagcatccaatccacctaagtatgggaaacccggcataaacccaagcatatagattagataaggttgttgtgtatgtatttgaataacttcttcctgacttaatttattaacgttagctacttctgataaatctggaccaaaatctccaccatataatacaggtatatgaatgatacgctgtttaaaatgtgattgttttctactgttcgaattttcatcgagttctaaattttctaataattcagttccgtttatccccgatttatcaaagtaaattagaatagcacgatatgaaggtatcatgtttgttatttcagataaatttttcgattttatatattgaattgtttgttgtacctttttgaaagttgattcactaatttcattttcaaagtaaatcatcattgtttgttcattaataaattgtgtcctcaaaacaaaatccctccttttaaaaatactaaggaattatttgttacaacaattttattgtaccattgcaataaagatgttgtttaataattaattcaaatagctaataataacaaataataaattgaattaaagttattgggttatcttaattattgcaaacttccaaacattaaatttctattatcatttaatcatattgataacagtttgtcatattttggtggataaaacctcatcaaacatttatttaaaccattctcaaattacacaaaatacctgagacatcgaaaatagtctcaacttttaaagtgcattgaagtgtaatcataactatcaaactacaagtataatgcactttttatgagtcagggacataaagttccaggataagtaaatcaaaaccacccgtatgaacgggtggtttgttctacggctataagcctttcttactggccagccctaaaagggcactgataggtcagccaactgcactactttcccagcacccctaaaggggtactatttttttcgtctttttttaatttcttctcctgtaaagggatctaggtattcttccattgaaatttgatctgcaacgatatcttcttgtaattgattacgaatgtaattttcaattacctttttatttctacctactgtatctacataaaatcctttacaccaaaactttctatttccatatctatattttaaattagcatgtctatcaaaaatcattaaactgcttttaccttttaaatatccaacaaatgaggatactcctaatttaggtggaatactaactaacatatgaatatgatctttagatgcttctgcttctattatttctacgccttttctttcacatagttgacgtaaaataactccaatatctcttttgatttttccgtatatcacttgtcttctatattttggtacaaagactatgtgatacttacaattccattttgtatgtgctaaactgtttgtgtcagatgacataaaaaagcatctcctcgtgttgaatattttggttggctgaccaatatatattctagcatgatgagatgtttttttagataacggtaaaaccttttctgaaccatacgcatagcgcatggttttctttatacaataaagaagccagtaatgaatttataaaaaattcatttactggctattttgctaggaattatatcccagactcattgaactcaaaatttatatata

SEQ ID NO: 4295 - DNA, 4051 bp, Artificial Sequence
  Description of Artificial Sequence: synthetic nucleic acid sequence
tagacaacgtagccatgacattatagatatggatagttgtcttatacaagatagacaacatcaagaagtaatgaatcgagtgaagtactggctcaatgaattaaatatatctatatataacgaaaaaacaaaaacaggtttaatacgtcatttagtagtaaggactggttatcataccgatgaaatgatggttatctttgttacaaatggagcaacatttaaacaatcagaactattagtaaacaagctaaaaaaagaatttccaaatataacaagtattaaacagaatataaacaatagccattctaatgttataatggggcgtcaatcaatgactttatatggtaaagataaaattgaagaccaattaagtgaagtaacttatcatatttctgatttatcattttaccaaattaactcatcacaaactgaaaaactttatcagcaagctctgaattatgctcaattaacaggaaaagaaatagtattggatacgtattgtggtataggaacgattggtctatatatggcaccactagcaaaacatgtttatggtgtagaagttgttccgcaagccataaaagatgcggaagacaatgcgactaaaaaccaacttaaaaatacgactttcgaatgtggaaaagcagaagatgttatcttaacatggaaatcacaagggattaaaccaggcgtagtcatggtagatccacctagaaaaggatgcgatgaaactttcttaactactcttttaaaattaaatccgaaaaggattgtttatatatcatgtaacccttcaacgcaacaaagagatgcgcaaatattggctgaacaatacgagttagtagaaattacaccagttgatatgttcccacaaacaactcatattgagactgtagcattatttgtacgtaaagacgaagaatgaatttaatagaagtcaattcattgttattttgaagtgattgttaagattgtattacaagcaacttactttattgaaaaaggtcttttttagctataataaaaattgtatactgtttttgaaaatagagaactggaggggtgaatgtgcataaaatagatttatcaggcaacaaatttcaaatccaacgatttgttctgttgcaaattgtattggcgctatttacaatactatttacttataaatgggcttatcaaacaacgcatatcattgaacaaaatcttgtcatgaatcttatttttggatttgtaggtttcgcagtactagttattttgcacgagtttattcatcgtattttgttcattatattttctaaaggtgaaaaaccatctttaaaatatgataaaaacaaaattattgtacagttctctcagacttgttttcatcggtggcaatttacaattatcatgatagcaccacttgttatcataagtgcgaccttactagcacttattcaaatatattccttctcatctttaatctttatgtttagtatacatacaagttattgtatgatagatgtgtttttagtagcattggcattacaaagcaaattcaaatacatacaaacctatggagaaggtttgtatctttatcatcaaaagcctactcaaacctattatgaataatcactaattatagtgacaagcgtatatatcaaagttgataattgatttaaaaatttcatttcttatttttcaactcgtttcaattgtaataaaaaatctcattaaaatatgcaactacattcacataactacttatgtagaaaaggataggactatgaatttattctaaaaattgtagtcctattttttttattacattaattaaataaacaatacaaatattaccatgtgcacaatacatgtaaacatagaaaggatggcgtataataatataaagccattatttggaagacatagtgaggtgagtcgatgactgaaagaagaattattcatatagatatggattatttttttgctcaagttgaaatgagagataatcctaaactaaaaggaaaacctgtcatcgttggcggtaaagcgagtcatcgaggcgtagtttctacggcatcatacgaagcaagagcttatggtgttcactctgctatgcctatgactcaagcacataagctatgccccaatggatattatgtaacaagccgttttgatacttatagagaggtatctggtcaaatcatgaaaatattcagaagttatacagaattagtagaacccatgtctttagatgaagcttatttagatattacacatttagtgagaccggatttaccagcatcaaccattgcaaattatattcgcagagatatatacgaagtaacacgtttaactgcgtcagctggcgtgtcttataataagtttttagcaaagttagcgagtggtatgaacaagccgaatggtttgacagtaattgattacaataatgtacatgaaatattaatgcaattagatattggagattttccaggggtaaaaagcatatagaattaaaacgaacaaacgttcttatcaggaggataattatgaaaattgtacataccgctgattggcatctgggtaaaattttaaatggaaaacaattgcttgaagatcaaaaatatattttaactcagtttaaacaacatatggagaaagaacagccagatttaatagtaattgcaggtgatttgtatgatacctcatatccaagtaaagaagcgataggtttacttgaagagactattgaatacctaaatatagaacttaaaattccaataatcatgataagcggtaaccatgatggtagggagagattgaattatggctctaaatggtttgagaataatcaactttacataagaactcaactagaaaatattgatgatccaatagaattgagtggtgttcaatttttcactttacctttcgcaactgtgagtgaagtacaaaattattttaaggataagcaaatagaaacatatcaacaagcattaaacgaatgcttagagcaaatgtctagttccatagataataataaggtgaatatattaattggtcatttaactattgagggcggtaaaacttcagattcggaaagaccattaactattggaacagtagaatcagttgatatgcattcttttcggttgtttgattatgtaatgctcgggcacctacatcatccatttagtataaataactcttttatcaaatatagcggttcgattttgcaatactctttctctgaagtaaatcaatctaaaggatatagagttcttgatattgaaaacaaccaactattaaatgaaaccttcgttcctttaaaacctctaagagaactagaagttattgaaggtgattatgaggatattattcaagaaagaattaaagtaaaaaataaaaataattattttcattttaagttaacgaatgtttctcatattactgatccaatgatgaaactgaaacaaatttatcccaatatattagcactatcgaatgtagtatttgatcatagtgagaattttagccatgttgaaatcaaaaaacaagatgatcagacaattatagaaaatttttataaaaatatgacagatcaacatctgagtcaagttcaatcagacaaaataaagcacttgttaagttttatattggatagggaggggtaagatttgaagcctttacatatagttatggagaactttggcccttttattaaagaaactattgattttgagcaagttgaaactgatcaactctttttaattagtggtaaaactggatctggtaaaacaatgatttttgatgctatagtatacgcattatacggtatggcttcgaccaaaactagaaaagaaggagatttaagaagtcattttgcagacggtaaatcgccaatgtctgtaatttatcaatttaaagttaataatcaaacttttaaaattcatagagaagcgccatttattaaagaggggaatataactaaaacacaagccaagttaaatatatatgaattagttgataatcaatttgaattaagagaaagtaaagtgaatcaaggtaatca

SEQ ID NO: 4296 - DNA, 4010 bp, Artificial Sequence
  Description of Artificial Sequence: synthetic nucleic acid sequence
tatactaattaaataagaaagtggaactgaatacacagtcccacccccggttgagcctcgaaccctaaatgacttatatcacgagttactttacttattgcccgtgataaattttaaatttcaatggtttgatatcattcatttgccattcgttataaataatatttttatcaattaccttgttgataatagtaatgccacaatcgccaccaccagcacctgaagttttagaagcgccaccgtgcttttcaccgacatcacataatttttttagcttatctgtttcaatttcaactgatgcttcgttatccatagattgaataatacgtctgtttatacgtatcatcttttgaacacctttgatattattagttttaaaagcttggattaaactttctacacaagcatgagattgatctaaaaaatcaccataaaaacttggatctgattttaaacgtttgacctcactcactaagtgtggagaagaagctggagacccagtccatccaataaggacttccatattttcgggagcttgtaaaggttcgatatgtaagcctggccaatttttttccaaaacatcattcaccgatgtttcttccatttgctgtttcacccagtcatggtcaaacgtactatatgcaagccaaccactgtagacactaaccgcaatatcgccacatgaacttaaactttgtaatttcatatttgcaattacagctaatttataaatataaaggtttgataattccaaaccatagaattcattcaaagctttaacaacagatactaaaacagcggcgcttgaacctaatccgtacttctgaccagagttatctgctaagttactatcaatggttaaatgaaagtgctttaaattcatattgcaactgcgcacatactgttcaaacacttctatagctgtcacaacatatttcagttgcttagcagcttgaacatctgagatttcaattctatcttcattacggtcaaatttaactggttcataatgtaatgttttggaatgaatactaccttcaactttatttgacgcctcaattgtcgccgttacaaagcgatttactgcaataagaatagatttatatcctggttcggttactgcatactcgcctgcaatataaagttttccgggggcttttacctgaatcattctatctcttccttacttaataatttcaacaccagagctaatgatatcacttgctataatcttcgattcgtcaaatacttttaaaaattgttccatcacagcttgtttatttttcttttctactaaaacttttacattgggacccgcgtccattgtaaagtaacaaggtaaattggcttttcgacactgttccacaatcgccatagcatcgtagctttcttgcactaaatacgtgaaaggaggttgagcgcctaagttagtggcatgcatacgtaaaccatttgcttcaatgacttctcctaagcgttgaaaatcttgatttttgactgcctcttttgcttcatttaaatcttcatcaacgtgatccaaccaatattgataaaatctagaagtatctcttgttagtgacattcctgacctactagatactttttttgactgattgttaatcactacaaatatcattgataaatctttttcccaaccattggaattaataccatgtgcatatgaagttaaatcatcatgccctttttcccattcggcaaatccaccaaaaatacttctagaagcagaacctgaaccacgtcgagctaatcgtgataagtctgtatctgataagttcaatgacaaagcttcattacaagcggcagctaaagcagcgtaagcactcgctgaagaagcaagtcctgctgctgttggcacataattttcactttcaattcgcgcatgcaaacgatttccagccaaatctctcactatattcatatagttttgaatcttttctttctctttggcattcacttcattaccatttaaaataaggcaatcttcagtaaaatcagggtcaaatgtcacttttgtttcagtataaaatctatctaaggtaactgataaactattattcataggaataatgtaagtttcatcagctttcccccaatacttaatcaacgcaatatttgtatgtgctcgtgctttgccacttttcaccaatgatttaacctcctaaatgttcaatccatgtatgtgctgcgccagctttttcaacagcagcaacaatagtctttgcagtttttaaattttccgcaagaagaagcatgctgccacctcttcctccaccagttagtttaccagcaatggcaccatgttctttcccaatttgaagtaatttttctattttatcgtgacttactgttaaatgtctcaagtcttcttgacatgcgttaaatatgtcagccaaatgatggaaatcatgctgttcaatcgattcgctagcactgtgaacaagtgtaccaatgtgctctatatatttcatatattcatcagattcacataatacatgaacatcttctactgcttgtttggtagaaccctttactccagtatcaatgacaaccatataaccatttaattttagtgattttaatttttcggcctgcccttgtttaaaccagacgggtttatttgacacaatcgtctgcgtatcaataccgcttggcttaccatgtgcgatttgctccgcccaatttgcttctttaatcaatgttttgtcatctaaaggttgatccataaaatcataactggcgcgtacaaacgctactgctactgcagcacttgaacctaaacctcttgatggaggcaaattagtttgaatttttactgatagtggttctttcactccacttttttcaacaaagcgattaatgatagactttagatgttcgggggcatcgtataacattccgtcatatacgtcacttgtgatagaagaataattaccttcatctaaactttcaatgaggactttaatttttccagcattaaatggaattgcgattgccggttgaccaaatgtaactgcgtgttcacccattagaataatctttccagtagattctccgtatccttgtctagtcatgttttctcacctttatataccttctttaaaatatcacttcataagatgtactgacgatgttagaatgattgacttgctattttacgtgatattaatttaatttctttacatattcatcttgatagatgtcacttaaatgtcaattttatcgaatacatttatcatatcgccaataatcaagcgttcattataactatttaaaagtaaaataacaacaaaagggcataataactttttgtttaagttttcacaacactttaatattataaaactcttttaaagagttatcaaaatcatgaaatatatttaccttaaatgacaattttgtaaacatcgttaaattttttactaaagtttttaaaattttccacctcaactataatactacaaatttgtgatagaatatatatcattttctaacaaagtcatcttaacttttgtttgaaaggtatttttattaaacaaaatagtagtaagattgaattcaaattgaatttgttgtcctcttttaacctcgaataacacttgcctattttgttgaatttctatgtgaaattttcttggttagaaccccgtcttgattgaaaattaataaaaaattattttctattcacatcaactatcactgctaatacgtaaaaaaacctgggacaatcattttgtcccaggcttatcattttatgacttatctatagtgtcacacttgctaaaaatctaatttttcattcattttcgcattgcgttctaacatcttatcataatacccttcgtaacgtgtccactcgtcttctgtaataggatccatatttaagtttgcccctaaatcttttagtgcatataataataaaaacataacatcttgcactttaatttctctatttaaaagggtttctaaagatgccatacatgagggatcta

SEQ ID NO: 4297 - DNA, 3607 bp, Artificial Sequence
  Description of Artificial Sequence: synthetic nucleic acid sequence
aggtatggatacagtaactgaatcaaaaatggcaattgctatggctcgacaaggcggtttaggtgttattcataagaatatgggcgtcgaagagcaagctgatgaggtacaaaaggttaaacgttcagttatctttgataactgatttaatcgttcaaaactaccgccaaagtatttttcatcagttaatattgaaatagcattagcaccatatttttgataatctttaacttgttgaacaagatcacgttgcggtaattgaggtacagatgggcttttcgattttatttcagcaataactgataatgttctatcatagttaagtgaatcaatcagctttctcctcttaacatttccgttatcttgtaaaatttcaagttttttatcatagtatttacgctcaagcaaagtttttttatactcaataatttcatttaaaatagtcattacttaacctcccatttttaaatattgtttcattgccatacctgtatcaatgagatatttcgctctctctacgccatgtttgatactttccacttgctcagcaacatataaagcaattccagcatttaacaaaactacatctcgtttacttgagtgatccgtgccacttaggatattcaatgcaatttgtttatttgtttgaggtgaaccacctatcaacgtgtcattatttgcataagctaaaccgacttcttctgcttttaaactatatttttttaatgctctttcgctgctaacttcataaatgatattttcaccagaaagcgtggcctcatccatcccatttgcaccatgaattaaaattgctcgttttctacctaaatcctttaatgtttgtgctatattttcaagttgtgaagcttcatatacccccatcacttgataagttaatttgaaaggattaattaatggtccaatcaagttaaaaattgtaggtgttgcaatcgattttctaattgattgaagctttttcatcattggataagaatcagttgcacttatgaatgctaatcctttcaaatttaattgttgctctacttcgttcattttgtttgtttttatattcatttcatgtaatacatctgtacttcctgaatgtgaagtaatacttttattaccgtgtttaatgactggcactcctgcacttgctacaacaaaagctacagttgtagaaatattaaagctatttgattgatctccacctgtgccacaaacacacatagctttattataaaatggttggtttggatagtttgtctggataaaatattcaactaaatacgttagctcatattgacccatgtctttatttgtataagctttcaataattcaacctttacattggtttctatatttgaatcaaacagtgtaacaataaatgattgcatatcttttttagataaagatttattttgtttaattttctcaagaagggtcattttcaacttcctctcgttgctatatttataaaattaataatgatttgtttcccattttctgtagcgaatgactctggatgaaactgtatgccataatgttttctgtttttgtgttggaaagattgtatactatcatatgtttggccagtgattaataaactttctggaaatgagcatggatcactaattaatgaatgataacgcataactttgaaacttgacttaattcctttgtatagtggtgactgattaacaatagttaaagtatctacttttccatgtttgacacaactaccttgtataacatcgccaccgtaataacaagtgagcgcttgtgcacctaagcaaacacctaaaataggtaaattttcgaaattttcaattaatttaattaataattgattgtctaatggatgtccaggtcctggtgaaataataactgctgtaatacctttcagattacatatatctgtatcatcgggatatttaacaatcgtttcacattgtttttctacaatatctacaagattgtaggtaaaagaatcatagttatctattattaatatcatggagttacctccaataaacttttagctttaagttttgtttcttcaagttctttctctggaatagaatcatatactactccacatcctgcctcgacactgactttttcctcatcgataatcatggtacgtatagccaatgcaaaatctaaatgatgattacagttgatatacccaacaccaccgctatagatacctcttttataaggataagattcgtatattctctgtatagctctaagtttaggtgcacctgagacagtacccgttggtagcaaacttgcgatgacgctcataggagatagatggggttttaattctccaataacttcactaacgatatgcatgacatgttcataacgttctattgtcattagtttggtaatttgtgaagtgcctgttttacttattcgatgaatatcatttcttcctaaatctacgagcatacgatgttcactcaattccttttcatctttcattaatgtcttttcattattttcatcttcttttttattttgacctcttttaattgttccagctataggattcgtataaacttttccatcttttacctttacaaaactttcaggagaacttcctattacaatcggtacatctttattaatataatacatatatggactaggattttgtcgctttaaattttgatataactgaaaagttaattgatgtaaattgtgttgaaaatggtgtttataactataaattcttgaaggaactacttgaaacatatctccttcagtaattttcttttttaaaattctaatagtttgaacaaattgttgctctgatatattggtggttatatgtcgagggatggatttataatttatatcctcaaccgaaaaatgtatgttttttaaatcttcaattttacgttcaatagattcctttaatctctcttttgttctataagaaaataagttacttgcgataatatataattcatctttataatgatcaaaaacaaatacatcttccactagataaaattggacatcatgagtttgatgatcttctaatttaatatcttgtaattttttaaattcatgtcgtactaaatcaaagctacatgtccctataaagcccgaaataaaaggtaaatcttttaaatatttatctttgatttcaaaataatatttatctacaaattccttaagtcgttgatacggttgattcttaactatttcacaatgattgtctaacttaattaaaagttgagaattatctaatgtaattttgccataatgatcgaatactactatcgagtacctacctttaagtttctgttgatttgtactttcaaaaatgatctttttttgttttaattttgctaaagcttctggcgtaatttgagcattcacctttttgtatacaatatccattgatttcctccttttccgaaaaaaatcagcctccttcgttataagaaacctaatacaacttcaccaagtgttgtgcgtgtatgactgaactcttttttatttacatcagacgctaactctttaatagaacgtttaagtaaatatacatagctttgaaagactataagtacatatgacacagctattaat

SEQ ID NO: 4298 - DNA, 3446 bp, Artificial Sequence
  Description of Artificial Sequence: synthetic nucleic acid sequence
tgtcacactttcagtgcacccatctacttcagataaaataaattaatcaaataaaggggcaagaaaggtagaatttacagtgaaattctctttgttggggcccatccccaacttgctttgcttgttgaatttctcagtgaaattctctttgttggggccccatccccaacttgctttgcttgttgaatttctcagtgaaattctctttgttggggcccatccccaacttgctttgcttgttgaatttctcagtgaaattctctttgttggggccccatccccaacttgctttgcttgttgaatttctcagtgaaattctctttgttggggccccatcctcttgtaaaaaatggtttgatatgtgtgtatatttttaattctatcatttgactgattgtatgttatgaaagcctgggacatcgataatctatgccccaggcttcactcacaatcctatattatgataggtccttccgatttaacaatctctattatttgttcttgtctttgacttaattctataggtcttcacccctttttaatacttactcattataacttttattttcaattgctacaaatacatataaacacttgctattaaaaattatttcaattagaattattaataagcgagttaaggatggtgtgagcttaacaaatatattttggcatatgattaaatttttataaaagcgagtgtttacactaatttgggtggaaccgcgggttgaaaagtaaataaacacatgttattacaacaatgtgttttaaataatttaaactcgtcccaagataatattgcataatctatgtgtattgtcttggggcgtttttatgtataaggagaggcttttatggttaaaaataaacagtctcctgatattgcacagggtgtagacaaagctcttgagtatcgaaatgatatttctgaagaagaaattgaagcaacaggtgcaggtgaccaaggattaatgtttggatatgcaactgatgaaactgatacgtatatgcctctacctatattcctgtcacatcaacttgctaaacgattggctgatgtacgaaaagatgaaattttagattatcttcgtccagatggaaaagtacaggtgactgttgaatatggtaaagatgacaaacctagacgtattgataccattgtagtttctacacaacatgctgaagatgtagagttagcacaaattgaaaaggacattaaaacgcatgttatttacccaactgtagataaagctttattagatgatgaaactaaattttacattaacccaactggacgtttcgttattggaggacctcaaggagatgctggtttaactggacgtaaaattatagttgatacgtatggtggttatgcccgtcatggtggaggttgttttagtggtaaagatcctactaaagtagatcgttcagcagcttatgcagcaagatatgtagctaaaaatattgttgcagctggtttagctaaacaatgtgaagtacaacttgcatatgcaattggtgtagcagaacccgtttccatttcaattaatacgtttgatactggaaaggtttcagaagcacgtttagttgaagctgtaagaaagcattttgatttaagaccagcaggtatcattaaaatgttagacttaaaacaaccgatatatagacaaacagcagcgtatggtcattttggacgtacagacgtattgttaccatgggaaaaattagataaagtcaatgttttaaaagatgctgttgaaattcaatgacttgtaaaatagaaaataaataattataaaatatatgtcgaaaataagccttttttctattataattagagttattgaaactgataaaggagcgttgttttaatggatttttcttcaccgacagtaattggcttaattgttgcaatacttgtggctgttttattctttatactcttcttagtagcgaaccatagtaagaagaaagtgaagaatcaaacagaagcacattataaagaaaaagaacaacatctaaaagaatctcatgaagaagctttagaaaaagagagagttgagaataaaaaagttgttacaaaacaaaaagaagattttgacgtgacagttagtaacaaaaatcgtgaaattgatgcgttgaaactattctcaaaaaatcatagtgaatatgttacagatatgcgattaattggtattcgtgagagactagtaaatgaaaagagaatacgccctgaagatatgcatattatggcaaatattttcttgcctagtaatgagttaactaatattgaacgtgtgagtcatcttgtacttacacgaactggcttatatataattgattctcaattattaaaaggccatgtttataatggtattagtggtgcgcaatttaaagaattacctacgatgtcacaagtttttgacacgctcgacttagattcatcacagccacagacattggtcttagatcaaaatgaagatcaacattcattatcttttgttaattattcagataagattaaacatattgaaaaattagcaggagatttacaaaatgaattgaataccaaatatacgcctacatcaatactgtattttaatcctaaaaaggataatgatgttacaatttctcattatacgcagtcatcaaatgttaaagttttagttggtcctgaacaattagatgaattcttcaacaagtttgttttccatggacgcatacagtacaatgtggatgatttacaagatatcatggataaaatcgagtcattcaattaaattattaaagaaatactttatttttcatatgagtgcttattatagtcttcaaaacaattactacaaattaattgttttgaaggcttttttgatttgatagtattacttttttaaatagtaaaaatagggtatgtattactagtaaacttttcaattacaatgattaaaggagagattatatggagacggttcaattttataacggaagaacaatgccgaaaatagggctcggaacttatagagtaaaagatggcgatgaatgtagagaatctgtaaaatatgctatcgaacaaggttatagaagtatagatacggcaatgatttatggtaacgaagaaacggtaggtcaaggtattaaagaaggattagaatcgactggtttaagtcgtgaagatttatttataacttctaaattatggctaactgattttggacgtcaaaatgtggaagatgcctatcgacaatctgttgcaaaattaggactggattatttagatttatatctgatgcattggccaggtacaaatgaagcggtaatgattgatacttggagaggtatggaagacttgtataaacaaaatcaggtgaaaaatattggtgtgagcaattttactccagaacattttgaagcattgcttgcccaagtttctattaaaccggtca

SEQ ID NO: 4299 - DNA, 3004 bp, Artificial Sequence
  Description of Artificial Sequence: synthetic nucleic acid sequence
atacgtaattaaacctactgtaccttgacgctttaagtcaataccttcgtataattgttgtgctaacatcattgtcttgcgtgctttaaaatttagtttacgtgcagcttcttgttgtaaggttgatgtagtaaatggatgagcaggataacgtgttttttctttacgattcacatttgtgatttcaaattgatcaccatttaatgcttcagtaatcctttgaacatcgtctttgttgtttagcttataaggtttatttttatagtgtagaaatttagctgtaaatttagatttcttgtatctaaattcaccttcaatggaccaatactcttcaggtttaaaattacgaatttcattttcacgatcaatgactaaacgtaaagcaactgactgaactctcccagcagaaagcccttttttaactttcttccataatactggagaaatattataaccaacgagtctatctaaaatacgacgtgcttgttgcgcgtcaactaaatccatttcaataccacgaggatgcttaaaactatctttaacagcatcttttgtaatttcattaaatactactctattttctttgctatcttctaattctaaaatttttgataaatgccaagcaatcgcttcaccttcacggtcagggtcactagctaaaaatattttttttgcttttttcgcatgtttttttaaatctttaactacaggacctttgccacgaattgtaatatattttggttcatagttatcttcagtgtcgacacccatttgacttcttggtaagtcacgaacatgtcccattgaagcaataactttatatcttttgcctaaatatttttcaatggttttagcttttgcaggcgattcaacaatgactaaattatctgccaaagtttattcccccttgcaaattgaattactaaagataaatgataaacggttaattttgtatttgtcaacgttttaatttttaatttccaattttgtaagaattgttattatttttgattcattaaactttaactaaattaaaggatataaataattaattcagaaagtaaatctatcatttactaaaatagataatcatataatatactactttcatctataacaacttgagcaccttcatttatccttcttaaattacctttagtcattttgttgaacattgaaccaggtagaacataaacatttctattttgctctaaagcacaatcgatagtgatttgactaccacttctttcttcagcctcagttataagtacccctctggacagaccacttataagcctgtttctttcaggaaatttatgcttacttataggagaaaatggtggatattcacttatcactaagccattcctttcaactttagttcttaaatttaaggttgctttaggataatgataacaatggccaaatccaagtacgccaatagttggtaataggtatttaagtgcggtttgatgtgctacactatctgcaccgcgcgctaatccagaaacaatcgccatatttaattgtctaaatgaaggaaaaagatagtttaaagattgacttgtatattgtgtggcattacgtgagccaattacagctaaagagtgagaatgattaaagaactgtggatttcctttgtagaatatcacataaggataatcatacatttctttgcaaagagaagggtagttatcatcaaagtatgttgtaaaactaacatttgcttttttcatttctttaataatgtccatcagctttaattctttgaaacgttcatatttgttccatagcctttcagaattacgctctgtaagccacctttttatcatgtcatgttgatgaaatacgttttctgatagaaagtcaggatatgtacttgtaagatgatgaagttgtgccgtagtgaaatttgcccaatatagttttaacatcgtctgttgtatcaattatcattactcctttgtccttattataccttcaaattcaaatattttagtttactgtttaaagacatttattttttaaatatcatgtatttgtaaggagtaatttaatgacaaaggtttaatgtgtcatagtgtattgtaaaattgtcgaatttcatgtttctactattatatataaatcaacgtatcaaaaaaagataactaatttttttaaataaaatcatgctaatacttaatccattattttgatttttatttaaatcaacctacctggttcctcaccaaattctctgcactaaaattttccgttaccattctgttcccatatttatattttcaattgaaatatctatcaaaaattaaactattcttctatttaagtattcaacaaatgatgatacacctatatgggatggaatacttaccaacatatgtatatacctttgcttcaattattttacaattttccactcacatcattgacacaagggatttcttataccttatttcttttccatatatcactagcctgctatatctgggctcaaaaacaatgtgctacttacaatttcattatgtatgtgctaaactgtttgtgtcggatgacattaaaaagcatctcttcgtgttgaatattttggttggctgaccgatgtatattctagcatgtagagatgcttttttagatagcggtaaaatcttttctgaattatacgcatagtgtatggtgttctttatacaaaaaaacaacgaacctgaacaaggtttaatgttcaaggttcgttgaaatcaatactaatatatattattttttaatagttaataactcttcataaatgcctgcttttttagctgcatcaataagggttgttcctatttcagaaggtgtatctgcagtttcaacaccacaatcgtttaatgttttaatcttttcagatgctgtacccttacctcctgaaataatagctccagcatgacccatacgtttacctggaggtgctgtctgaccgccgataaaacctactacaggtttgttcatattttctttaatccat

SEQ ID NO: 4300 - DNA, 3926 bp, Artificial Sequence
  Description of Artificial Sequence: synthetic nucleic acid sequence
acaaatattaactttagaaagtaataaaaagattcaaaaattagagaatcaattagaggaagagagacaacttagttattctttcggttcatcgatgaatgataaacaaaatattaatgcccaagaagcgaaattgactgaagaagttaaaaatgttagtcaacaacacgaaagtcaaacaacagaagatattgaaaatagaaataaagaggttcccgaagagggcaaggaacaaaacttagaagaatatgaattactgaatgataataatctatctgaaaaaataaagactaataatcatgatgataaggaagaacaaccacctaaaaaaggtttctggagtcgtttgttcggtaattaattctattaaaaagacacgataaatttgtaaacttatcgtgtctttttatatggatcgaacttctgatactcagtaattatgtgaacaaaaataaatatcttaaaatgttatttgaaattatgattacgttaaagtttatatactgaaataattaacaatacacattactgtgtattgtttttttatattgtaaaatagactttattaaattactaaggtacccttagtcgtctcaaaataaaactcaatccttttatggattgagttagacagactattttacaatgataacgggaatttttgaacgtttagccactttgtgactgacgctacccaataccatttcttgtaaactatttagaccacgagaccctaaaacaattgcttgatatttaccactattagcaactgaaaccactgtttctgcaggaagaccatgtgcaatttttacttcataatttacattatgttctacaaatagttcagttatactggataatttgtcttctctttcatttgttaaactatgtccttgtttaccatgtaaaacatctgttttcgattcttcaacatttacaactgtaattaaagtaactatagtattttcatctataaagttcaaaacttcctgtgctgaacgtaaactattttctgacccatcggctgctaataaaattgatttatacataaacaacactccttagtttaaatgattttcatttagtttgcttaattctgagactattttacgactatctgaatttagtttttctacatgaacaatgttatttttttcttcgaacttccttaccattgtatcaatagcatctactgctgaatcatcccataaatgagcattattaaagtttaattctataatactattttcaatattaaagctaatttgatccatcatagagtcaatagaaacaaaaaagatttgacctttaaaagataaacggttagttttaccaaacttctcagatgttacttctacttttgatattttagtagcaaagaataaagcactgaaaataacacctacgaccacgccgagagctaagttatgtgtcatcagtacaattatcactgtaagtatcataacaactgcatctgtttttggtgctttttgaatatatttaaaagaattccaatcaaatgtaccaatcgaaaccataaccataatacctgctaaaattggcattggaatttgaacaacaagtcctccaagaacaataatcatgaatattaagacaacaccagcagaaaaagtagataatctactgtttgcacctgatttgacattgattacagattgtccaatcatggcacaacctcccataccaccgaataatcctgtaatcatattagcaatgccttggccacgagattctctgtttttactactataagtgtctgttgcatcatctacaattttagcagtaagtaaactttctactagacctacaatagccatagatagcgagtatggaaaaatgatttgaagtgtttctaaattaaagggaacattaggaattaaaaagtgcggtaaagcttgcttaatatttcctaaatcaccaacagttctcacgtcagaacctgtatacatataaagagcagtcaatacgatgatagctattaatggtgcaggtattgctttgaaaaatttagggattatatatacaatgagtaatgttacaattacatatatataagttgagattgaaataccgaagatatgttctatttgggacatgaaaatcataatacctaatgcatttacaaaacctatcatgacggaatgaggtataaatttcattaaacgccccactttgagaaggcctaaaactaattgaattactcccattaatatcgtggcagctaaaagatattctacaccataatctttcacaagtggtgtaactaataaggcaacagcccctgttgcacctgatatcattgcaggtctaccaccaacaatagcagtaacaacagcgatgataaatgaagcatacaaaccaaccattggatctacgccagcaataattgaaaatgcgatagcttcagggattaaagctaaggcaaccacgataccggcaagtatatttttacctggctggttaaaccattcatgttttaatttttcaaccataacttactctcctttttatttaattatattgtaaagtataacagaaaagtttcatatgtgtaccctttaatgaaactttcctgttatactttagctatagggtggtgcaagtaaatgaaatacggttatatcagacctgttacaataaacgatgatttaaacgaacaaaaaaagaaaatagaaacctatacaaaaaaaatagttgaggaaagtcatgctaataataaaaaaagaaatgaattagaccttcttttaaaaaagaagttggtctcgggggatgcagtatatattacagatttatgtatacttgcagattctacgaaacaattagtagatatattagattatctttcacagaaggatatatctttatatgtaattaatttaaaccgatatatttataaaaatattcaaggagaatttttagaaatactacatgatattacagactttcaaagtgatgttgttaaatttaggacacgcgttggattagaaaattatacaaaagaaggaaaaaagttaggcagacccaaacgagatgataaaaatcttagagatgctatagaaatgtatatgagcaaaaattacactctagatgaaataaaagaaaaaacaaacataagtagagcaactttatatcgtcatctagataaataagagatagtaaatgttgtttcaagatatagaacataatataatactgtcgattaaagaggaaagtaaagtgatctttaaaacattaaatattagtgagaaagtttttttattagtactcgaaaatatagaaagacaagacttagcaaaaacatagaaatattttataataaatactttccaatatagtgaactacaagatatgctgagttaacgaaaaagaaatgtaaaaaaattcctctatgtcaaatacattaaattcaacttttattgattatgtataagatatacattttaactacctataatcttttcttatgtcaacagtttcataatatatattgatatacactactgataataggttttaattaatattaagcgcatactttttatggatagaatattagtattacatattttttggggttcaagaatatgccccgattttatatcaaatttggaagaaaaagcataaaaaagcttagtacaaatggcgtattgatgagacatacatcaaaataaaaggaaaatggaggttctgttgcaaagttgaatttatagtataattttaacaaaaaggagtcttctgtatgaactatttcagatataaacaatttaacaaggatgttatcactgtagcggttggctactatctaagatatgcattgagttatcgtgatatatctgaaatattaagggaacgtggtgtaaacgttcatcattcaacggtctaccgttgggttcaagaatatgccc

SEQ ID NO: 4301 - DNA, 2536 bp, Artificial Sequence
  Description of Artificial Sequence: synthetic nucleic acid sequence
atggctaaaccatataaactaacaacgcactatttatatggttcatcagattctacgtattttgatatgataaatcctattttaattggattttttgtctttttctttacgtttttaatttctggcattggcttattaaaagagcgtacttctggcacattagaacgtttacttgcctctccaataaaaagaagtgaaattatttttggttatgttttcggttatggtagttttagcgttatccaaacaatagttgtcgtattatatgcaatttatattctgcatatagacttagtaggttcgatatggttcgtactattaacggcaatattaacagcgcttgtcgctgtgacattcggtatattattatctacctttgcttcctcagaattccaaatgattcaatttataccattagtcatagtgccacaagtactatttgcaggcattataccaattgaatcaatgaataaaggattacaatacttttcacatatcatgccgttattctataccggccaaacgatgcaaaatattatgatcaagggttatggattcaacgatatttacatttatttaattgtgttattcgcatttttcattttcttattgattttaaatattataggcatgaaaagatatagaaaagtttaggaggtcaatatgaaccaagatattaagtcattagttgaaaccattgtgcctcaacttgaatatttaagcgataaacaaagacgtgtcatagaaagtgctattgcattattcagtgaacaaggatttgataaaacgagtactaaagaaattgcgcagcgtgcaaatgtcgcagaaggaacggtatttaagcagtttaaaagtaaaagaatgttattatacgcaggattaattccaattttaagagatcatatcgcacctgtagctgttaaacaatttacagatgaattaaacgaagtaacccattttgatgcatttataaatttatttgtagaaaatagatctaaatttatttatgacaatagacgtattcttaaagtcatcttaaatgaagctattactaatgaagattttcaaaatatattagttaatattttcacccataaattaacgagtaaattaaaagataaaattgaatggtttatcgataatggtgacatgcgcaatgttaaacctgagttttttatacgtacggtcgtcgcacaaattttaaatttaaatatcccaataatagttaataatgactatactaagggtgaaaactatcagcagtttgcgttattcgtaaaagagggcttatataggatgtttaagcgagaatagacatcatgcaaaatatgaaataagagagtaagggacataatttctagagccaagaactttatgtcacagactcttaaaaattgtgaattaatgttactcatttggaaattatttactatcgtgataatatatagttataataaacgtatttagaaatacgaaaaagagcaacatgctaatacatgtcgccctagtgagcctgttaaaaagacagtggcttgtattttactaataagattaaaataacctctagttactcgccaaagtatatgctagatggttattttttttggttattgctcattattactagaccaatgattgtaagaacaatcattagcatttcataatcagtcatgctattcctttcttggagtagaaaccaaaaccataggcatcaccccattttcatgagattagccaccatctatctaacttgctcaaatatattgtaacattgattgcaataatataaatgacaagtagtgacaattattttcactttcactactctatactcactatactaaacaatgatatttttaaagtttcactcccactttcattagaaacgattaaacattcatttattttatctacttttttggttctgttgcaaagtaaaaaaatatagctaaccactaatttatcatgtcagtgttcgcttaacttgctagcatgatgctaatttcgtggcatggcgaaaatccgtagatctgaagagacctgcggttctttttatatagagcgtaaatacactcaataccttttaaagtattctttgctgtattgatactttgataccttgtctttcttactttaatatgacggtgatcttgctcaatgaggttattcagatatttcgatgtacaatggcagtcaggtttaagtttaaaagctttaattactttaaccattgctaccttcgttgaaggtgcctgatctgtaattaccttttgaggtttaccaaattgtttaatgagacgtttgataaacgcatatgctgaatgattatctcgttgcttacgcaaccaaatatctaatgtatgtccctctgcatcaatggcacgatataaatagctccattttccttttattttgatgtacgtctcatcaatacgccatttgtaataagcttttttatgctttttcttccaaatttgatataaaattggggcatattcttgaacccaacggtagaccgttgaatgatgaacgttta

SEQ ID NO: 4302 - DNA, 3076 bp, Artificial Sequence
  Description of Artificial Sequence: synthetic nucleic acid sequence
aggtgagtaacctagttttaagtaaaagtctcgagcttgtaattgagcattcatagtgagttcattgtattggtgtttttttgcaattgtttcaatagcatgtattaaatttttaccgtacccaagaccacgataccacttgatgattgctacacgttcaattttacaaatatgagtatttaaaggtctaattctagcagttgccataggaacaccatttatatatcccactatatggaatgagtaatcttcatattgatcaaattcattttcgagtggtacgccttgttcttcgacgaaaacacactttcttatttcaaagcaatcatctagcatcgtttggttttttgctatttgaaacacagtatcacctccattttcactggtttttccttaaaaaattattttaaccatattgaaaatgaaaatttataaaaaatggaataaagcaggttcattataaattcataattagttcatcaccaaaaaaagaatgagtcaggtacatgtcgtgaatatcatttgtggggataagaactgaagtttctattggtaaagtaagttgagtcttattataatctttatacataaggaacttcgttaatttattttagtgatatttattaaattttacgaaagggccttattttttaaagtatttcaatgtgaaattacatataaacataaagtattttggcgagactcttgagggaacaggtcaagctgaagactacaggctgaagctgtcccctaagaaagcgagaaaacaatacgaagtattataaataaagaagccagtaaatgaatttataaaaaactcatttactggctattttgctaggaattatatcctaacctcactctgataattagaaaaatatataatttataaaccaaagaattaagaaacgatacgtttattactaattgatagtattataaagcctcttttctgacgatagcgcagtattgccaaaaaatacgtaattgggcaatattccaattgttcatgcccatagtaaaacctgaaggcttaaatatatttacatcagtcacttccaaagcggctgcaataagatattgaaggggcacactgatacttttcattgtatcagaaagtccattttcatcataaacccaggtaaaaggtaaatcagactcaaacacatcaaccttattaaatatttcaggtaatgcaagaatgtaacatgcgccatctacaacgggattatctaaactatccttgtagtagatcaaaagcgcttcataattttctctgtgttcatggtttacatagaaaaattcattcctaaataatgccatatctttactatgaatgatttgttgttcaagtacgttgaacataccattaatattagcaattttttcatatgttttacgactcatatttgcgctccttttaagtatatttactacataagtttatatagcttttattgtgcgtaaggataattgtcattatttatcataccattttcaccattggtttgattgttgtcttgttgatttgggtactgttcgtttccgtttaagctattttggtctgtttgttcgttagtttgatcttcttcatcattattttgtgatgaggaatcagactctttctgactatcagtcgattccttttggttcttacgcaataagtcttcatctaattctgttaagggtacgagtgaaccatatcgtttaatgactctttgatctaagaaatcgtttttgtttgttattttagataaatctaaatcattacgtaaaagatttgaatattccataatactttttacgcttgggtggtaatagtatatatcatttaagtagtcatccttacctttaagttgtgatgttttaatttcagtactaccaccaagatacattttggtaaaggaggcaattttgaatgaactatcttctaattgatacgtcaaaccaacctttatcagtagctattatgaaagataatgaagtgattgctgaaaaaacaactgatatcaaaaagaatcattcagtgcaactcatgcccgaaatagcagaaattcttacagaaagtaaaataaataaaacagaaataactgatatcgtggtagcggaaggtccaggttcatataccggtcttagaataggggttactgttgctaaaacattagcgtatgcattaaacactaacttatatggtgtctcatcacttaaagcacttgctagcacagtaaaagacagtacgaagttgttagtacccatttttgatgctagaagagaagcagtttatgcaggtgtttatcaatatcaggacaatgaattaataaccattattgatgacacttatatacctatttttgaacttattgaaaaacttcatcaattaaaccaaccttatgtgtttgtaggatttcatatcgaaaaaataaaacatttattagacagtgacatcgtagaacagttaccacaagcttcaagtatgaagcaattaatccaaaaaccagaaaatatacattcatttactcctaaatatcataaattatcagaggcggaacgaaattggttaaaccaacaagagaacaattgaatattaggaaaatgagtgtggaagatgttcctaaagtttttgatatagaaagaaatagtttctcacacagttcgtggtcaatcgatgcattttatcatgaaatagaaaacaacgaatttgctacatattttgttatagaatttagtgacaaaataattggatatgttggtttatggttagtcgttgatcaagcacaaattacaacgatagctatatcaaaggcatttagaggctatggtcttgggcaacttttacttaaatatgcaatgaactatgcacgtttttcttgtgatgtgatgagtttagaagtaagaatagataatgatgttgcacaacatgtttataggaatttgggattccaaaatggtggaaaaagaaagaattattatggagaaggcgaggacgcattagtcatgtgggtgaatttgaaatgacaaataataaattaatcttagcaattgaaacaagttgtgatgaaacgagtgtaagtgtaat

SEQ ID NO: 4303 - DNA, 3298 bp, Artificial Sequence
  Description of Artificial Sequence: synthetic nucleic acid sequence
tataatgaaatctttctacgttcttaattatcaattttcaattaaaataaaaacctcttgcaaagtaactaatactttacaagaggcatatattattgatcagtattaaattttcagttattgctaggttgtaaattcatcatggcaccaaattcttgttgacagtgggtaaatgatatgaatgctaacaattctacaatttctatatcagttagtgtctttgttaaaacctgtattgtagattgtggaacccgtccattttgtgacacataaacatcaacaaatcctatgcaaactaaagatttttcatcggtaaatttcttattgggttttcctttagatttgcagtatagacaaccactgttttgagctagtattttcctaatttcttcttttaaatcaacagataattgcccctcattttttaatatatcttccaatgcattccatttttcttgaacactagggagatgtccgagaagtttgtcaaaagaagtatcaccacgatgagataagttaattatagccatctaatcacctcttatttattttaattaatcaaacaccagtgatgaatgctataattaaagtaaatttatagtttacttattaataataaggagatttgcccattggacctaacaaatcaaaaaatcctacacttacttgagcaaaatagtaagctatcgctttctgaaattggaaaggaagtaaatttatctacaccctctgttcgagaacgaatctataaacttattgattcgaaaatcattgaacgatatacaatcgatattaattacgatgcattaggtttcgatattaatgttttgatagaagtaactataaaaaataacctatataaagatttcaaagcatttatttcagttcaaaacaatgttgatttttgctatagaatttctggagatagttgctttatatttaaagcgcattttaaaaagatgagcgaagtcgaaacactcatcaacgaaatccaatattatggtcatacaaaaacacattttatattttcagaaacaaaatagtgttttataatttatcaatattgtcgtttatgtaatactatataaagaaatgtaaaaacacaattgggttggtagtcccaatgcaaattacttatatttgtcagtaaccttcctcctcaggtcgtccatcatttcaattttaaattgaggagggacttatctatgaaattatctatttttcatgatggtcaattttttgtaggtgtcgttgaataccaagaaggcttcattcataaatatctaaaagttacatttggcaatgaacctagcgatgaaacagtgttacgattcataacttttaaacttattcctttattaaatcaaacacacggtaagaagaaacctattcaaaagcataaaaagattaatccaaaacgtttacaacgtaaaatcgctaaagaacaaaaagagaccaatttaactacatttgctcaacaagcgattaaagaagaacaagagttgaataagctaaagagtaaaaaacttcagcgattagaaaaagaacgacacagacaatacaaaagaatgttaaaaagaaaaaaagcacatgaaaagcacaaaggtcactaattttaattgagtctgccacatatattaaatgtgttgcaggctcaaaactttttcaagttaatatagataacttaaatctaccaatttgaagttaatcatttcttcatttttaattactcataaaaactacgaattcatcatgcttttagttattatccaacgcttgtaggttaaaaaaacaacgatctcctttattaattacatcgtcccagttagcatcataattatatccgagtttttgtgctaatttaatagaatttgtattatattgatttgttcgaattaattttggtgttatggtatcatgcttttttaaatgacgggcaatctcctccattgactcaaaagctaaaccaacaccagtatacgatggaaagattctataatacgcattaagaaactgttgttgatgaattgtacgatactcaaatcccgctatccccactacttcgtgattatctctcataattaaaatgaagtaaccaaattgatattcatcccaatgcctcatccatcctttaataaaatcttgggttgctactttattctgatgaatacctttaggtgtatactttgtagctaccttatttgtatgcaattgataaagttcatctgtataactcaaattaggcttcactagctttaatctatgtgtttctaacatctacatccctctttccaataaattattcaattgtagataacttaatattgtttacgcactcttttcactattgagaagagtatatattgtatttagacttacgtcagtctcacccaaaaaattcacataacattcaattttgacactatagttcaccttaaatttatacttatttactagtaaatgtgtctaatcaatgatcatattgtgtctaaaatattacaaaatggaataggtagtattataaatatgtatttttgttatatagcctatcgtcttataataggaatcagcgcaataatttaattatttttgcacgaattcttaaaccaaagaaaggtgagcaaaaaaatggctaataaagagtcaaaaaatgttgttattattggcgctggtgtcttaagtacgacatttggttctatgattaaagaattagaacctgattggaacatcaaactctatgaacgcttagatcgtccaggtattgaaagttctaacgaaagaaacaatgccggtacaggacatgcggcgttatgtgaattgaactatacagtacaacaacctgatggttcaattgatatagaaaaagccaaagaaatcaacgaacaattcgagatttcaaaacaattctggggtcacttagtaaaaagtggtaacatcagtaaccctagagatttcattaatccacttcctcacattagtttcgtaagaggtaaaaataacgttaaattcttaaaaaaccgttacgaagcaatgcgtaacttccctatgttcgataacatcgaatatacagaagatatcgaagaaatgagaaaatggatgccattaatgatgacaggtcgtactggtaacgaaatcatggcggctagtaaaatcgacgaaggtacagatgttaactacggtgaattaactcgtaaaatggcaaaaagtattgaaaaacatccaaatgctgatgttcaatacaaccacgaagtaattaatttcaatcgtcgtaaagacggtatttgggaagttaaagtta

SEQ ID NO: 4304 - DNA, 3569 bp, Artificial Sequence
  Description of Artificial Sequence: synthetic nucleic acid sequence
tcattaggctgctttcttagtttgtagtaataatcgacgacatgattgtcataatgatgctgccctcttattatattcataatcacccaaaataaaagttttctcgcttttttattaccacgcttgttgatggtatctctacagtgtgtatgacctgattgatatcgtttgatatcaatgccaacaaaagcattgagttgtttatttgatttaaatcgcttaatatcaccaatctccccaataatcatagctgtgcttagcttaccaataccaggtatcgaatgaatattttcaaaataatcgagttgttgtgctaattgaatcatggcatcatctaattgtttgagatgatgaatagattgttttaattgttgaataagtaagcgtaatttttcgactagaaaggaatgtctatcgacattaggatagctttcttgagcaatcacccttaattgaagtgcatattttgtagctttatccattgacattcccttatctgtagaatatggattgagtccaagattctcattagcatttttgcttttcttttctttttcgctcatcttgtcaatttcttttttcgtatacttcggatctaagtatgcattaatcgtttttttatctaaatattgtccatcttgatataaatacttatttgttggaaagatttctttacttaattctagtaaaccactttcaaaatcttctccattataaccatttgccatattatcttgtaataatccacgagcctggctttctttgaagggtaatatagtcctatagttatcaccttgaacttttttatcagtcgctatttgtttcacttgatttttattatggttatccttatgttcactttgttctttatctgatgaagtttgtttatgtccatctccgcaagccgttaataataacagtatcgacatgagtaaaaatattgttcgcttcattcacgtactcctctaattattagattccattttgtttttcaataaatgctgcttcagtccaaatttcagtaccatacttctcagctttggctaatttagaccctgcatctgctccagctatgacaatatcagtacttttagtcacgctgcttgtaactttagcaccttgcattttcaaccattcagatgcttcatttctcgtcatttgctcgagtttccctgttaatacaattgttttcccactaaaatcaggatgaccttcgatttcagttgttttaattcctttataagacatattaacatttttattacttaatttttcaattaatgaacgaatatcactattttcgagatatgttacaacagattgtgcaagtttatctccaatatcttgaatttcaattaattcactttcagttactttaaaaagttgatccatcgtttcatatcgctcagcaagtacttgactagcttttacacctaaatgtctaataccaagtccaaataataaatgctctaatgactgttctttagatttttctatcgctaataaaagattatcaactttcttctttcccattcgctctaatggtaataaatcttcttctttcaaatagaaaatatctgcgacatctttgattaactgattttcgtatagctgatgaataattttagtacctaaaccatctatattcatcgcttgtcttgaaacgaaatgtataagtccttcaataagctgtgcctgacattttggattaatacaacgtaaagcaacttctccttcaatacgaactaattcatgtccacaactaggacaatgtgttggcatatgataaatttccgattcgttaggtcgtctatctaaaatactttttacaacttcagggatgatgtccccggcttttttaataacaacactatctccgatacgtatatctctttcatgtattaaatcttcattatgaagtgaggctcttgaaactgtagtaccagctacttttacaggttctagaattgcagttggtgtcacaacacccgtacgcccaatacttagctcaatatccaataattttgtaataacttcttcagctggaaatttataagcaatcgcccatcttggagatttttgcgtataacccatttcctcttgttgagataaatcgttaacttttataacaataccatcaatatcgtaagataaagatcctcttttgcttgtccatttctctatataattaagtacgccctcaatatctgatactcgttcacgttcttggttagttttaaaacctaattggtccaattcctctagcgcttcactttgtgttgttgcattaaactcggttaggtcattcacactatataagaagacgcttaactttcttttcgcagctagtttagagtcaagttgtcttaaagagcctgcagcagcgtttcgtggatttgcaaaaggttgttcaccattttgttctttttcattattcaaatgaatgaatgaacgacgtggcatataagcttccccacggacctcaaaattgagaggttctttaatttttagtggtatagcatgtatagttcttagattttcagtgatatcctcacctgtcgtaccatcaccacgtgtaagtccttgaacaaaacgaccattttcatatttgagcgaaacagccaaaccatctattttaagttcacacatgtattcgaccttaccaatactatcacgaatacgttgatcaaattttcttaaatcttcttcattaaaagcattacctaaacttaacataggcgtgtcgtgatttactttttcaaaagaagactgagcttcgccacccacacgcactgttggagagtctgtcgatttgaattctggatatttttcttcaatttcaatcagctcatgtaataacttatcatactcactgtcaggcactgagggattatcttgtacataatattcataactatattgattcaataagtcatgtaatttttccacacgctttttaacatcttgcatcccctatgagtcctccttctttgttattggtgcgaactgagctaataatcgttttggaccttctgatttaaatataatatccaactctacagatccatttttttcattcacgttactaaccatcccttcaccccatgctttatgcataactttatctcctactttccaatcagatgatgaaacttgttttttagttgatgtagtacgcttactaaaacctcttttaggttgagatttgggagatatagtttgtcttttttgaccggtatgactatcaagtaggtcttctgggatttcttttaaaaatcgagatggcatattggattgagaacgaccaaacaacattctggtcgttgcatttgtgatataaagcaactcttctgctcgtgtaattgctacataacaaatacgacgttcctcttccatttcatgatcatcttcactttttattgctctgatatgtgggaacaacgactcctccattcccataataaaaactataggaaattcaagaccttttgctgaatgcattgtcatcaatgttacaccattctgtgtatctgcttcgtcaatatcagcaactaatgataaatctgtta

SEQ ID NO: 4305 - DNA, 3454 bp, Artificial Sequence
  Description of Artificial Sequence: synthetic nucleic acid sequence
ctactaaaactgtttattagaaataatgccgtttttacgataattgctacttcaaatataatttttttactaaaattaaagatatcaattaaataatactctactgcttgttagttgcattcatttccaaattattcatcatcttctaaaaagttggttacattaatcgtaatttctttagtattatggttaataattatatcttcgttataaccgagagatttaacttgaaccgtctcattatctatttttaatgctacttcgacatgttgatatttctgtaatatgagtaaagtatcttcattggctacaacatttataggcccttttccgttaatcgttattgtccattctctaaatttcatttacatttctccttttacattatagatatgattgattattcttaatgattttcgatcattgaaaactagattaaaattattatgattgaataagtaaaaagacatagcacatcttgctcttttttaaattgagaaataaaagtttcaacagatttctagaactgtcatatttaattttatttgaaaaatatatatcaactactttttaatatttatcattataaaatatgattggaaacttttgattatttagttattttatataattactttaacattacctttgtacttgttatcttatcattcatatatgataatttgtctatatatcttaagtgactcatttcaattcataggtgttatagtataaaattaaaatactgacatttaacaaatgatttaaagaaagatattttgaaacagtaatgaacaatctaaatacaataaaaaagaagcgcatttgtaggtttatacttaacaaatgcgcttctatatccttttatagttaaaattttagaacttaaaatcatttcaattacgctttaaataacttagaaattatcctcatattttttaacccttgaatattaactctacaataattggaactcattataagtgaatgtgtcctttggtatatctataatttttagggtctttaggtggaacaagcgctctactaatattcagtaatccaattttaccacataacattacgatgataataataaactcagtccaattatagtattcggaagttaaatccatagtgagaccgactgtaccgaatgctgatacgacttcgaagagtattttgattaaaggtatattggaattgattatggtaagtataaacgtaaccataccgataaatgcaatagaaatgagaatagttacgaaagacaactgtatgtatctttctgatatttctctattaaatatagagttgtttttttctttgcgtatcgtattaaaaatagcgattgttgcaataacaaaagttgtaacctttataccacctgcagcactcaatggtgcacctccaataaacatgagagccataagtaataaagctgtcggtgttttaatgtttccaacgtcaattgtgttaaatcctgcagtccttgttgtcactgattggaaaaatgcatttcctattttttcaattaatcccatgtgtaacatagagttttgattttctagtaaaaagaagaaaaccgtgcctatcaaaattaataatccagtggtagttaacacgagtttagagtgtaaggataattttctaaaacttttggcgttccacaaatcaaccacgactaaatgtcccaaacctcccaaaatgataagtattggaatagtgataatgattaccggatcatttgaaaaatcgattaagttgtttttaaaaagggcgaatcctgcgttgttaaatgcggaaactgaagtgaataaacttaaaaatagacctttacctatgccaaattttggaataaacgataaacatagacaaagtgtaccaaataattcagtggcgatgctgtatatggctagatgtttaataagtttaattacaccaccgggttcgtcaatattccaagtaatcataaataaaattctattgttaattgatattttcttatttaaaaagatgagagttagcattgctacagtgacaatacctaatccaccaatttgtataagtaataagataatgatttctccaaaaatattaaattgtgttccaacatcaactggtgatagacctgttactgtgaatgcgctagaagctacaaacaatgcgtcaataaagttaataggtttcttccctgtatagggcaaatagagtagaaaagcaccaattaaagttgtcaacagaaataacataagatagaaatataaaggtttatttactttgctcataaatttccaccattctttatatgagttatataacaaagatgataatatcataagtgaattttaaagtgtaataacttgttaaactttttaaatatttactattcacaatgagtataaccactatatcagctttaaaaagatgcttagccttaataagagataattattaaaattgtagtagtaactattaaattaaaatacttcaaagtaaagtagggggttaatatgcgtagtgtaattaagttggaaaatacatttatattcataatcacaatcgccgtttatgttaaattagaattttctatatggctgtttttacttttactattagttccagatatatttatgttaggatatgtgattaatagaaaaacagggagttatgtttacaatattggacacacgtatatcacacctataattatcgcgctattatatttatacattgatgaaaggttactattacagattgctttaatatggttagctcatattagtatggatagaactttaggtttcggactcaaatattcatcagatactgataaaacgataatacaaaagatgtaatcgtagtttctgaatagatatttcaagttatacaaatcaatggtattaacaaatctaatataatccagtaatggatagtgatcattaaatttgttgaattacttcattaaattagaaataaagagtgtgatattattatacttttaatttaattaaggactgttaataaataaaatcccctaaataataattattgtctaggggatttatcttaatagtttaaaatgtttttgaagtatgttgcatcaaagcattaaattcttcattttttatgttactttgtgtaagcgtaattaaatgattatctaaatctttaattgtcatttcaatagaattccatggtttttcttcaagatcttccacgatatattgagaaggtattcgttgttttaaaattcgaatatttggtacaagtatatttgtataaactgcattaccgacttcaaactgtttgccagaaattaacatcaaatcttgatattttgctaatcgtaaatgctccattaaaatttgattttgttcatttttaaatttaaaaatacttttaaaacctaaattctcttgataccattccgatgatttatctatgtcgttaacta

SEQ ID NO: 4306 - DNA, 3015 bp, Artificial Sequence
  Description of Artificial Sequence: synthetic nucleic acid sequence
ggtggacatcctctccttctcctgctatgtggtatcctctctctacttcacatgctcctctctcttaggcttgctggggcctcccagtgagatctaattcctgatactgcccttccctcaatgacaacagtctgcgctttgtctcccatttctccctgctttggttaaaatgtagctggatatgccccatcctcaccagacctttatttttccaaactgtcctgaaaacaatgaaaaccaaggtgaaaatagaggagaagctacttaatgataatacaccacgtagaatgtaacagtggttgtgaatgcttccatttaaaaagtacttaataggatggttatgggtatgtaaccaagcccttgcactgtgaatttttaggctggaaagtttttagtatcatagagacattatccacagaagatgagcaaatatgagttagggcatgaaaaagtaaatatataatattattattcccattttgcaaatgagaaaactgttgcttaaaggcacatatgcaattttcttaggtcacacacatattcaatgggaaagatgtgcatcagctctttctaaatatagagctatggctcttacacacaaagtcagtgaacattaatcagtgggtaagatgtgtatgggagtccaaacccagcacaaagtacaataggaagaaaagggtaacagcagcaatcatggcagaaagactagaaccataaaaaacggacttccagaaatttagggggtgtttacgaagccatttactaatatgccatccacaagtaatgttttactgggtaaggaaaattgtagatcccaagaataatacaaaagagagttaatgtcactctgagaccttgagcctagctagagggatgagaagaatttagctgtcctttgcaaggaagttagtggttacctaagaatcatacttcttctgaagaaatatatatgtattataatttgctgactttccatgttcattctttagttcactagtcacctgcgtaggtaagctagtaatgctgtttggaatccaataataatagaattggcttaagcctagcagactatgtatcaatcagctttctggcaattttgtttctagtttatcccaacctcattctgtgtattaatctcttcgattacaaatttcaagaataaataatttctttctattgttgataaaggagaaacatctaaacctgattgtacgtttaattgatctcaatgtaaataaacttgggattatggatgaattaatctaccagttaaaaaaatatctgtaacagagaatgcccctgctttaagcatagtcaggtaacctaatttcatgaaggcaggtttctttttttgcttgcaggaaatgtaagtgctgactcctttgttccttctgaatgttctatcaaagactatttataatgaggtgcaccattattcagttgctttaacaataaagagcaaagttgttgctaacctcatagaaacgagggctaagttaagacccttgttttctgaactcgagtagccaacctgattaaaaaaggaaaactaaaagatccacttccttctccttgtatttctcatcacaactgttcaaaatcctttctcccatacaacccactgaggtggactgatttgcatgaaattgtgtagtgggtgattaagaggtgaatctctgatgttgaagtcctagctttgaaacttactagctgtgttactatggcaggttatttcacctctttaagataagattctctcatgtataaagtgggtgcaatattaagttttacaggattggagtaaaaattaaatggaattggccgggcgtggtggctcacgcctgtaatcccagcactttgggaggccgaggcgggcagatcacgaggtcaggagatcgagaccatcctggctaacacggtgaaaccccgtctctactaaaaaatacaaaaaaaaaaaaaaaaaaaaaaaagcctggcatggtggcgggcgcctgtagttccagctactcaggaggctgaggcaggagaatggcgtgaacctgggaggtggagcttgcagtgagccgagattgcgtcactgcgctccagcttgggtgacagagtgagactctgtccccccgccaaaaaaaaaaaaaaaaattaaatgagataatgcataaaagtaattaattagtttagtgttaaatcactgttgatatgaagctgtgacccatgtggtccagtcttatagcagtatagcaataaaaaaaaaaaaaacatggcctggaaattttttaaataatccagtttgctcatgttctttacttacatttaacaagccccttgaagaggatacgcagccttcatcaacactttttaaaccctctttactgtcacacccactcagtcagttacttgactccccatccaaaatctatccttaaattccttctgcagccatagacaaagagcctctcttcccttcagtcgtccctcttctcccaatttcaaatcacaaaatcccagggggagacactcatttgaagagatctagggcagaaattgagtgggcagagtaaaaactctcttactgtgttgctacccactgttcgatggtggtaaagtggtcagcataagaatacactaaaagcactttctcccacaatgttgtctaattttctacgttctggtgcccttttaaatttgtcattcattcacattgtaaggttctgcaactggataactgaatcactgacaaatcaaattcaaagggatggcagtttggatggtttgagggcagatcattttggagtaaggtacccacagagtgagaatctgtgtgcatgggagagagagagtgcagtgattgtgggactttgcattggaactcagtgctgccctgtcatagtggaaagcaacactgagcagaactcagctgatgcacacagtgggagctcttaagtcagcattagccaaaggggaatcatccatcctagtggtcagaacctgagttccagctagccccaccaccgcaag

SEQ ID NO: 4307 - DNA, 3633 bp, Artificial Sequence
  Description of Artificial Sequence: synthetic nucleic acid sequence
tgtatggtcaaggtatctctaaggaaggagagctcattgatttaggtgtagagaatgatatcgttgataaatcaggtgcttggtattcttataatggagatagaatgggccaaggtaaagaaaacgtcaaaaattatcttaaggaaaatccacaaatcaaagaagaaattgaccgtaagttacgtgaaaagttaggtattttcgatggtgatgtggatgaaaatgagaatgaagacgattcaccaaaaactttatttgatgaatagttttttagttgactaattaaaaggatggcttatttagccatccttttttgtagtttttgatttgttctttaaaaaaagcaatttaaaatgagtgtagtgcaatttcatatcttgacacatatctgtcgataaacgtacaattagtatgtatgattcttatataatttcatataatcatattgattttgatatacaaagcaaaccctagataaaggaggtgtttatgtgaatttattaagcctcctactcattttgctggggattattctaggcgttgttgtagggtatattgttgcccgaaatttattacaccaaaaacaagttcaagcaagacaaactgccgatgatattgttagctatgctaataaagaagcagacaatattaaaaaagaaaaattacttgaggcaaaagaagagaaccaaattttaaaagaacaagctgagaatgaactgcgtgaaagacgtggtgaacttcaaagacaagaaacccgacttcttcaaaaagaagaaaatttggatcggaaatctgatcttttagataaaaaagatgagattttggaacaaaaagaatcaaaacttgaagaaagacaacaacaagtagatgcaaaagagagtagtgttcaaacattaataatgaagcatgaacaagaattagaacgcatctccggtctcactcaagaagaagctgtgaaagaacagcttcaaagagttgaagaagaactgtcacaagatattgcaatacttgttaaagaaaaagaaaaagaagcgaaagaaaaagttgataagacagctaaagaattacttgctacaactgtacaaagattagcagccgaacatacaactgaatcaactgtttcagtcgtaaatctgcctaacgatgaaatgaaaggtcgtatcataggtagagaaggtagaaatatacgcacattagaaacacttactggcatagatttaattattgatgacacaccagaagcagttattttatcaggttttgacccaattagacgtgaaattgctagaactgcactagttaatttggtttctgatggacgtattcatcctggacgtattgaagatatggtcgaaaaagctagaaaggaagtagacgatatcattagagatgctggagaacaagctacctttgaaataaatgtacacaatatgcatcctgatttagtgaaaattttgggtcgattaaattatcgaactagttatggtcagaatgtacttaaacattcaattgaagttgcccacctttcaggtatgcttgcagcagaattaggagaggatgttactttagctaaacgtgctggattattacatgatgttggtaaagccattgatcatgaagttgaaggtagtcacgtagaaataggtgttgaattagctaagaaatataatgaaaataacataattattaatgctattcactcacatcatggtgatgttgaaccaacctctatcatttctattttagttgcagcagctgatgcattatcagcagcgcgaccaggtgcacgtaaagagacacttgaaaattatattagaagacttgagagactcgaaacgttatctgaaagttatgatggggtagaaaaagcatttgctatacaagctggtagagagattcgtgtagtcgtctcacctgaagaaattgatgatttaaaatcatatagattggcaagagatattaagaaccaaattgaagaagagttacaatatcctggacatatcaaagtgacagttgttcgagagactagagcaatagaatatgctaaataattccataagccactgaccgtatttacggccagtggcttattaaatataatataaaaaaccgagcgtataaacgctcggatataatgatttattttaattgtaaatcaacttcatttatttcttttaaaatttcagctgtatcatagcaatttgtagcgatatttgcatatttctctgctaaacgataagcattaatgtataaaattaaactttctttagcgatatcttcagcgtcatcagatttggctggatttgaagttacaactaattcagcaaatttttcaggatcaatattaatagacatgaatgaataaacaactcctatatttttattagtttcatattaacacaatacttaaatacaaaaaagtaaagtcttttaattttcagaataattaatttgttaatgagacttttattatagtacggtatccattaaacttaatttatgagaggatgaacagagaatgagaatattgtttataggtgacatcgttggtaaagtgggcaggaaaatgattactacttatttacctaaaattaaacaaacttatcacccaacagtttctatagtaaacgctgaaaatgccgcacacggtaaaggattaacagaaaaaatttacaaacaacttttgagagaaggcgtggatttcatgactatgggtaatcatacatatggtcaaagagaaatttacgattttattgatgatgctcatcgaatggtgagacctgcaaattttcctgatgaagctccaggaacaggtatgagaataataaaaattaacgatattaaattggctattattaatttacaaggccgttcatttatgcaagacattgatgatccatttaaaaaggctgaccagctaatcgaagaagctcaaaaatctacaccatatatatttgtagattttcatgctgaaactacatctgaaaaaaatgctatgggttggtatttagatggtagagtgagcgctgttgttggtactcacacacatattcaaacttctgatgatcgtatattacctcatggcacaggatatatcacagatgtcgggatgacaggttattacgatggtattttaggtatcaatagagatgaagttattcaacgttttattactagtttgccacaaaggcatgttgttccagatgatgggcgaggcgtattatcaggagttatcatagatttagataaagaaggtaaaacgactcaaataaaaagactgttaataaatgaggaccatcctttccaaatttaaagggatatagtccattagtatgaatttaaacttgtaccactgttgaaatagtaaaacggtggtttattttgttatcatagagtatgaattaataccacaggaggcatgtgatatgaaatcacaaatatcatggaaagtgggcggtcagcaaggcgaaggtattgaatctaccggtgaaatctttgctactgcgatgaatagaaaaggttattttttgtatggatatagacacttttctagtcgtataaaaggtggccatactaataataagataagagtttcaaaatcgcctgtgcatgcgattagtgatgatttggata

SEQ ID NO: 4308 - DNA, 3312 bp, Artificial Sequence
  Description of Artificial Sequence: synthetic nucleic acid sequence
ctaaaacgagggatatttgggtcgaaagtatgtgttaaatcgacccactgagcctcttttaaagtatttaattgattccaaagtggatactgtgacatttgcctcacctctagctcgtattatgctgttgttgattcagattcttgacgtttctttttaactgcattgactaacactgttaatgcatctttcacttcattttctttacgtgtttttagaccacagtctgggttaacccagaatagagaacgatcaatttgttgtaatgaacgattaattgcagtagtaatctcttcttcggttggaatacgtggactgtgaatatcgtaaacacctaatccaattcctaaatcataattaatatcttcgaaatcttgaattaagtctccgtgactacgagaagtttcaatagaaataacatctgcatctaaatcatggatagcatgaatgatttgtccaaattgagaatagcacatatgtgtatgaatttgtgtttcatcatgcacagatgatgtcgctaatttaaatgaatgtacagcatcttctaaatattgttcgtgatattcagagcgtagaggtaagccttcacgcaacgttggttcgtcaacttgaatgactttgatacctgcttcttctaaagctaacacttcttcatcaatggctaaggcaatttgatcttgaacaacctttctaggtacgtctacgcgttcaaatgaccagtttaaaatagtaactggacctgtaagcataccttttactggtttgtcagttaagctttgcgcgtatactgtttcttttacagtaagtggggcagtccacttcacatctccatatataactggtggtttaactgcacgagaaccgtaagactgtacccaaccgaattttgttactaggaaaccttgaagtttttccccaaaaaattcaaccatgtcgttacgctcaaactcaccgtgtacaagtacgtctaaaccaatatcttcttggattttaatccaacgagcgatttcattttgtaaaaattcttgatactcagcatctgtaatgcgattatttttccaatctgctctaaatttacggacttcacgagtttgagggaatgaaccaatcgtagtcgtaggtaaatctggtaaatttagacgttggttttgtaattgcttgcgtttagcaaatggtgatttacgatgtgtcggtacactttcaaaatcgtattcaagatttttaaatgattggctttggaagcgttcataacgtgctttgtaatgttcatattttgacaggtcattatcattgaataagcgacgcaatgcatctaattcgtctaacttttcagtagcaaaacttaatccttctgcaatagattcatcaagtgtttcatcatctagtgatactggaacatgtagaagtgatgatgaaggttgaatgactaactgttgtgtgtgttgttgtaatgtttcgattaattgtttttttgcttcaatatcagccgcccatacatttctgccatcaatgattcctgcataaagtgctttactttgatcgaaattaccatcttcaatttgttttaagttatagccgttatcgtgtaccaaatctaatcctaaaccgcccactggtaatgaacttaagaattttaagtgaacacgttcaaagtaagtttgaatgacgagatattttcctaaaccttcatttgcgaaatagtcgtatgcttttctagtaatgtcttcataactttcgctgtcatcagtcactagaataggctcgtcaatttgaatatactcagcacctgcatctacaagtgactgtaaaacttctttatataaaggaagtaatgtttcaactttttcctcgaacgattgatgaccaccttttgataattttacaaatgtgataggaccaacaattacaggatgcgcatttacattaattgattgtgcatatttaaaacgttctaataacgtatttttttcaactttaggttctacgttgtcccattcaggtacaatgtagtgatagttggtgttaaaccatttaataagtgcacttgcaacatgctctttgttaccacgagcaatatcaaataataaatcatcattgacttcgcgtccttggaaacgttcagggataatattgaacaataaagacgtatctaaaatatgatcatataaagagaaatccccaactggaatgctatcaagatgataatttttctgaagtaaaagattttctttgtgtaaatcagtcagtgtttgatctaattctgctttgtcaattttatgtgcccaataattttcgattgcttttttccattctctttttctacctaatcttgggaatcctaagtttgaagttttaattgttgtcataatattgcctccttgttggcagtgattgatttagagtatgctgcgagttccaatgaataatctaccttttggaaaggtgtaataatgtacagaccgttgaagtattcatgtactgtatcaatgagttctttggaaagtcttaaacttaattctttagtcttttctttatcatctttaacagctttgaattggttaagtacatcgtctgacattttgatgccaggcacttcattatgtaagaaaagtgcgttgttataacttgcgattggcatgatacctatgaagaaaggtgtatttaaatgttttgtttcttcatatacttgaataattttttctttactataaacgggttgagttatgaaataactcatgccacttgctactttcttttcaagtcgtttaatggctccatctaattttcgtacgttaggatcaaacgcaccagcgatgttaaagttagtatgttttttcagcgcatcgccgtcagtgttaatacctttgttaaatcttagtgcaagttctgtaaggccttttgagttcacgtcatagacatttgtagctccaggtaaatggcctactttagaaggatctccggtaatagctagtatttcattgacaccaatgagtgataaacctaggagatgagactgtaatcctattaaattacggtcacgacatgtcacatgtacaagaggctcaatatcgtagtgttgtttaattaaacttgccgctgcgatgttacttactcttacggtagctaatgaattatccgccaatgtaacagcatctatgccagcttcatctaatttgcctacattatcgaaaaatgtatcagtatccaaatgtttaggtgtatcaagttctacgatgactgttgggccatttttaactttagaagtaaggttttgtttaagaactcgcgtttgcttttgagatgaagctttat

SEQ ID NO: 4309 - DNA, 3983 bp, Artificial Sequence
  Description of Artificial Sequence: synthetic nucleic acid sequence
tcaaatgacggatttataggctatcttattgaaagcaattctcattttgatacaatattaaaatgtctaatttttaaacttcaatcactatcatttttttatataacttcaaatacttttaaattaactaaaattgactaaagaggagcacagatttatggattatagagtactactttattataaatatgtaactatagatgaccctgaaacttttgcagccgaacatttgaaattttgtaaggaacatcatttaaaaggaagaatactagtttcaacggaaggcattaatggaacattatctggaacaaaagaagatactgataaatatatagagcatatgcatgcagatagtcgttttgctgatttaacttttaaaattgatgaagctgaaagtcatgcgtttaaaaagatgcacgtgcgtccaagacgtgaaattgttgcacttgacttagaagaagatattaatccacgtgaaattaccggtaaatactattctcctaaagaatttaaagccgcactagaagatgaaaatactgttatattagatgctcgaaatgattatgaatacgatttaggacatgatacttttttggaaacaatcatatctacttaaaatacttttcactataatttcaacattagaagagtagccttttgatgttaaaaaaaagtattaagcaactgactaaaagtgcttaatactttttgttatcagaaaagcgacgtcaacatagaaacaaaacttttaaacaatttattctaagttatgaagcttattaaaatacatttaactttttatcttagataaatactaacaataacgtacataatcgaaacctgatagtatataaacaatgccgtgtttaataataaaattccaattcttgctttaattcatctacatattctttagttcccgtcacaatcaaacgatctttatatcgtaactgtgtatcaccatgaggtacgattgaatcgttatctcttataatacgaacaaaaataatatcgccaccaaatgggaaattacgtaattgaatattttcatactgataatttaacatttgaatttcatatagagatgtttctacattacttaataaattcagcatattaggtgtttctattaaactttttagtaagattttattacttaaataattactaaacacctctataccttgatgtttcaatgtcggatcttcgtttgtgctttcgagtcgacatataacacgtttaacaccatgttttttagccattaacgcaacgcttttatttatatggtcatcatttgtagaacatacaacaatatctcgctcgaaaagtcccaagcgttctaataaatcttcttcgtaatctgctatttctatcatagtaatatcgtcagagagctttctactatcactcaaatcttttcgatagtataaagaaatatcatataattgagaagttaaattttgtgctattggaatagttaattgattctttccaatcatacttacttctatgcggcgtcccacttcattaggaattgggaacatcttcttgaatatcacgggtacgaagacacatgtaatcacagcactaagaattaaaatgcctgaagtttccggagaaatcgcttttaatttttcagcaattttagccgcagctataacaagtgataaagttgatgtaagtaagaaagcagatgcaatggtagttttagtgtcaaaccagcgtctaatgtaaaatactggtatcaattttgaaataataaatgaaaaaatgagtacaggtataataagtaacaacgatggttctttaattaaacttgggatatctaaatcgacacctaccatgataaagaaaattggaataaagaaaccataaccaaaggaatctaatttttcgaccatctcttcattaggtttaagtaaagaaacaacgacaccggcaagaaatgcacctaatatgtattcagcaccaacaccttcagcaagtgctactaataaaataataagtgcaaatactgctcttatacctatttgcgttgtaccatccattaacttttgtaagaaggacatacgtttaaataacacaccgattacataaaagacaactgtaaatacgactaaaatacctgtaagccatattgtactaccaccttcaccataaatagcaccataaacagttagtaaaatcatggtaaataaatctgctaatacagctactagtaaaataaattgtcctatcgttgtacgcataatgttcatttctttaagggttggtactacaactcctaaagaaattgttgaaatgatgatcaccattaaaaggacatcattaactaatcctaaccatttaaatgcaaaagctaaaacaaccgaaatcatcataataaatgcaaatactgtcagtgccagtttaagatgcccaggtacatccttttcatgtttatcttctccttgtcttggacgtgaatcctttttaaatgcattaaagtcaatttctagaccacttaaaaacattaaaaagataaacccaagcttctcaataccagctggacaatggacttctattgtaggtcacaatggttcaggaaaatctactattgctaaacttatggtaggtatagaagaaccaagtgaaggacaaattctatttcaaaatctaccagtagactctcaaaataagcgagaagtgaggaaacatatcggaattgtttttcaaaaccccgataatcaatttgtaggttctatagttaaatttgatgttgcttttggtcttgaaaaccaacttgttccttataaagaaatggtatctaaagttaatcaagtattaactgaagtagatatgataaataaagccgatgatgaaccccattcactttcaggagggcagaaacaacgtgttgccattgctggggtacttgcacttaatcctgatgtgctgattttagatgaagcgacaacgatgctagatcctcatggaaagtcatctttacttaaccttgtaaatgaagttaaagtaaataatcatgttacaattatttcaatcactcatgatttagatgaagcaatgcatgctgatcaaatcattgtattgaataaaggaactgtttttaaacaaggaacacctcaagatatttttaagtgcgaagaggcactaatatcggttggattggacttaccatttcctttgaaaatgaatcgacttttaggttttgattcaacttatgtaacttatgaagggttgattaaaaaattatgagtatacaatttaatcaagtgagttatatttatcaacaagggacaccttatgaatttgaagctattaaaaacgtttcactaactcttgaacagggcaagtattatgcaattattggtcaaactggaagtgggaaatccactctgattcaacatttgaatgctttattaaagcccactacaggttcagtcaacattaatggtttagaagttacaaataaaactaaagacaagcacttacgtcacataagaaaagaagtaggtatagtatttcaatttccagaatcccaattatttgaagatagcgttgaaaaagaaattgagtttggacctaaaaattttaatatgaacctaaaaaatgttaaagacaaagcttttcaacttcttcttgaattaggtttttcaagaaatgtgatgtcatcctctccatttcaaatgtcgggaggacaaatgagaaaaatagccattgtttccattttggctatggatccacaagtaattattctggatgaaccgactgctgggttagacccgaatagtaaacaccaagtcatgtctttaataaagaaaatacaaatagaagaaaataaaacgattattcttgtttcacatgatatggatgatgtagcacgttattcagatgaagttgtagtaatgaataaagggacgatagtagaaaaatcaaatcctagaaatttatttaatcaaaaaacgcaattattaaagtggcat

SEQ ID NO: 4310 - DNA, 3081 bp, Artificial Sequence
  Description of Artificial Sequence: synthetic nucleic acid sequence
tatgatcaacgtctaaaacatatagtgttttattttcgatgtcttcttcaaaatgctctttcgcgggatattcatcatcccattggttgttgttgaattcttccataatctgtttagcctctttgactaattgagtaatactaagtaaatcatctttagttgctaatctaatcatcttactaaaacacctcttttttagaattttaacgagtggtaacaataaatataaatcatgttgatacttttaagactcaatcaattaacgaaaatctgaaaaagttaagaaatgattgggattataccttaataggaataactttttattaaagttgtattttcaacaaatcagaattatcagatatgattaagagcctgtacatatactatatgtctcaggctcttaattcaaacgtgaatggttattaaatttaaggaatccaaccctttaagtatgaaattacacttaaagggttgaatacattatttttgtttaatgatttactcgcaagtttattttagtttgtttagtaaatcgtttaaaacagtatcttttttattcgctttttcaactagtttttcagtaaatttatcatttgtttttttatcaaaattgccattaacttttaaattattgtcttgttgaaatgttttaatagcagattctaattgttcgtcaaatatgtttgtttcgttatcaattggataacctaaagcttttagacctattttcatcgttttaacatttttatctttttcaccttgatgataagttttgttatctggaatgacattgagtgattggtattttggtgttgagatactaacatctggtctaattcctttaccatgaatataatggccatcaggcgttagccatttcatctctgtatatttaattaatgaaccatcactaaattcacgagtggtctgaacgatacctttaccaaatgttttagaaccgtaaactttagctttatgatagtctttcatagcacctgtaaacacttctgaagcactagctgatccctcattaactaagatggatactttcatatcttttgcttgttttagtgcttgattagaagtttttaattcttccttatccttacctttttctaattgaacgacagtatttcccttatcaataaagatgttagccatcttgactgcctcatctaataacccccccggattatttctcaaatctaaaatgatatgacggatgccttgcttatgcgctttgatgattgcagatttgagttcaccagaagtattgctttggaatttattgattgttagtacgcctacattgcctttcttctcatactctacactcttaacgtgaatggtatcgcgtttaatcttaatatccttttcttgcgaaccacgttttatagttaaagtaacatatgttccttttttgccgcggaccattttaacaacttgatcaagtggtttaccgactaccgaatgatgattcacttgtgtgacgatatctttaggttgaataccagctttttctgctggtgaatccttcattgggctagtaacacttatctgttcatttttcttttgcatttcagcacctatgccaacgaaatcacctgatacaccttcattaaattgttttgtttcttcagcagtcatatattctgaatatggatctttaagttctttaaccataccatctatggcagattgagttaatttatcagaactttgctttttgtaataatctttattaagtgtttgatagacatattcaattttttttaaatttgcacgttgttctttatttaaaccacttttttgatggctaattaaaattgttgatactacagtaatgatggatgttaaaagaataatacccaaaataacgagtatgaaatgccataatttaatttttatatgcttgctattcttagatggtgttgacattgtgttatcatcttgagatgttgcatgatttttttgatgatcattcatggtatcacatccttatacgttcatattgagttatacaaaatataaattcatagattatattcaaacttaatcattaacaagttatttaggaatgttcattctgtatgtattcgaatatttttaattatgatgtatgtaagtgaaaatcgcatgaggcttgagtagtacatgcaaaaaattaatatattaaacgaatgtttcattgagaaaacagcgtaattattttgtgtgcatctagcagaagttataattaaaaagtgtagagtttgaatccctttacattaaaacacctgagacattgagtcgtgtcccaggctctatcaatatttattaatgaaaagaatttaaaacttcaaccattctgtatagtcctcatataagtcatcaaatacagacattggtagggtgaattcgctatgtgtctcaatatattcagataatgtattaaaatcatcttcgtgttttggaaaggcaaggtcttcaaaaatttgctcagcaaaaacccctttatcgtcttttcttccgcgcacggtcataataaattgataaaatgaataattcttaaccattagcttactgtcacatcaataacttgtgtttcccctttaactactgcttgtacgtcttcaatatgaattgattcagtttgatcagagtttgtaataataataggagaaataatagattttgcattattattaatatattctaagtcaaaacgtataagtgggtcacctattttaatgtcatctccactttcaacaagtacttcaaaccctttgccatccaattgaacggtatctaatccgatatgaactaataactctaatccattttcggcttttaaccctacggcatgtttcgttggaaaaacattatcgactttgccttcaatcggtgaaacaacttcaccctctgtaggattaataccaaagccttctcccatcattttttgcgcaaacactggatcaggaatatcttcaattttgacatactcacctgtcaaaggtgcgtagattttaatgtttttgtcaacttctttagcttttccaaataactttttaaacatgtaaatgcactcctattttttaaaat

SEQ ID NO: 4311 - DNA, 3627 bp, Artificial Sequence
  Description of Artificial Sequence: synthetic nucleic acid sequence
gggcttctggttcccaattatttggtgtcccattttctcccaatctatttcctggtatatatggaggattccaaataaaatcaactgcaccattagaatgtatttctttatctaattttctgttaattcctaaaaagtcatgaagcagcctttcttgcaacaagggatgtacggtaccatctattgatactctggcttgttttgtttcagctataccgtctccatttgctcctaaaacaagcccattaatattaccgttaagataatctaaaaatgcagaaacgtttgtatttctataatcaacctgcatggcttgatgtgcatgatgcttagtttctgtgtgtgcgcgatgctgatgatctaattcattataataattaagtattgttctaaaattatttatcatcttggttctaaatgtgtgtcctatttgaataggaaagtctaaagttaataacattttatgaacctccttttattccttctctaaatgagatattctctttttaagttcttcattttctttttccaaattttctattttgtctaagtaaacacctaaaccgatgactgcctctatgtgcgtgactggaaaatattcttctccatctctatcttgtagatatcttatcgatacttctttactcatcaatcaatacacttcctactgtttcgttatattcctctaacacatttaaagaatagtcactagttttgaatccttttttcataagattattaacctttcttaacctacgattgaactgtgattgcatttttataatatctttctgtgcattactgaattccacttcaataggctgcgaaacaagggggtgatattcagtaagtttgacaacttttaaatcagtattaaatccgataggtttgtgtataaatcgaatagtattattttcatgaatactttctaatcctaaataattcgttgctacttcgattgttggtatgtcatcaagtgtttcttttaatttcttctttaactctgattgacttgtaatattatcatcatatattgtaggggcttctgatttaccatattgcttataatatggagacttatattcagcatatacatgataaatatctttacctttaagaactgcagttagatttaaaacactacttttactcgtaccaacatacatgactggattagacttcttataatcaataccaggttttttcgatttaaaaactcctctaaaagaatgtttaccttttgataatcctttagctaaaatcactttttgcgtcgaagcatgagcgctgtaacaatcaaaagtccctttcgacttatcatcaataaatacttcgataattccacctttaggtcctttttttagattccaagttaaggtttcattcccccacttacaatcaaatgtcttataaaacgaatctcctatatgttcagtagaccaagtcccttctttattaaaatttccagagtatgagaaatctttaggttttataggtttatagtttttcgtttcggatttcgactttttctttccatatccttgaatgtaggtgcgtaattcagttgtgtaaagaattaaagaaactcacacttcaacaaaaagttgaaaagttgcaatatccagagggagaattttggaaatctaaaatgcctcagtgttaatgatagatatgatgagagctatacaaatttcattttgaaaattatatcttaattacgatagcgtggactctcgagtataaaaagaagaattcacatttatgtttaactcagttatctataatttaaaaaaatcgcctatgacgtgaatagttgtcataggcgatttttaatatttactgatttattttttattaaaaatatacacaataatgtatatatcatgtatagcaataatttttaaattcactttaaaaatttgcaaataaaaaaacgccgtgtctgattacacgacgctaaacaaaggggatgggagaaatttttcacttcaaacaaaggggtatgtttgttatgtgattaatttcatgttcataatataacacggtaaaatatccttttcaacccttgtttattcataaaattaaattgtcacaatctgttcatattgtaagcgaattcaattctactaagctttcattaacttttcaaaagcatctaatttttgttcgaatacttcacaagcttcctctattggttgaggtgttgtcatgtcaacacctgcattttttaaaatttcaatcggatagtttgagctacccttttttaagaattcattgatatatcgttcaacagcaggttgaccctcagttaaaatttgatgacttaaactttgagctgcactataaccagttgcgtattgatatacataataattcatatagaaatgaggaatacgtgaccattctttactaatatcatcgtcagtttctactgcttcaccaaaatatagtttgttcagtttagcatattcttcattcatacgatttggcgttaacggctccccagcttcttctatttgatgtattttatgttcaaattcagcaaacattgtttgacggaatagtgttgctctaaatcgttctaattcttggttaagtaacaatagacgtcgttcatcatctaaatgtttgtccatgtagtcactaagtaaagcctcattacaagttgatgctacctcagcgacaaagattgtataatcgcttaaatttgatggttgattctgtctactaaagtaactatgtgcagagtgaccaaattcatgtactaaagtatataaatcagaaacagtgtctgaccagttaagtaaaatgaaaggattagttaaatgtccaccggatgtacgcttgattaacttcttcaattgtattctgattctttccaacaataattgaaggtctgttaatataaaataaaaaataactttcttcagaaggtaaatttttaagaacatactcttccattgctaaattgagggaaggatcattaatattattgttgctaataaatttcataacattctctccttaaataagtctctctatatgcccttaccctagttatgaatcatttatagaaaaatttccactcttttactcatttatgaatgacattttataattttcttttagttcacttctttttcatagaaattagtttatttgtcaagtaaattttagtacaatataatctagctatgatttaagggaggactcgtaatgactgttgcagaagtaggtaatatagtagaattttatgacggtttaagaggccgtgtcgagaagattaatgataactctgttattgtagatttaactattatggataattttaatgaattagatttaccggaaaagacagttatcaatcataagcgatacaaaatcgttgatcaagaaggttaattaaaatgaaaaatgtttctaaagctttgatttggtttgttataagcttcatcatctttcacgcaatattatttgtgatgtggggagaacatcaagaatactggtatttatatactggcattatgttaatagctggaataagttatgttttttaccaaagagacattgcatctaaacgattattaacttccataggcatgggtataataacgagtgtcgcactta

SEQ ID NO: 4312 - DNA, 2943 bp, Artificial Sequence
  Description of Artificial Sequence: synthetic nucleic acid sequence
accttcatacgcggccattcacataccacacgatggtcaaattaatgcacatcattacacactggcattattagaatcaatgaagttaagagatattaagcgttatgagtctacagaggtcacttcaatagaacggcataatggctattattcagtgaaaaccgatcaatcttcaacaattgaagcgcacaaaattatcgttgcaggtggcgcatggtcttcgcaattattaacacaatatcatctacaacgacaagtgattggcgttaaaggtgaagttatcttattagaaaataacgatctttcacttactgagacattatttatgactaatggttgttacatcgttccaaaacaacccaatcgttttttaattggtgcgacgagtgaatttaataattattctgtcggtactacagatgaaggtatggattggcttcttcgccatgcatatcatcgtgtacctcaactaaaagacagtcatatactgaagaaatggtcaggagtaagaccatacacagaaaaagaaatgccagtcatggatcaaattgatgatggcttatacgtgataagtggtcattatcgaaacggaatattattgtcacctattatcggtcgtgacattgccaattggctactttctggtattaaaccatcacgttattcaagttttacagttacaaggaggaataatcatgaagtgtatcattaatggcgacctcttcactttcgatcagaatcaatcgatacaagaggttttacattcacttgaattagacccaaaacgagtgattgttgaactaaacaaagaacttatcaagcaagacaaatatgaagaatatactgtaagagaagacgacagattagaattactagaaattgttggaggcggttaatatgtttaaaataggaaatttagaattacaatctcgtttacttttaggtactggaaaatttgaaaatgaagaggttcagtcaaaagcaattgaggcatctgaaacaaatgtacttacatttgcagtaagacgtatgaatttatatgatcgtaacctacctaacccacttgcaaacgttaatttaaaagattttatcacttttccaaatactgcaggtgccaaaacagctcaagaagctatcagaattgctgaaattgctaatcacgcaggtgtatgtgacatgattaaagtcgaagtcattggtgatgacgaaacattattacctgatccattcgaaacatacgaggcatgcaaagtattgttagaaaaaggttacactgtttgtccttacatctctaacgatttagttttagctcaacgtttagaagaattgggtgtacacgcagttatgccacttgcatcccctattggtacaggaagaggtattaataacccattaaatttaagttatattatcgaaaatgctagtgtacctgtaatcgtagatgctggtattggttcccctaaagatgcgtgtcatgccatggagcttggcgcagatggtattttactcaacacagccatttcagcggcaaaagatcctgtgaaaatggctgaagcaatgaaattaggtataaatgctggcagactttcatatgaagctggacgcattcctgttaagtatactgcacaagcatctagtccatcagaaggtttagggttcttgtaaaatgtcgcgttatgaacgtcaaacacggtaatgtttttagagtatggtcacgattaaacaatgactatcgtgatataaagttacagtccactcgaaaagcattcgaacaagaattacacccgtatgtgttgaaggatgcgggaacatttaatcaagcaatgatggagctaggggcgttagtatgtacgccaaaatcaccattgtgtttgttttgtcctattcaagaacactgtgaggcatttcatatggggactacacaagaattaccagtaaaaaccaaaagtttaaataagaaaaccattgagcaaaaagtttttcttattcgtaatgataatggtcaatatttacttgaaaagcgtaaagaaaaacttcttaatggtatgtggcaatttccaatgagagaacaaacaaatgcaaacgatgtgatatctgatgatttaggaaaaagtatcgaaacaattaacgaaccagtatttaaattaaagcatcaatttacccatcttacatgggaaattaaagtatacaatgttacagcacctcttaatataaaggaaaatgatttacctaaacaaatgacgtggtttaatttagatgatagggagcagtatatatttcccgtaccaatggataaaatatataagtttattgaaggttaatttataaacatcaatctcaaatgccacttataaatgataggttaatcaagcatattaaaatatgatataatctaaatggttaaatacgataaaggtggtgtggagtatggtaaaggaatccatacctaaagaaggagaaaacattaagattcaaagttataaacatgatggtaatattcatcgtgtctggtcagaaaccacaattttaaagggaacggaacatgtgattattggtggtaatgatcacactttagtaactgaaagtgatgagcgtacatggattactcgagaaccagcaattgtgtactttcattctgaatattggtttaatgttatttgtatgtttagagaagatggtatttattattattgtaatttatcttcgccttttgcatgtgacgaagaagcgttaaaatatattgattatgatttagatatcaaagtttatccgaacggaaaatatcatttacttgatgaagatgagtacgagcaacatatgaaccaaatgaattatccacacgatatcgatattattttaagaagaaatgttgatattttacaacaatggatagaacaaaaaaaggggccttttgctcctctttagagcacagtggcgatgata

SEQ ID NO: 4313 - DNA, 3454 bp, Artificial Sequence
  Description of Artificial Sequence: synthetic nucleic acid sequence
tcttgcattttatttttttcttcaccagaattatggtacttaggacttctttttttaaattcctcaaattccttcatttcttcctcattcatgtcattaaatcgattgatcacttcacctgtacttttgtttactacagcacaaaattttataggagttccggctgcatctcttacaaggtgttcaacataatattcattagcattgcttctatctatatttgttttaaattcaagaacttgttgcttattaatccctttattaatgtaatagttcgagacaatttgttctgcttcttgagcggaaatttgtttttgagctgttttttgtttttgattactattagaatttgttacgctcccattagtttgcatattatccgttttattttgttcttcttttggattgctttctgtttttttttacattttcttgtccacatgctgttaatattattgacgagagtgctaatgttcctaatagtttcaatttcattttatatccctccgtttaaaatgttgttaaagttcacctaaattataataacattacaatatttatgaatatacaatattcataaatacgttaaagttttttgtgtttaagagcttagagaaatattctattatgttgaaagaggtagttttaaatataaaattgctaattgtatatatattaaacgaggggagacatattgaatatttacattgccatcgtattaggattaatttttgtattcttatctgatatggattatagaaggagaaacaatagtacaaatatggataagaaaatgataaagattagcttttttacatagtgtaattactttaattatggttagtttagctatatatttatcttattttaaataatcatacgaagaaaatatagaaaaaggtaaaaatacccttagaagtagataatctaagataatgtaaaaagagatgtgtcataatcagatattattttttcacaatttattatcaatgaacttttgcgatataatgtgttgatatactgcagtgttaaactataatgagattaattagtgtattagaggtatatggtatctttattaagttgtttaatacgaatctaaactaatgtcctaaaatagttaaaggttttgaagaaatgttttaataaaataacaataattattattttattaaaacattctcaaccatatattttactaattaaaatttttaagaaggagaatttatttgagtttaaaggaaatatggaaagttctcataaataaaaaatggcaaactgaagaaatatgttatttaatattgtatatatttttagcgagtatttttaccacgccattgtttggtattcctttgggagttttagcatacttatatcttaatgaagaaatattgaagtagttagcatatatttctcattaaacttcaaatcgattttttattgaaagttggaataatcattttagatgttatattaaagacttttacatataatatatcttaaaaatataaatgattaatactaaactactaaaactgtttattagaaataatgccgtttttacgataattgctacttcaaatataatttttttactaaaattaaagatatcaattaaataatactctactgcttgttagttgcattcatttccaaattattcatcatcttctaaaaagttggttacattaatcgtaatttctttagtattatggttaataattatatcttcgttataaccgagagatttaacttgaaccgtctcattatctatttttaatgctacttcgacatgttgatatttctgtaatatgagtaaagtatcttcattggctacaacatttataggcccttttccgttaatcgttattgtccattctctaaatttcatttacatttctccttttacattatagatatgattgattattcttaatgattttcgatcattgaaaactagattaaaattattatgattgaataagtaaaaagacatagcacatcttgctcttttttaaattgagaaataaaagtttcaacagatttctagaactgtcatatttaattttatttgaaaaatatatatcaactactttttaatatttatcattataaaatatgattggaaacttttgattatttagttattttatataattactttaacattacctttgtacttgttatcttatcattcatatatgataatttgtctatatatcttaagtgactcatttcaattcataggtgttatagtataaaattaaaatactgacatttaacaaatgatttaaagaaagatattttgaaacagtaatgaacaatctaaatacaataaaaaagaagcgcatttgtaggtttatacttaacaaatgcgcttctatatcctttttagttaaaattttagaacttaaaatcatttcaattacgctttaaataacttagaaattatcctcatattttttaacccttgaatattaactctacaataattggaactcattataagtgaatgtgtcctttggtatatctataatttttagggtctttaggtggaacaagcgctctactaatattcagtaatccaattttaccacataacattacgatgataataataaactcagtccaattatagtattcggaagttaaatccatagtgagaccgactgtaccgaatgctgatacgacttcgaagagtattttgattaaaggtatattggaattgattatggtaagtataaacgtaaccataccgataaatgcaatagaaatgagaatagttacgaaagacaactgtatgtatctttctgatatttctctattaaatatagagttgtttttttctttgcgtatcgtattaaaaatagcgattgttgcaataacaaaagttgtaacctttataccacctgcagcactcaatggtgcacctccaataaacatgagagccataagtaataaagctgtcggtgttttaatgtttccaacgtcaattgtgttaaatcctgcagtccttgttgtcactgattggaaaaatgcatttcctattttttcaattaatcccatgtgtaacatagagttttgattttctagtaaaaagaagaaaaccgtgcctatcaaaattaataatccagtggtagttaacacgagtttagagtgtaaggataattttctaaaacttttggcgttccacaaatcaaccacgactaaatgtcccaaacctcccaaaatgataagtattggaatagtgataatgattaccggatcatttgaaaaatcgattaagttgtttttaaaaagggcgaatcctgcgttgttaaatgcggaaactgaagtgaataaacttaaaaatagacctttacctatgccaaattttggaataaacgataaacatagacaaagtgtaccaaataattcagtggcgatgctgtatatggctagatgtttaataagt

SEQ ID NO: 4314 - DNA, 3172 bp, Artificial Sequence; identical to SEQ ID NO: 3876
  Description of Artificial Sequence: synthetic nucleic acid sequence

SEQ ID NO: 4315 - DNA, 3021 bp, Artificial Sequence
  Description of Artificial Sequence: synthetic nucleic acid sequence
tattagcgataaaactaatttgagaaatattagcaacagttttagggtaatagcctagccttttacagttctctataatttgatcttttaaataataatcatcatgaaataaaacaaactcttcatctttcaaatctgccatgtctactttatttaaatgtgctaaatgatggtcattacttactactaataataattcttcattatataaagaagttgaatgaaattcagtgtgatctacaggtaatgtagtaataccaatatccacatcatcattagatgttaagttctcaacaattttaccaccaccctcaatcacttcatatgtcacattaggatagagtctgtgaaactgattcaatgcatttgtaaacatttgaacattcatcattggtgataagcctattttaatatgacctttttgaacgttcacaatgtcattcatttctaaagataatttctcgaataaagctaaaaattctaaactattatcataaaatgtttgacctatatctgttagttttatttgtttttgtgaccggtcaaacaatgtaatatcgtattcattttcaatatttttaatcgctttgctaatcgttgactgtgcaatgtataagtgttcagatgcttgcgtcataccaccttgtcgtacaacttctacgaaatatttaatttgtttaatttccatttacattcatccttaattatcaacatttgattgatggatatcttctctcatagaaccatcgtttgatatctagcatttttttaacataacttcttcaattaatcatttacactaacactcattgaacaataattccgtgtatataattgttttaattgactaataccgattatttttcatcattatcatgatgctctcttttacgataacatgttttacaaatataattactttactaatttataaatcatgtgaagaaatacatgacaaataccataaatgaaaattcctgtgatattaacattcaatttatatcctttttagcctattgaaattttactatattaacttaatcactgaggaaaataatttttgttaatttttcagaatttttagacaaaatatttatcttctgtgctattatattaattatcagaatcagccaattcattttatctacatgtagatgattttttaatacgtattgttaaggaatgtttgctgactcatgttaatagtaagttgatgttatggaggtttgttatgggaagtttttttaatcggatgactcgaaaagagaatcctactatttatcaaagtaaagatgggcatcttaaacgcacattacgtgtacgcgactttcttgcactaggtgttggtacaattgtttctacatctatcttcactttaccaggtgttgtcgcggctgagcatgccggacctgctgtttcattgtcattcttattagctgctattgtggcaggtcttgtagcctttacttatgcagaaatggcatctacaatgccttttgctggttcagcttattcatggattaatgttctttttggtgaattattcggatgggttgccggttgggcgcttttagcagaatactttattgctgttgctttcgttgcttcaggcttttctgctaacttaagaggtcttattgcaccattgggcatttctttacctaaatcattatctaatccatttggaagtaacggtggtgtcattgatatcattgctgctgtagtgattattttaactgcattactattatcacgcggaatgaacgaagccgctcgtatggaaaatgtattggttatattaaaggtgttggccatcattttatttgtgattgttgggctaactgcgattaatttcagtaactatataccttttattccagaacataaagttactgaaactggcgactttggaggttggcaaggtatttatgctggagtttcaatgatttttttagcttatattggttttgactctattgctgctaattcagctgaagcgattaatccacagaagacaatgcctagaggaatcttagggtcactcatagtagcaattgtattgtttgtggccgtagcacttgttcttgttggcatgttccactactctcaatacgctgataatgcagagccagtaggttgggcattacgagaaagtggtcatggtattattgctgcaattgttcaagcaatttctgtcatcggtatgttcactgcattaatcggtatgatgcttgcaggttcacgtctattatattcataaacgtacttttcaactgtcgataatctttttgtcgatcacagtgactatatttatagtttagaaagtctttaattattttactatctttaatcatatctttggttaaaaaacgtatcgcttcttatggtgcatagatatcctttaacacgttatcatcaccatagtaaactagagctttattaccctgtgcaatcgtttctaatatagaatagccgagcgtttcatatggcgaactagatacataaatataactctgtggttctttttcattaatatgaatataatcattaagatgatagtaatttatcaaatttttgtaaagcatttctgaaggaccatatcctattaaataaagttgagcatcatcaacaatttggtttttaatgatgtaattaaacaatttaataatatatgaaatatctttaacttcatcctcaaaacgtgctttaattaaaaaatttcgtttagtatttatcggctctgattttaaatcgatatgttgtgcatttacgtattgattaaaaacccgatgatagtcatatttagctataaattcatttttaattctagctgtactcactcgaacacaatcaatacagtctaatgctaaatctatattctcattaatatattccaatggaccatgtatttcaccaacaatcttaatcttgctatttaattttttaactagatatgcatgattaaaaaaggtttctctagtaattataagtaggtctccatgagcaagttcttttccacta

SEQ ID NO: 4316 - DNA, 4028 bp, Artificial Sequence
  Description of Artificial Sequence: synthetic nucleic acid sequence
agaaaatttcatcattccaagatattcttccattattagaacaagttgtgcaggctagtcgaccaattttaattgttgcggatgaagtagaaggcgatgcacttactaatattgttttaaaccgtatgcgtggaacatttactgctgtagcagttaaagccccaggatttggtgatcgacgtaaagcaatgttagaagacctagcaatattaactggtgctcaagtcattactgatgatttaggtttagaacttaaagatgcatctcttgatatgctaggtactgctaataaagttgaagtgactaaagatcatacaacagtcgtagatggtaatggtgatgaaaataatattgatgctcgtgtaggtcaaattaaagcacaaattgaagaaactgattcagagtttgataaagaaaaattacaggaacgtttggcaaaactagctggcggcgtagctgttatcaaagtaggggctgcaagtgaaacagagcttaaagaacgtaaattaagaattgaagacgcattaaattcaacacgtgcggcggtggaagaaggtatcgttgctggtggtggtactgcgttagtcaatatatatcaaaaagtaagtgaaattaaagcagaaggtgatgttgaaacgggtgttaatatcgtattaaaagcattacaagcacctgttagacaaattgctgaaaatgcaggattagagggttcaattattgttgaacgtttaaaacatgctgaagcgggcgttggtttcaatgcagcaacaaatgaatgggttaatatgttagaagaaggtatagtagatccaactaaagtaactcgttcagcgttacaacatgcagcaagtgtagctgctatgttcttaacaactgaagcagtcgttgctagtattccagagccagaaaataatgaacaacctggaatgggtggcatgccaggtatgatgtaaatattttattgattttagacatcaatataagtatttaatttaaattactatcaagcctctcaaaagttgaatagacttttgagaagcttttttaggtatgggttaaaatattcgtaattaaaaaatcatcagataaatcactatatagtaaagttataatgtttagtcagtaaaactctaagaaatcaacgattttaatgcagttataaaagtgttatttcaatgttgaaagtaataaaaagtctttagtattattaggggaaattaaattgtgaaaaattaaaatacatgatatattataaattaaataacgtattgtgtatattttatcgattatgctcacactgtaaatcagtatcataagcatttgatatcgaagtttaatttaaatcaaaaaattaggaggcacatacaactatgaaagacaacaaacctaataattcgaaattaattcaaacatatttaagtaagaaaactttaagatatggtacagcaagtgcattaacattggcactctatttatttaacagtaacgtaactgtgtatgcggatgaaaatactgcaaaccaaaatcaaggaacatcaccaaaaacttcacagacagcacctacaaataatactgaaaatacagatgccacagccataacaacagatcaaaataataatgatgaagaagaatacgatgcgtcatatgaacttccaattctttatgtaactgtctggctagatgatcaaggaaatattattaaagatgctgtggaagatgctaaaacccctgcttcagaaaggcaaccggtgaaaattcctgggtaccaacattatagaacttctgtgagtgacggaattactaagtttatttatcgtaaaattagcactgcacaatcacctatagttgaaaatcaaaaacgtatggtcgtggcatagctagttctgctaacgcaggttgataagcttccttcaaatgtagttgtatcgtatacttatccttaactttgacatcatcaatcagtgttgaaagtcttaaccatgaatgtagtttcttattttgttgtactgcatcgatgtttttcttcactgcatctgcatcaaatttcgtaccatcatgaaaagatacatcatcccttaaatgaaacgtatatgtcttaccatcaggtgaaatgtcccatttttttgctaataatggcttaataccatccttggtattgcgaactaacggctcataaatcatactttctgctgacattgaacctccataaacatggggattcatatctccaatatctttgacagttgtatatgataatactttattctcttttttctctgttagttctttgttatttccacaaccggctaaaataattccagatacaaaaatgactgtacttagttttgtgagtttattcattgctttcctctttcttttcgaaaatatgtaaacttatatcattacgttttttatttataaaaagttaagtagttcgtcactaacgctaaatcctgtttaaaatgatgtaattcgaattgccttgatagttgttgatgtaaatgtgtgtcacagtattgtttaacagtattttcataacgtaataacaatgtgtcaatcatcggtgttgcaacgtttaatgctcttccaatcgcttgaattatcaaagtacgataataatcttcactcggcatgcgtggtatatgtatgactccttgttcatcagtatcaacatgtttgtatggtacggcagaaaaatcaaaatatgcaccttgatcgtccggattagaaaacggatcgattaaaattgctgtatatcgcacataaagtagatactcttgatgaatagctggtaaatttttaaagttttcaatatctacttcgcgcatggtctcataacgtatagggtagttttctttcaccataaactttagaagattgaccgaaggtacctttaatttttttaatatcatcatcatttcttgccacattaatcgcatttcgtgtattaaggtcattgtgattggaccctctggaaatagcttatatacatatactggtactttcgtcccttcaaataccgcctttaatgaaaattgattcataaacaatggtgggtgtacataaagtgaactattatgtatctccgcatgtagtggtgtgtccatcgttgttaattctatattcaaatagtcaaataaagacttaagcttacacaacgtcatagactgagattgagtcgaacctacgaataattttgatttaactcgtgtggttaggacacaatgtggttgtgctttatcaaatattcgggtatcgcctagataagtggaaaatgaaatcacttcaccttcacattgaacatctgatagtaattgcttaacaagcatatgtgatcctaatgttggtgagaccaagatgatttgcttaatacgctttaatgtggacttagataattgctgtaatatcggtcgatacgcatcggcagtacatgctaaaatcaccacgtcataatattcagtaatatctttaacatctttaaaaaaatgtctaaccgtaaacttacctgaaaaacactgatgtgcatcattttgagtcattactgaaaaaaagccgtcacgttgataagcatcaaagactctcttagatttggttgatgcatgaacgcgactcaccatatcaactatatgttctccatgtaaatgacatagtcgagcaagttgaatagcgaccggtccactaccaaccattaatattttagacatgttcaacaccaacttttgatgccactttacaataaagtgcaatatcaaaaatctgcttcggtcgtgtttgtagttcttcacatcgccactgtgtttcgtcagttgcttgagatggataattaaacaatgcttttatatcatcaccgtatcgcatagctacaacaacttcatcattcgtcaatgtgtaaagttcattcaaaatgtcatatttgataggtatcgtcgaactgaatataatatgtgtcacagattggatgtcttctaattgatcaactgtttgattactaataacgatatcttcatttggcgctagtacattgacga

SEQ ID NO: 4317 - DNA, 3697 bp, Artificial Sequence
  Description of Artificial Sequence: synthetic nucleic acid sequence
tgtacagaacctaatgctggagctaaagtatcaattccagttttttctactaattcttgacattctttagggtctgcatagataacgccatcagcaactacgtcgtcttcttgtccaccaactgtacctaattcagcttctacagaaacgcctctatcatgagcatactcaactactttagaagtgatttcaacattttcttcaaaaggactatgagatgcatcaatcattacagatgtgaatccagcatcaattgcttctttacatttttcaaagcttgaaccgtggtctaaatgaattgctactgggattgtgatgtttaagtcatgcattaaaccttctaccattttcacaactgtataaaaaccactcatataacgagctgccccttcagaaacacctaaaataactggcgcattctcttcttgagacgcttctaaaatagcttgtgtaaattcgaggttattaagattgtattgaccaaccgcataaccgttttctttcgcatcgattaacatttctttcattgaaactaaaggcattaaagttcctccttgagtgcaacagtgcacgtttttttcaacgtcattatatcaaaaatatatactgattgcattcgaatattttatttaatattgatattttttataattagttgtttttacgtttttggaagcgaatacatttcgaaaaatgttcacatattgcatatctatctaggattatttacaatatttcagtaaagagattggaggtttacaatgtcaaaaatcttaaacacacaattaactggtatttttaatcggcttgaaaaacaagagttggatattcaaatggcagctcaatgtctcattcaagcaattggtggagaaggacatgtctatatcaaaggctacgatgatttaaaattctatgagtcattcatattacaaagccatgaaaaattagcgtctagcttaccacttgaagatttacaaaattttaacgatatagatacaacagatagggtactgttattttcaccatactacacttcggaagttgaaagtgatgtacttcaacttattgatttagatgtcgatttagtgcttatttgtaataaccctaaacgagatgattttcctaatcatttaattcattatgttaatttatcaacacctaggcccattgtttacacagaagattatgataaaatcattcaaccacatccgatggccttaaattatatttattatgatatttatactcaaatgattgagatgactagagacctagatttatagaatatgtgtgaagtcgttcaattattttctataaaataatttcatccgtgtgattaactgatgaagcaacaacgtataataattataaccaaaacatctaatctataatgataaataaagtacactgttaaagttttaacaggcaattaaaaatggtcatttccttgttgcttttaaggaaatgaccatttttatttatttttatattgtttgcgtatcaaaacaattatttttgttggtaattcaacgccgcttctacaaatgatttaaatataggctgtggacgattaggtcttgataagaattcaggatggaattgacatgcaataaagaaatcatttttaggtatttcaataatttctactaaacgaccatctggacttgtacctgaaaataccataccgttactttctaattgttccctaaactcgttattgaattcatatctatgacgatgacgttcttcaatatcgtttttattataaattttctctgccaatgtaccttctttaatgtggcaaggataaagaccaagtcttaaggttccacctaaatcttcaatatctttttgttctggtaataaatctataattggatatggtgtacttggatctaattctgctgaatgcgcaccttcatagcctaaaacatgacgcgcaaattcaacagttgccaattgcattcctagacaaatgccaaagaatggtatgttattctcacgggcataacgaatagctgcaattttaccttcacttgctctgaatccaaatccaccaggaactaaaataccatcaacgtcggataaataagcctcaacattatcatcattgacctcacttgaatcaatccattttaccacaacgtcttttttaaatggataaccagcatgcttaagtgattcaacaactgatagataagcatcttgtaagctcacataatatcattgaaaatcctgtcctaacaactgcatggtcatccgctataactattttcacttcaattcccccaacttacatcatcaacttaaatcggtatatctaatgtaattatagtacctctattaatatgtgtctctatattaacatgaccgttaactaattctgcacgttctctcattccgtacaatccaagtccagagcctttagggtgatgatctaaactaaaccctttacctcgatccacaacctctgctacaagctgcttgccatcactatgcgtacttacctcaatttcattaacctcagcatattttagagcattaaatacaccctcttgaactacacgatacacaactgtttcaatttcattatcaaaacgcatgcctttaatgttcgaatcatatttaatatgcataccataattttcttcaaactgtttaaaatatgatttaaaagctgcttcaatgcctaaatcgtcgagagaagaaggtcttaattcaacagacatatttctaatatcatcaataagctgtgataataagccttctatacgttgagatgtttcagctaacaccttatccctgtgcttatacttcaaaagccttagttcaacatctatattgagcatatcctgtattacactatcatgtaattctctagaaatacgctttcgttcattttcttgtgcttgaattgaacgatgtaacattttttgttgatacattttttcttgcctttcaatctgaggcgccacattctgtaaggtaaatgcactaatacctctttgttcatcaatattttgatacatagctgtaaaaggcttaatttcattatcttttgtcttcataaatacttggaaattggaatgttgtaattgcgttgtctctaaaaaacaatctttacacgattgtacatcatattcattagagtatccttcgcatcgatgacaaatcgcatttgtcatagcattataattatcttcctcagttaaaatatcttttgctgcgtcattcatagcaataattttgccttgtctattaacaaatacaattttctcgttcgtggtttcataataattcttaagtaattgctctaaacttaaatcagtttgctccaacatatttaccacctagtttatttctgtaaaaataccgatttgtttttcaatattaagttggtccaatgactgaggtaacggctgatgatttctttgacctaataataaaacgccatacattgaattttctaaccataaagggactgcaactacagctgtcaatgactcactaagaatgattggaaatttaactttctcttctggagataaagctgtatctacatcagcaataaccatacgcttaccggttttcatcaccattccagcaagccctctaccctttctcaaaatgataagtttatatctatcatttgtgttacctgaaacatattgccatttaattggtgatgaagtgtgat

SEQ ID NO: 4318 - DNA, 3417 bp, Artificial Sequence
  Description of Artificial Sequence: synthetic nucleic acid sequence
gaacatatagatgtgctacatcaatctagtagacagcaatataatggtcattttgttattgctactatccatcaattattgaggtttaaacagcattttgatactgtatttgtcgatgaggtagatgcttttccgttgtctatggatccacaattatcaaatgcaatacaacttgcttcaaaatcgaatcattcacatattttcatgacggccacaccaccgcgtcattttttaaaacaattccccccagaaaaaataattaagttaccagcccgttttcaccgatccccccttcctattcctaagttcaaatatttcaaattaaaatcaacacgaaaacaaaatttattacttaatatatttagatatcaaattaaccaacaacgttttactttggtctttattaataatatagaaattatgaataaaatgtatcaacagtataaaatggacatccctgatttgatttgcgttcacagtgaagatgatttacgatttgaaaaaattgaagctttaagacgaggacaacacaaaattgtattcactacaactattttagaaagaggatttacaatgacacacttagatgtcgttgtagttgatgctggaagttttcaacaagaggctttaattcaaattgctggtcgcgtaggacgtaaacagcagtctccaagtggcttagttttatttcttcatgaaggtgttacattatcgatgattttagctaaaagaaacattatttcaatgaatcgtttagcaattaaaaggggatggattgatgcgtaaatgtatccagtgcaatcaacctattcatgagaccattcatatttataacttatttaaaccacctcagatattttgtgaacgatgtgaaacattatggcttaactccaaaattcataaagatggtaggtgtcctaagtgccttaacaacaaaatttctactgatggcgaatgtcatgactgtcaattcttaagtaaaacattttatttaatggaacaattgttttgtgattatagttatgatggtatgatgaaagaaatcatacaccagtataagattaagcgagacttctatttggcagaagtattggcgagaaaattagttttacctcaaacgcaatatgattatatagttcccattccttctccaattgaacgcgacattgaacgtacatttaatcctgtgaccactgtcttagataaaatgggcatctcatatcaagatgtattaggtacacatatacgtcctaagcagtcaaagttaggaaagattgaacgttcaaaagcccctaatccattttatataaaagatgaagagataaatatcgaagggaaagtaatactactcatagatgatatttatacaacagggttaactattcatcacgcagggtgtaaattgtacgataaaaaagtcagaaaattcaaagtgtttgcgtttgcacgataacataaacatggtaaaatataggtaagaagtatcaatatagaggtttaaggagagattactatgattagatttgaaattcatggagataacctcactatcacagatgcaattcgcaactatattgaggagaaagtaggtaaattagaaagatactttaacaatgtgccaaatgctgtagcacatgttagagttaaaacttattctaattctacaactaaaattgaagttacaattcctttaaaagatgtcactcttagagctgaagaaagacatgatgatttatatgcaggcattgatttaattactaacaaattggaaagacaagtacgtaaatacaaaactcgtgtaaatcgtaaacatagagatcgtggagatcaagatatctttgttgctgaagtacaagagtctacaacaaacaatcatgcagatgatatagaaagtgaaaatgatattgaaattattcgttctaaacaattcagcttaaaaccaatggattctgaagaagcagtattgcaaatgaatttattgggacatgatttctttatttttaccgatagagaaactgatggcacaagcattgtttatagacgaaaagatggcaaatacggtctgattgaaacaactgaataaattgacttgtatattatagactataatattgccgaagttgaattaagaattcttatcagtttattgaataaggtaataatgattaatagaatcagggttactaatacacatatgtattcttagtttgcttgactacaaaatagaacttaataaacataggctggggcattgttttgatatgttcacttcaaagtagatatgacattaatcaagctttggagttcgtattcttaataagtgtctcagcttattttgtttgcttaaattttgaattaaccaattaaatgagtatttaatagacagtatgcttacaaatatgctagtgtgatttgacgatttatatttaaactttgattttaaatttctatattagttaaaggtatcgcgttgcgttattttttaaaaacgtgtttgattgcgagaaaaaaatgattgcaacgtgttaaaataaaattattgttaattgaaatgtttatatacattttataatataaatgattgtctatagaaaaaggctgttgccagtcgaatcaaagtgaagtgttgtgaaaaattgagttaacacgcattacttcatgagtatataagtataaatttagcgatataaatgataagataaattgttgtaagccaaacagtttttagttaaaggagcgacgcgtgcaatgggatttttatcgaaaattgttgacggcaataaaaaagaaattaaaagattaggtaagttagcagataaagtacttgctttagaggaagatactgcgatattaaccgatgaagaaatacgtgaaaaaacaaaatcttttcaaaaagagttagcagaaattgaagatgtaaaaaaacaaaatgattatttagataaaattttacctgaagcttatgcacttgtacgtgaggggtcaaagagagtatttaatatgattccttaaacacctaacatttgaatgattgttaaatatatgagcatcgcatatcggcttaccttttctactataatagcggttatctgactgacgactatcaaacccactccattaatagcaaacattgcactgtattgaagtggtgtcatatgatacatcttttgtgaaataaaaggtgcggctgacgaataactgaataacatgacataagttaatccttgcaataacattggaataacgaaggtgggttttgttaataacagaccaaaatctttaaatattgctttaaaatttaactgagattgttcttgatggggcccaactggcatctttaataaaatgcctaagatgactattaaggtaatgattgttaaaaatataaaaatcattctccaacttgcaatagataaa

SEQ ID NO: 4319 - DNA, 1900 bp, Artificial Sequence
  Description of Artificial Sequence: synthetic nucleic acid sequence
tctaaatttatttactctaatttaatattaattaaggttttgagtatagggagaaatattttatacttatttattttctcttcatcatttttatattttacagggaaagtattttatttagattcgtaataatttaattctaaatctttagatgtttgtttacgagttgctctcattaacttaacatcatcgataagagatttaccatatgatgggatcattttttgtaattttggagtccaatctttttcatactcagcaaagtttttctctaaaacttctagggctactgatactgaagttgatgctccaggtgattcacccaatagtgcgataacagagtggtctttagagttaacaacttctgtaccaaattgaatgaatcctttaccgtgttctttagtatctttgataacttgaacacgtttacctgcagtgtataattgccaatcttcgtcacgagcttcagggtagaacgtgcgtagatggttcatacaaccttctttagtcattaatacttggtcgatagagtatttgattaaaggtaagtttttaactgcagatgctagtaatgttgtgatgttataaggtttaactgatttgaataagtctaagttagaaccgtttcttaagaatttagggccaatatttgcaaatggtccaaataataatgttctttcaccatcgatataacgtgtatctaaatgtggtacagtcattggaggtgtgcctggtggttctttaccatatactttgacgtcatgttcattaattacatcagggtttgtacaaattaagaactgaccactgatagggaatccaccaagatgtttactttctgggataccagttttttgtaatagtggaatagcgccaccgcctgcaccgataaatacataatcagctagaacagtttcaacgtctccagaattacggtttttaactttaacttcccaaataccgtctttacgacgattgaaattaattacttcgtggttgtattgaacatcagcatttggatgtttttcaatactttttgccattttacgagttaattcaccgtagttaacatctgtaccttcgtcgattttactagccgccatgatttcgttaccagtacgacctgtcatcattaatggcatccattttctcatttcttcgatatcttctgtatattcgatgttatcgaacatagggaagttacgcattgcttcgtaacggttttttaagaatttaacgttatttttacctcttacgaaactaatgtgaggaagtggattaatgaaatctctagggttactgatgttaccactttttactaagtgaccccagaattgttttgaaatctcgaattgttcgttgatttctttggctttttctatatcaattgaaccatcaggttgttgtactgtatagttcaattcacataacgccgcatgtcctgtaccggcattgtttctttcgttagaactttcaatacctggacgatctaagcgttcatagagtttgatgttccaatcaggttctaattctttaatcatagaaccaaatgtcgtacttaagacaccagcgccaataataacaacattttttgactctttattagccatttttttgctcacctttctttggtttaagaatttcgtgcaaaaataattaaattattgcgctgattcctattataagacgataggctatataacaaaaatacatatttataatactacctattccattttgtaatattttagacacaatatgatcattgattagacacatttactagtaaataagtataaatttaaggtgaactatagtgtcaaaattgaatgttatgtgaattttttgggtgagactgacgtaagtctaaatacaatatatactcttctcaatagtgaaa

SEQ ID NO: 4320 - DNA, 3226 bp, Artificial Sequence
  Description of Artificial Sequence: synthetic nucleic acid sequence
atagttaacaagtgtatttttacatctagaggtgattatctactccactagttcctaaccttatgatgtacaggtcaaattaaagtcattctcgtataagattgaatttactacggtaacattagaaaatgcagactacatataaagtaaatataactttaaaaattaactccctattctgtctgcttaatgaaaaatacgcataatcattgataaatcaaataatgattatgcgtatatcaattatacgtctcgactatccatttcttttcttaaataagcttctatgaatgggcctatttctccatccataacagcgtctactttaccagtttcttcattcgtacgatgatctttaatcattgaatatggatgaaagacgtaagaacgaatctgacttccccatccaatgtctttttgttcgcctcgaatttcagccatttcttgctcttgctcttctaactttaaggtattaaggaggtcgatccctctcttattgaagcggctaaaggcattggaatgaaaccacttagaagattgaccaaagtcgaactccctattgcaatgcctgttatcatggcaggaatacgcacagctatggtattaatcattggtactgctacactcgcagctttaataggcgctggtggtctaggagatttaatattattaggcattgatcgtaacaatagtgcactcattttaataggtgctattccagctgcacttctagctattatttttgattttattttaagatacatggaacgtttatcatataaaaaattgctcatttctttagggacaattgtaattgtgattatcatagctattgccatacctatggcagcgcaaaaaggtgataaaatcacattcgcaggcaagctaggttcagaaccgtcaattattacgaatatgtataaaatacttattgaagaagacacagatgatactgtagaagtcaaagatggcatgggtaaaacctcattcttatttaatgcgcttaagtcagatgaaattgatggttatttagaatttacaggtactgtattaggtgaattaacgaaagaagatttaaagtctaaaaaagaaaacgatgtatatcaacaagcaaagtctagtttagaaaaaaaatatgatatgacaatgcttaaaccgatgaaatataataatacgtatgcattagctgtaaaacgtgactttgcaaaaaaatatcaaattaagacaataggtgatttacgcaaggtagaagataaacttaaaccaggttttacattggaatttaatgatagaccagatggatacaaagctgttaaaaaaacgtatcatcttaatctttctaatgttaaaactatggaacctaaattacgttatactgcagttaaaaagggagatattaatctcatagacgcatactctactgatgcagaattaaaacaatataacatggtagtattaaaagatgatcaacatgtatttcctccataccaaggagcaccgctatttaaagaaaaatatttaaaagaccatcctgaagttaaaaaaccgctcaataaattggcgaatagaatcacagatgaagaaatgcaagaaatgaactataaggtaacagtgaagaaagaggatccttataaagtagcaagagaatacttagaaaaagaaaaattaataaaataaaattgtgcgtttcgagatggatttgatagctattcgatgtctaaatggtacatcgaatagctatttataatttaactatttcaaccgatatagtgaatttaaaatgtaatgttagaagtgtgattgattttaaggtatgagtttgtttataataggtactaagttttttaaaatttcagtcaatttaaggtgtgatttatgtatgaagaaacaattagaccaattaacagcatatacgccagggctttctccagaatctttaaaaaaacagtatggcattaaaggtgaattacataaacttgcttcaaatgaaaatgtatatggtccaagtccaaaagttaaaacggctattcaatctcatttagatgaattatattattatccggaatctggatcgccaaaattaagggaagcaataagtcaacaacttaatgttgatgcatctcgtattttatttggtgcgggtttagatgaggttattctaatgatatcaagagccgtattatcaccaggagataagattatcactagtgaatctactttcggacaatattatcataatgcaattgtggaatcagctgatgttatccaagtgcctctcaaagatggtggatttgatttagatggtatgttacaacaaattgataataaaacgtctttaatttggttatgcaatcctaacaatccaactgggacttacttttcgcacgatgaattatttaatttcttaaaacgtgtcccaagtgatattcctgtattaattgacgaagcatatgtagaattcgttactgctgatgattttccagatacgctaaaattacaggaggattttgacaatgccctttatcaatggtaatcacatgacctgaatgttgataccatttgatttctttttcatcagaatcgacatgattatatatataatttgctgattgaggatcaatcattgtatcttgttctgcttgtacgacaagtattggatcaattacttcatcgacatgttctttaactccatttagagtgtcactcagttctctcagggtttcagttggatgaaattgttccatttcttgatcaatcgtttgttgatctttgccttcatattttttaaagttacgtgcatattcaagaaagccttcataaatcgaaccttctgttttattctccataggtgcacacatagttataatccccttcacatcacgatttaaacttagttttaatgcgaaggcgccacctaatgataaaccagctactgctatttcttcgtaaccttgatctactaaataatcataaccatctaaaacatctttaaaccaaacaaaagggctagattttaatatttcttctgggggcgctgcatgtccttcatattgtggagcataagatgtatagccctttttttgaagataacgcccaagttgtcttacatcagcagagttacctgtaaagccgtgaagaagtaacactgcacgtttcccttcttcaaaaaagaatggttttggtagtttaatttgcatgattaaaatccctctcccttatagtaagc

SEQ ID NO: 4321 - DNA, 3800 bp, Artificial Sequence
  Description of Artificial Sequence: synthetic nucleic acid sequence
gaaattgatcgaatatatagtatctttaataaaatgcagatattgtggcgtagaatttgagaatcaaaaaatgattaatatagtttgaagaaactgagcataagtactagaaaaatagccagtaaatgagtttattatgaattcatttactggcttctttaaataatgatttagacagtttgcttttctagaactactttgaaatgcgttattttctttaagaatattaatatataacttgtgttgctaatgctaaccttggtcagagtgtattgtcatgcgatagttaagatgagatcttttaattaaaaccttgttttaaacatcgatgacaaggtctaatgtaggaggtgtagaaataattttcagaatgatataaataaatccataaatgaagataaatcgaaactatttataccgtaggggggtatatgttatggtataagtaactttactatcacgttttcattgggaggggttaatttgaataataatggtgaagagcataatcatcaaaatcacatgaatcattccaatcacatgcatcatgataaccatgcctcacatcatcatagtggccatgcacatcatcatggaaattttaaagttaagttttttgtttcattaatttttgcaatacctatcattctcttatcgccaatgatgggtgttaacttaccttttcaattcacatttccaggttctgaatgggtagtgttaatattaagtacaattttattcttttatggtggtaaaccgttcttgtctggtggtaaagatgaaattgctacaaaaaaaccaggcatgatgaccttagttgctctaggtatttcagtagcttatatttatagcttgtatgctttttatatgaataactttagtagtgcaactggtcatacaatggactttttttgggaattagcaaccttaattttaattatgctattaggacattggatagaaatgaatgctgtcggaaatgctggagatgctttaaagaaaatggcagaactattacctaatagtgctattaaagttatggataatggccaacgcgaagaagttaaaatatcagacatcatgactgatgatatcgtcgaagtaaaagccggagaaagcattccaacagatggtattatcgttcaaggacaaacatctatagatgaatccctagtcactggagaatctaaaaaagtacaaaaaaatcaaaatgacaacgtcatcgggggttctattaatgggtctggaacaatacaagtcaaggttacagctgttggagaagatggatatctttctcaagttatgggacttgttaatcaagcacaaaatgataaatctagtgctgaattgttatctgataaagtagcgggttatttattctactttgctgtaagtgttggcgtgatttcttttattgtctggatgctcattcaaaatgatgttgattttgcattagaacgtcttgtaactgtgttagtcattgcttgtcccatgctttaggcttggcaatacctttagtcactgcacgttctacttcaattggtgcacataatggtttaattattaaaaatagagagtctgtagaaatagctcaacatatcgattatgtaatgatggataaaactggtactttaactgagggtaacttttctgtgaatcattatgagagctttaaaaatgatttgagtaatgatacaatattaagccttttcgcctcattagaaagtcaatctaatcacccattagctataagtattgttgattttgcgaaaagtaaaaatgtttcatttactaatccacaagacgttaataatattccaggtgtcggattagaaggtctaattgataataaaacatataaaataacaaatgtctcttatcttgataaacataaacttaattatgacgatgacttgtttactaaattagctcaacaaggtaattcaatcagttatttaattgaggatcaacaagtcattggcatgattgctcaaggagatcaaattaaagaaagctcaaaacaaatgatagctgatttactatcaagaaatattacaccagtcatgcttacaggtgacaataatgaagtggcacacgctgtcgcaaaagaattaggtattagtgatgttcacgcacaactcatgccagaagataaggaaagcattataaaagattatcaaagtgacggtaataaagtcatgatggtcggagacggtatcaacgatgcgccgagtcttataagagccgatattggtatagcaattggtgcaggcacagatgttgcagtggattcaggtgatatcatacttgttaaaagtaatccatcagatatcattcatttcttgactctttcaaataatactatgagaaaaatggtgcaaaacttatggtggggtgcaggttataatattgttgctgtacctttagcagctggcgcattagcttttatcgggttaatattatcaccagctgtaggagcaatattaatgtctttaagtacagttatagtagcgattaatgcttttacattaaaattaaaataaaagaggtaaaccttatgtataataaagtttttgcaattttaattataattttttccataataattattgcgtctaatgatactttcgcagaaagtaagaatgatatgatgaatatgaaagaagataagaaaaatacaatggatatgacaaatatgaaacatcatgacgaaagaaagaaattaaattcttcacaaggaaaaaatgaaataatatttcctaaagttgcagagtcaaaaaaagataacaatggttataaaaattatacattaaaagctcaggaaggaaagacagagttttacaaaaataatttttctaatactctaggctacaatggaaatttacttggaccaactttaaaattaaaaaaaggagataaagttaaaattaagttaataaataacttagatgaaaatacaacatttcattggcatggattagaagtaaatggaaaagtggatggagggccttctcaggttataaaaccaggaaaagaaaaaactataaaatttgaggttaatcaagattctgctacgttatggtatcacccccacccctctccaaatacagctaaacaagtttataatggcttatcaggattattatatatagaagatagtaaaaagaataattatcctagtgattatggaaaaaatgatttgcctataataatccaagataaaacatttgtatctaaaaaattaaattattcaaaaacgaaagacgaagatggcactcaaggtgatactgttcttgtgaacggaatagtaaaccccaaactgacaacaaaagaagagaaaatacgtttgagacttttaaatggttctaatgctcgagatttaaatcttaagctaagtaataatcaaagttttgagtatattgcttcagatggcggtcaattaaaaaacgctaaaaaattaaaagaaattaatttagctccttcagaaagaaaagaaatagtaatagatttatctaaaatgaaaggcgagaaaatcagtctggttgataatgataaaactgtaattttaccgattagtaacaaagagaaaagttctaacaaaggtaatacaccaaaagtaagtaaaaaaataaaattagaaggtatgaatgataatgttaccattaatggtaataaattcgatcctaaaagaatagattttacacaaaagttaaaccagaaagaagtatgggaaattgaaaacgtcaaagataaaatgggtggtatgaaacatcctttccacatccatggaacgcaattta

SEQ ID NO: 4322 - DNA, 3913 bp, Artificial Sequence
  Description of Artificial Sequence: synthetic nucleic acid sequence
ggggatataaacttgaattataaaaaagaacttcatcacacccaaatcatcactcgtaatgaagaaggggaaacagacatcgatcatcgtgtgttatataatagtaaagttgaaaatggaaataataaagtgaaattaatcaatgaaaatggagatattaaagtaaaataaaggtatttttctaacattagctcaaaattgaggaaagaagtattttcaataaataatgaatggtgtattttaatatgcacttttttgcagattttaatttgaataaatttagagaaaggaagtaggactcatgataatatcctgctccctttttttatttccatgtatcgtcgggattttgaaaatctgatttgcgcattctagagacatatggattgcctttaacagtgaaacgtagtggtttatttgtccattctcctttattaggaataccgatacgaccactttctataatagtttttggatatttgcgatgattggtatctatagataatttgcagtcatttaaggttgagccatcaattgatcgtggaatattgaaagctttagtccactttcctggaccattagtgagctcgtatccagattttccacgattgacgttcatagcgccgataccttcatctggttcaatagcacgaataagtacaccttctggtatgccctcagtccgtgtaacaaaattgattaataagtgcgtatgcatcacatgtgcatatatcgtgccaccttttttatataaagaagtcacttttggtgttattttgccaccaaaaccatgtgcagctttatcttgtatacctaaataagcttcagtttctacaatatatccagtatatgtttgatagtcatcttggtaaataattttaacacctaataaagcttttgcagtttgggttgtctgctgatttataaagtccaaatatatcacctctcttttttattaaaagtatttactaaaaaatgtaaaatgtaatattatgtttcatattactatttttatttaaaatacgttttgttatacttttaatatgagttttaatagaaataaactcttattaatgtaacaaataatgtgttgatttaaaacacttgttttaatgacaaaatgaaaaggagtatatctaatgagagaaaaagttagatttacacaagcttttaaattattttggactaactattttaattttaaaggacgctcacgtagaagtgagtattgatttgccatgttatggcatttaatttttatgattcctacaattattggttactcttttggaatgttctgtttaatatcaagtgaaacttttaaaagtaaaggatttctcttgttgggggtaggaatttttatcttttctttaatttatattttgatttatagtttagttacattaatacctaatgttgcgatattatcaagaagattccatgatcgctcaatgacgatgactcttccgattattttttatgttttcactgtcattgtatcaggttttaattatttaccaaatatagataattcagcggtattaatatttatgggaattatctgcttaatctactggattgggtcgatattaatattagtattgacttgcttagatagtaaaacagagtctaataaatatggaccaagtccaaagtacaatcgtaacgagacaaatttccatggtgataatgctaatccagttgataaataaaatttaaacaataatatagcccgagacaatcatgattgtctcgggtactttaattgtattgatagtttgtgattgaattgaaaatgcccatgcattatgcgtgagcgttatcaagtttagttattatccttgtatggctttatatgtatttcagctcttttgttgtcctccctctgataacaaaatctcaagttaagatttaattatcaagtttacttattttagtgatacctagtttgttcttcatgctatatgatgatagaaaaatacatgtttatagcaaaccggaatttattaaacgtcatcaagtcaataaaaaccaatgaatttaagcttaatattaatttcgcaatatctatttgctgcttcatatcaaaaaacataattgaaattgtgtatgctaaaaattttatatgttagcacctacgttaataattatctcaatgattcatatcactgtggaacttcatatgcagcgatgtacgattgtatcaacgctgacatgtttattcatttcaactttaatcacggtatcgttgattcaaattaaacgtcttaaaaaggataacaacttaaatcaaatatgataattcaggatattgacgatctaataaatcatgtagttcacaatatttatggtagagtggtttataagcttgaactttttggatttcaggttcttgtatataagctataggttgcttcatagataatgccgcctcttttaatgtactatatgcattcccaacatttgcacctaacatcgctgcacctaatgctgaagcattagatgaatctatgacgacaacccttttatttaaaacatttgcataaatttcaacgagtaatttactcttttgtgggataccaccagacgcatacactgtatgaacaggaatatgattatcttcaaattgtttcataattaattttgttccaaatgctgtagcttcaatatatgctcgatgaatcatttcatacggtgtttgaagtgtaagaccaaagatacttccagttagatgactattactaagtatactacgatttccattcaaccaatctaaaacaacaacatgttgttcttctattctaatgtgacttgctaattcctctaaatagttaagcacatgcatatgatgttcatttgcttgatctacaatatgtttaggtgcttggttctttgagtattcaaacaaatcaccgacagctggttgaccagcttcataggcatataatccaggtataatagcatttttaactgagccagttattgaagaaatgggtacttgtcttgaatctagcatgagatgacaagtacttgtaccaatgactgcagtgaattctccagcttctattgccccaacacctaagacgccagaatgtgcatctatgataaaaggtgaaacctggacatattgagaaagcccccatatttgttgatagtctttacataaacgacctgcactttctccaattgatatgattggcgcttcacatttttctttgacgattttaggtaaatcaggatccacgctatggaagaagtcgtaattaaatccagcttcattgtcccaaaaacctttaaaaccaataccacaatttgatcgtatatttgaatttgttagtatactagtgatgtaatctccagcttccattatataccgtgctcttctaagtatttctggtgcttcatgtttaacttccaggattttcggtatcatccattcgctatttacgcttgagccataataatctaaccaatttttattcttactcatctgaatcatatagtttgcctcatcttgagctccatgatgtttccataattttacgtacgcgtgtggatttgtctttaaatcttcatgacgatgaagcggttcaaattgttcatcgagaaagataattgtactgcttgtaaagtcgactccaattccaaccacatcgtttttattaactttactatcttctaatacaaattgaacgccttgttcaagaatttgtaaatagtcgtcagcattttgtaagaagtagttttcaggtaacggtttatcatataatgagttcatataagttccgttcgcatagtcttcctcatatcttgatatgatatgtccgttggatgtgtcagctaatatcactcttccagaagcggttccaaaatcaattcctatactataactcatgtgtatgcctcctatata

SEQ ID NO: 4323 - DNA, 2580 bp, Artificial Sequence
  Description of Artificial Sequence: synthetic nucleic acid sequence
tattcgggttaacttcataatatttcccctttgaacagttattgttttgtaccatatgggactactttaaatgtgatgtctttgggcaaatcataatagtgtttgaaatcttgaagttgttccttcgactttggtgtagtcatatgagtatatcgctcaaatggtaatctttccaatgttattttctgatagcgatgatgttgtgttatttgttctttaatgaagtctattctgtgcacactactaatatgtataaaagtaaatccaatcatcataatgatgctgatgataatcgcaaatattttaattatatgttcaagttgtttaaatagcacatcacattgctgaattaaacaaagtaatatcacgatccataaagtataaataaaataaaaatttctataacttataggcgtcacaaataaaagtggcaaaacagatgaagccatagctataaaactccccatcacaatcattcttatgtatctttgctgtatcattttaaacacaacgtatatcacacttatcatgtaaatgaagcaaatcgttgtattcaaaacggctatagaaaatgaagctttatataattcaaaatgaaattgattgtaaacgaagatcttataaataggtaaagtaattaaacctaagagtagtggtattttaatataaactctcatatgcttcaggcttttattttgcttaagtaaaactatacttactattgatatcacggtaagaataatcatttgattaataaacatatattctggtacaagcttaaataacgtcacacctgctttatgtatcattccatgactatcggaaattgaataatgcgtatttaatccatccttaattaaaaaataattgaagtttaaaaacattataatgttacctatacaactaagcataaatcctacaattaagaaataactgagtctttttttaacaaagaaatagactaccattcctattaaaataattaagctattagcgatggaaagattctccaagaagaattgtccaaacaaacttactaataaaaatacccataattgcatttcagaaactgtatcgtgcgactcaatctttttaactaccgtaaaaagaataaaaagtgataggactgtagcaggtatataactaaaaaatccagtaaaccacccgtaagtttcgctataaattgtattaggtacagtaaccattaacacaaaactcaaaataaaataaatacgattcgtatgtaattgaaccatataagcaactaaatagataactaaaaacgaagttatcgcatatattaaagctcttattatgttattatgtacggcaacccattcaaataaatgtcctaaataacgaccattttcttgagtcaaatattgacttagattaactttatatgcatgccaatccgtagttgataatggtgttagaattgccattataagataaaagataaaaattcctattaaccaaaaaaatgattcatattgttttaagttattcattgttgacctctctgttcttcatgatgtaattcaaaactaacatttaaacgattatcatgtttattctcttttttatgtgatttattcaattatctactgaaaatatatagacatttattgaagctttaatcatattaatatatacatattgctcatcgtcaattttatattcttattattatacaattcacgtatgatttccattttaattatcaagatttctttagtttaatttcatttttggatagaataaatataaaccaattgtttaggaagtgatataaatgtcaccatataaagttatcattgcacctgattcttttaaagaaagtatgtcggcgaaggaagctgctttagctattaaagatggattccaagaggtgttcgattccagtacaatatatgacattattcctatgttgaaataagtcatcgtattcatgaacgccctgaattaggcaatgaagaaatttttgcatcgagaacattaattgaccaattaagagcaaatcgattcgaaatcgaaacggatattgcaggacatgcaacaggatttatagcaacgtatgattctgatatgactggaccggttataggatttctagctgaatatgatgctttacctggtcttggtcacgcatgcgggcataatattattggtactgctagcgtacttgctgcagtagcactaaaagaagtcgtcgatgaaattggtggtaaagtagtcgttttgggatgtcctgctgaagaaggtggggaaaatggctccgcaaaagcttcttatgttaaagcaggtgtcattgatgaaattgatgtagcattgatgattcatcctggaaatgaaacttatcgtacaattaatactttagctgtggatgttctagatattaaattctatggacgtagtgcgcatgcatctgaaaatgcagatgaagcattaaacgctttagatgcaatgatttcatatattaatggtatagcacagttaaggcaacacattaaaaaaggacaacgagttcacggggttattttagacggtggtaaagcggctaatattatacctgatttt

SEQ ID NO: 4324 - DNA, 3281 bp, Artificial Sequence
  Description of Artificial Sequence: synthetic nucleic acid sequence
atattaaaaaagaaaaattacttgaggcaaaagaagagaaccaaattttaaaagaacaagctgagaatgaactgcgtgaaagacgtggtgaacttcaaagacaagaaacccgacttcttcaaaaagaagaaaatttggatcggaaatctgatcttttagataaaaaagatgagattttggaacaaaaagaatcaaaacttgaagaaagacaacaacaagtagatgcaaaagagagtagtgttcaaacattaataatgaagcatgaacaagaattagaacgcatctccggtctcactcaagaagaagctgtgaaagaacagcttcaaagagttgaagaagaactgtcacaagatattgcaatacttgttaaagaaaaagaaaaagaagcgaaagaaaaagttgataagacagctaaagaattacttgctacaactgtacaaagattagcagccgaacatacaactgaatcaactgtttcagtcgtaaatctgcctaacgatgaaatgaaaggtcgtatcataggtagagaaggtagaaatatacgcacattagaaacacttactggcatagatttaattattgatgacacaccagaagcagttattttatcaggttttgacccaattagacgtgaaattgctagaactgcactagttaatttggtttctgatggacgtattcatcctggacgtattgaagatatggtcgaaaaagctagaaaggaagtagacgatatcattagagatgctggagaacaagctacctttgaaataaatgtacacaatatgcatcctgatttagtgaaaattttgggtcgattaaattatcgaactagttatggtcagaatgtacttaaacattcaattgaagttgcccacctttcaggtatgcttgcagcagaattaggagaggatgttactttagctaaacgtgctggattattacatgatgttggtaaagccattgatcatgaagttgaaggtagtcacgtagaaataggtgttgaattagctaagaaatataatgaaaataacataattattaatgctattcactcacatcatggtgatgttgaaccaacctctatcatttctattttagttgcagcagctgatgcattatcagcagcgcgaccaggtgcacgtaaagagacacttgaaaattatattagaagacttgagagactcgaaacgttatctgaaagttatgatggggtagaaaaagcatttgctatacaagctggtagagagattcgtgtagtcgtctcacctgaagaaattgatgatttaaaatcatatagattggcaagagatattaagaaccaaattgaagaagagttacaatatcctggacatatcaaagtgacagttgttcgagagactagagcaatagaatatgctaaataattccataagccactgaccgtatttacggccagtggcttattaaatataatataaaaaaccgagcgtataaacgctcggatataatgatttattttaattgtaaatcaacttcatttatttcttttaaaatttcagctgtatcatagcaatttgtagcgatatttgcatatttctctgctaaacgataagcattaatgtataaaattaaactttctttagcgatatcttcagcgtcatcagatttggctggatttgaagttacaactaattcagcaaatttttcaggatcaatattaatagacatgaatgaataaacaactcctatatttttattagtttcatattaacacaatacttaaatacaaaaaagtaaagtcttttaattttcagaataattaatttgttaatgagacttttattatagtacggtatccattaaacttaatttatgagaggatgaacagagaatgagaatattgtttataggtgacatcgttggtaaagtgggcaggaaaatgattactacttatttacctaaaattaaacaaacttatcacccaacagtttctatagtaaacgctgaaaatgccgcacacggtaaaggattaacagaaaaaatttacaaacaacttttgagagaaggcgtggatttcatgactatgggtaatcatacatatggtcaaagagaaatttacgattttattgatgatgctcatcgaatggtgagacctgcaaattttcctgatgaagctccaggaacaggtatgagaataataaaaattaacgatattaaattggctattattaatttacaaggccgttcatttatgcaagacattgatgatccatttaaaaaggctgaccagctaatcgaagaagctcaaaaatctacaccatatatatttgtagattttcatgctgaaactacatctgaaaaaaatgctatgggttggtatttagatggtagagtgagcgctgttgttggtactcacacacatattcaaacttctgatgatcgtatattacctcatggcacaggatatatcacagatgtcgggatgacaggttattacgatggtattttaggtatcaatagagatgaagttattcaacgttttattactagtttgccacaaaggcatgttgttccagatgatgggcgaggcgtattatcaggagttatcatagatttagataaagaaggtaaaacgactcaaataaaaagactgttaataaatgaggaccatcctttccaaatttaaagggatatagtccattagtatgaatttaaacttgtaccactgttgaaatagtaaaacggtggtttattttgttatcatagagtatgaattaataccacaggaggcatgtgatatgaaatcacaaatatcatggaaagtgggcggtcagcaaggcgaaggtattgaatctaccggtgaaatctttgctactgcgatgaatagaaaaggttattttttgtatggatatagacacttttctagtcgtataaaaggtggccatactaataataagataagagtttcaaaatcgcctgtgcatgcgattagtgatgatttggatatactcattgcttttgaccaggaaacgattgaattaaatcatcatgaaatgagagaagatagtattataattgcggatgctaaagcaaaaccccaaaagccagagaactgtgtggctcaattaattgagttaccattcactagcacggcaaaggaacttggaacagcattaatgaagaatatggtggcaattggtgcgacatctgcactgatggatttaaatacatcaacttttgaaactttaatcgataacatgttttcaaaaaaaggtaataaagtcgttgatatgaatata

SEQ ID NO: 4325 - DNA, 3802 bp, Artificial Sequence
  Description of Artificial Sequence: synthetic nucleic acid sequence
tacgcgtaaaacagccagcgctgacgtgatttagcaccgacgtagccccactgttcgtccatttcagcgcagacaatcacatcactgcccggttgtatgcgcgaggttaccgactacggcctgagttttttaagtgacgtaaaaccgtgttgaggccaacgcccataatgcgtgcactggcgcgacatccgacgccattcatggccatatcaatgattttctggtgcgtaccgggctgagaggcggtgtaagtgaactgtagttgccatgttttacggcaatgagagcagagatagcgctgatgtccggcagtgcttttgccgttacgcaccacgccttcagtagcggagcaggaaggacatctgatggaaatggaagccacgcaagcaccttaaaatcaccatcatacactaaatcagtaagttggcagcattacctaaaagggtgagtttgagaaaaggagaaaacccatgaaaagaagcgataaatatacggatgattatattgaacaacgttatgagtctcaacgaccttattacaatacatattatcaaccaatagggaaaccaccgaaaaagaaaaaaagtaaaagaattttcttaaaagcaattatcactatattaattttattgattatattttttggtgtcatgtactttatttcttcaagagcaaatgtagatgatttaaaatcaattgaaaataaaagcgattttgttgctaccgaaaatatgcctaactatgtaaaaggcgcatttatttcaatggaggatgagcgtttctataaacatcatggctttgatataaaaggaacgacaagggcattgttttcaactattagcgatagagatgtgcaaggtggaagtacaattacgcaacaagttgtaaagaattattattacgataatgaacgatcctttacaagaaaaatcaaagaattgtttgtagcgcgtaaagttgaaaagcaatacagtaaaaatcagattttaagtttctatatgaataatatttattatggtgataatcaatatactgtagaaggtgctgcaaatcattattttggtgtaacggtcgataaaaacaattcaaatatgagtcagattagtgtgttacaaagtgctatattagcaagcaaagtaaatgcaccaagtgtgtatgatgtaaatgatatgtcgaataattacatcaatagagttaaaaccaatttagagaaaatgaaacaacaaaattttattagtgaatcacaatatcaagaagctatgtctcaacttggaaattaaacgactaaacaaataaaaatggaatgaatataatgggattagtttatagaagcaatattttattaaccatttatgtatgatattatatcaatcttttaaaacatattgagtcgatagctaaataaatttaaaggagtaggacaggatgaaatctgttttactccttttttagtgcataaagtagggatataaaattcaaagtcttttatgaaacatctaatgatgtgtcataatatatgtaagaaaaacgtttgaatatagaagtagggatagtaaaatgccaaaggtaactaaaatagaagtacaaaaaaagaataaagaacgctttaatctctttttagatggagaatttgaaatggggatagatattgatacattagttaaatttaacttaaaaaaagatcaaatacttgaaccgtcagatatgcagaatattcaagaatatgatcactaccgtcgaggtgttaatcttgcaattcaatacttgtcttataagaaacgtactgaaagagaagttatacagtatttagaaaaaaacgatattcaaagtaatgctattcaagatgtcattgactattgctataaggaaaaatttattgatcatgaagactacgcagaaagtttaaaaaacaccatgatacacactacagataaaggaccagaaatatatagacaaaaactctatcaattaggtattgaagttacgattattgaaaaatatgtcgaagcatatgaacaacaacaaccattagatgacgtcatcaaagttgctgaaaaagtgatgaagtctaaaaagggtcctgaagcaaaggtaaagcaaaaagtaacacagtcacttctccaaaaaggatataagtttgaaacaattcaactagttatgaatgaaatagatttttctcaagacgaagaaacattagaccatttattgcaacgtgatttagagaaagtctataataaaaattgtagaaaatatgacagtgataaaagtgttattaaaaccatagaggcactcatgagaaaaggctataattatgataaaattaaatctaaattagaagaaagcggtatatctaatgaataaaaagaaaatgagtgaaatgtccgagcaagaactaagacatgaaatacaattatttaaagaaaaaatgcgtaaagcagagatgaatggcattatgaatgaatatgatgtttatcaaagcaaagtgattatagcagaaagctatcttgtggatcgcaataaaattgaacctggaaaaatctataaactcaatgatggtagtaaacagtactttaaagtagaacgactcaagggtgtatttgcatggggatttagaataaacagtagtgaacctgaggaaggtctaccattagcattattaaaattttagaaggatgtataattgatgggaagctcaatagttttaaaattactcaaggtaacacattactatagaaatcataattcaaaaaaatggtatcgaccattaggttatgatgctgaggacatcaacctaaataatatttctttgcatatatatcaaggtgaagcattaggtataatcggagaacctggatcttctaaaactttgattggtagaattttaagtggttcagtgaaacctgataaaggtaaggtcgtccgaactaaaaacttatatttcggtgatattgatgatcgaaagattaataatttaactgtgagccaatatgtgagcgaactcgtacaactttttccttatgaagtaactgagcataaagttgaacaaattattcaatgggcacatttaggtgattacatagaagaaaaggtttctaatttaagcgaaaaatcatacgcacaacttttacttagtattgcacgttcttcaaaaaacgatattatcattttaaatcatgttttatcacatttagatgaaacatttatagaaagagctacagttttatcaaaagattatattgaagctaataaaacactagtcttaattgataatgatgtagaaaagataagcaaaacaagtaactacataacatgggtatcacacggccagatacgcaaggaaggttctctaaatcaggtattaccaacttttagagaacatgaaaaagatcgtactagtttaaaatcagaaatggaaattgagaactttgattatgattggaagcagaatcgctctcgtattcctgaaatgacttataattttaaaagaatagaacgttataatcatgctaagccaccaagatttctagtgagattttggaccttatttgtcagctttttgattgggcttgttttaatgagcgtacttttctttaacaacttaggtatggtcaaactagggaacattaatacccaagcatccatacagaatcagaataaagatacttacgaagaaaaacttgcatatggattagcattagatggatcagttactttaaacgggtctaaagatttaaaagtacctaagtatagtttaattacaattactggagaaaataacaaaagatatcgggtcgaaatgaat

SEQ ID NO: 4326 - DNA, 3546 bp, Artificial Sequence
  Description of Artificial Sequence: synthetic nucleic acid sequence
aaatacatataaacacttgctattaaaaattatttcaattagaattattaataagcgagttaaggatggtgtgagcttaacaaatatattttggcatatgattaaatttttataaaagcgagtgtttacactaatttgggtggaaccgcgggttgaaaagtaaataaacacatgttattacaacaatgtgttttaaataatttaaactcgtcccaagataatattgcataatctatgtgtattgtcttggggcgtttttatgtataaggagaggcttttatggttaaaaatatggatacaattgtacaacttgcgaagcatagaggatttgtattccctggtagtgatatttatggtggattatcgaatacatgggattatggtccgttaggtgttgaattaaaaaataatattaaaaaagcttggtggcaaaaatttattacgcaatcaccttacaatgtgggtattgatgctgcgattcttatgaatccaaaaacatgggaagcatcaggacatttaggaaattttaatgatcctatgattgataataaggacagtaaaattcgttatcgtgcagataaattaatcgaagattatatgcaaaatgaaaaaggtgacgaaaactttatagcagatggcttaagttttgatgagatgaaaaaaattatagatgatgaaggaattgtttgtccggtcagtaagactgcaaactggaccgatatccgtcaatttaatcttatgttcaagactttccaaggtgttactgaagattctactaatgaattatttttacgacctgaaacagctcaaggtatttttgtgaactataaaaatgttcaacgttctatgcgtaaaaaattaccttttggtattggtcaaattggtaaatcattccgtaatgaaatcacaccaggaaactttattttcagaacaagagaattcgaacaaatggaacttgaattcttctgtaaacctggcgaagaaattgagtggcaaaattattggaaaacttttgcaagtgaatggttaacagatttaaacatctcagaagacaatatgcgccttagagatcatgatgaagatgaattatcacactattccaatgctactactgatattgaatataaattcccatttggttggggtgaattatggggtattgcgagtcgtacagactatgatttaagacaacatagtgaacattcaggtgaagattttaaatatcacgatcctgaaacaaacgaaaaatacattccttattgtattgaaccatctcttggtgcagatcgtgtgactttagcatttttatgtgacgcgtatgctgaagaaggtgttgaaggtagtaaagatgcacgtacagttatgcacttccaccctgctttagcaccatataaagcggcagtattaccattaagtaaaaaattatcaagtgaagctattaaaatttttgaacaactaagctctagctttgcaatagactttgatgaatcacaatctattggtaaacgttatcgtcgtcaagatgaaataggtacaccatattgtattacttttgattttgattcattagaggacaaccaagtaacagtgcgtgacagagatagtatggaacaagtacgtatgccaatatcagaacttgaaacatttttagctgagaaagttaaattttagtttactatttagttataagtaaaaattttgaatacgaataaagctcctatcttaagttttaacaacaaaagataggagctttttattgataaatttattttaagatctttcattataatagaaatctttttacaatgaatctttttctaatctatttaattgatttattaatttttgacttttaaaaaacataccagcatactcacgataaagcatgataagtagttcagacatttcatttaatatgtcttgctgaatatttaaatgattcatcttacttataggtaattgctgcaggatattaagaagatataaggtgcgattagagagatgaaaagcatgttgatcctgatataatgcagattctgaaatagcaccgtcaaatttaaaactatacgctataagttttgattgatcttgaatgccggtaattgcacagtgatcaaatgaagctgtgaatccaaatttagacatattttttaataagacgattacagacattaattgtgcaggggttccttcgttaattttggaaagaacaaattgaagtaagtcataattatattttgaaacctcattctcttccattgatcggtcaattgtttcagcacataaagatgcatagctactttcaaataagtcgagttggagttcataatcaattcaaaaaaataaaagaacgtatgcatgaaaaatggagtgaaggtcaatatattgcatactttcaggcgtttacaaatacgcatgcacctgttgaagtactaaaagaaaaatatgaacctgtcttaaaagaagatggcgtcgttggtttatcaatcgcgacaagacctgattgtttgcctgatgatgttgtagaatatttagctgaacttaatcagcgcacttacttatgggtagaattgggcctacaaactgtgcatcagtcaacttccgatttaataaatcgtgctcatgatatgcaaacatactatgacggcgtaacaaaattacgcaaacataatataaatgtttgtacgcacataatcaacggcttaccaggtgaaaattatgacatgatgatggagactgctaaagaagtcgctcagatggacgttcaaggtattaaaattcatttattacacttgctaaaaggaacgcctatggttaaacaatatgaaaaaggtatgctcgagtttatgagtcaacaagattataccaatcttgtttgtgatcaacttgaagtattacccccagaaatgattgtgcacagaatcactggagatggacctatagatctaatggtcggaccaatgtggagtgttaataaatgggaagtattaaatgaaattgataatgagcttactagacgaaactcctatcaaggtaaaatgaacaagcagagtatacaatcatgaaactagaacgtattttacccttctctaaatcgttaattgattctcatattaatcataatagtattgtaattgatgcaacaagtggtaatgggaatgatactgcttattttgctcaacatgttccaaatggacttgtctatggattcgatatacaagaacaagcaattttgaatacgcacaaaaaaacaaaagattattcgaatgtaaaattaatccaatctggtcatgaaaatgctaaattgcacattcccgcccaacatcacggttgcatagatgctgctatttttaatttaggttatttaccgaaaggtaacaaagaaattgtcactaaacctgaaacaacaattatggctattaatgaaatctttgatatcttaagtattgaaggaattattatattagttatatatcacggtcatgaagaaggtaaagtagaaaaagaagcactacttgaatttttacctttagagcacagtggcga

SEQ ID NO: 4327 - DNA, 4066 bp, Artificial Sequence
  Description of Artificial Sequence: synthetic nucleic acid sequence
ccgatacctagaccaccagttggaggcattccatactctaatgcttcgatgtaatcctcatccatatcatgagcttcatcatttccttgttctttttcaacaagctgcgcttcaaaacgttggcgttgatcaatcggatcgtttaattccgtgaaggcatttgcatgctctcttcctacaataaataattcaaaacgatcagtaaatctttcatcgtttggatttttctttgctaacggtgaaatttcaatagggtgaccataaataaacgttggttgaataagtgtttcttcaactttctgttcaaaaaattcatttaatatatggccatatttcatattttcagtaatttcaatatcatgttcttttgctaatctaatagcttcttcatcagaattaacattataaaaatctacaccggtaacttctttaacagcatcaacaatgtgaagtcgtttccatgaagattctaagtcaatttcttcatcattatattgtactttagctgatccaaacacttcttgagcaatgtgtctgaccatattttcagttaaatccattatatcatgataatcagcataagcttcatacaattcaatcattgtaaattcagggttatgtcttgtagatacaccttcattacgaaaaactctgcctatctcgtagactttttcaagacctccgacaattaaccgtttcaaatgtagttctatagctatacgcatataaagagtagcatctaatgcgttatgatgcgtaacaaacggacgtgcagcagcacctccagcaatttggtgcatcattggtgtttctacttccaagaatccttgtttatttaaatagtttctcatttcttgaattattttactacgattaataaacgtttgcgtactatcttcatttgtaattaaatctaaataacgttgtcgatatctttgttctatatcttgtaaaccatggaacttatcaggtaaaggtcgtaatgatttggatagtaaagtaaatgacttagctttgacagaaatctcgcccgtattagttttaaacatgacaccttcaacacctatgatgtcacctaagtcagccattttccaaatgttaaattgatcatctccaacttgatcttttcttacataaatttgaatctgacctttcaagtcttgaatatgtgcaaatcccgctttacctttaccacgtttagtcataagacgacctgcaattgacacgtggctttcgtcttctttttcatgcaattcttccttagagaattggtcccactgttcttttaactcacttgaagtagatgagcgattgaatcgatgaccaaaaggatcaatccctaaatcaattaattcttgtaatttttgacgacgaacttgcatttggtcgttcatttcttctgacataaatttctctcctttgaactttgatttatcaatttattgttccatgtctttctgttgaaaactttaggagctatatattgtttcctaatcagttttaatttatatttaagccttttattatacccttcttatcttcatatgtattgttattcaatgaaggttgatattgcatctaatcaaagcaaatctactcactttattattctacaagaccatcaaaatgtaataaagtaatttatattttcatcgaatagttgcaacccttataaacttattgattagcaatatataaatttctttaattaaaagtttcaaaaccatattactatgctttattattccttatattttttcacactattatcaggtactactagttgtccgatacttttattagaaatcggttctatttgtttggtggctatatcatttaacgggataagaacaaacgaacgttctttcattctagggtgcggcactgataaattatcttgttcaataatttgatcaccaaacagtagtatatctatatctaaagttctaggcccccaacgtatttctcttttacgatgaagttgttgttccgttgttaaacaacattttaacaaagattgtggattcaattcagtctctatctcaatgcacaagtttaagaatttcggttgattagtatatcccactggttcagtctcataaatatgagaaacttgagttacttgaataccttgatagtcatgaagtattttaatagcctcattgagttgtagttctctatttccaatattgctccctaatcctaaataagctttaaccatttagtcattctccctcactatttcaatcccaacaccatcgtaatgaccaggaataggtgggttttctttagtgattctaactttcgtttccattacacgattatagtgtgaatttatatgttttgcaatacgttcagccagatgctcaattaagcatgaacgtggcccttcaacaatagactttacatctttataaacctctccataatttacagtatcttttacatcatctgattgacctgcataactaagatcaacctttaaagtaatatcaacaacaaaaatttgtccaatatcattttctgcagctaatactccatgataaccataaaaacgcattccattaagaaagatgatgtcgttcatattcattctcctttagaaaatccatactttgggctagtcgcgtatttaataatacattatgaactcgaaccccacgaacgcctttcattataccataagccgttgtagctgcagttgcctcatctctatctgaaggagaagaatcttgattcatcatttctttaatgtatctttttcgacttgttgcaagtaaaactggatattcggtcgctactaattcatctaatcttgccattacttcattttcttcttctcgtgttttagcaaaacctattccaggatctaaccagattttattatgtggtataccggctagttcagccttattcgcttgcgcaagtaatgatacaagcatctcttcaacaacaggtttatctctatgaccgtcaccattatgcataagtacaatttcagcaccgtattgagataccacattaaacatattcgaatcaaataggcctgcccactgatcattaatcattgaaacaccaagtttaagacaagcttccgcaacttcacttcgaaatgtatcaaccgaaatttgcacatcatatttaacgatagactcaaccacaggcaatacacgattcatttcttctttaagcgatacttctttatgcgatacttctttatgacctggtcgtgttgagacacctccaacgtctatgatgtctacaccttcatctatcatctctttagcacgcttcacagcttgatcaactgagtggtactgtcctccgtcagaaaatgagtcaggtgtcacatttaatatccccattatttttgttttaatcataatttcacctttttcaataatatactcttagatttttttaattttcaataataactacattactaaacacatctgctacttcatgatatcattcatttcaataagttttgagtatatattatcggcatattaaaaaaaggtagccgattttagatagaagctacaatattggttggtctgattaaataaaaaacgaagatttattttataaaaagttgaaaaatcaacgtgaaatacacgctattttaaaactttagaaacaaatcttcgtccaaaatgatttttagtttagtttttaattatcaaatgaatataatggtgttgataagtaacgttccccattacttggtaatactgttacaactgttttacctttacctaattcttttgctttttgaatagcagcatatattgcagcaccagatgaaatacctgctaatataccttcttctctagcaacacgacgtgccatatccatagcagtatcattacctactttgatgatgctgtcataaacttctgtatttaaagtatcaggtacgaaacctgctcccaatccttgtaatttatgagggcctggttcaccaccgcttaatactggagaagcttcaggttcaatagctactatttctttagagcacagtggcgatgatatcagatctgccggtctccctatagtgagt

SEQ ID NO: 4328 - DNA, 3246 bp, Artificial Sequence
  Description of Artificial Sequence: synthetic nucleic acid sequence
tgtgattttatctgctgattattcacaaattgagttacgtgtacttgctcatattacgcaagatgaaagtttaaaacatgcatttataaacggacatgatattcacactgcaacagcaatgaaagtatttaatgttgaatctgaccaggttgatagtttaatgagacgtcaagcaaaagctgttaactttggtattgtatatggtatcagcgattatggattgagtcagagcttgggtattactagaaaacaagcaaaagcatttattgatgattatttagctagttttccaggtgtaaaacaatatatgtcagacattgttaaagatgcaaaagcacaaggttatgtggaaacactacttcatcgtcgtcgatacattcctgatataacaagtagaaacgttaatttaagaagttttgcagaaagaacagcaatgaatacacccatacaaggtagtgcagctgacataataaaattagcaatggttaaattcagtgaaaagattaaagaaactaaatatcatgctaagttattattacaagttcatgatgaactcatatttgaaataccaaaatcagaagtagaagattttagtaaatttgtagaagaaattatggaacaagcattagtgctcgatgtacctttaaaagtagattcgaattatggtgcaacatggtacgatgctaaataaagaaaggataatatcatgcctgaactacctgaagttgaacatgttaaaagaggtattgagccatttataaaaagtgcaaaaatagagaaagtaacttttgctaaaaatgtaattaacggtaagaataataaccgtgagacgattataaaaggtatggaattagatacttttaaaaaacttactgaaggttatgttataaaaaaagttgaaagaagaagtaagtacattattttttatatagcggatcatgacgatgatagaatcttagttagtcatttaggtatggcaggcggattctttgttgttaataaccttgatgagataagtacaccgaattatcgaaagcattggcaagtcattttcgatttggataataaacaaaaattagtctattctgatatcagacggtttggagaaattagaaatatagtcaattttgatagttatccatctttattagaaatcgctccagaaccatttgaagaggtggcatttgaacactatttagaatgtttgacaatgaaaaaatataagaataaaccaataaaacaaacgattcttgatcatcgtgttatagcaggagctggaaatatctatgcctgtgaagctttattcagagctggtattactccggataaaattactaattcactcactaaacaagaaagaaaatccctcttttattatgttcgagaagttttagaagagggtataaaatatggaggtactagtatttcagattataggcatgcagatggtaaaactggacaaatgcaattacatttaaatgtatataaacaaaaaaagtgcaaggtttgtggtcattcgattgaaacaaaagtgatagctggtagaaatagtcatttttgcccaaactgtcagagataaaggaagagtgaaataatgtctaaagtgattgggataactggtggtattgccactggaaaatcaacagtttcagaattattaacagcatatgggtttaaaatcgtagatgctgatattgcttcacgcgaagcagttaaaaaaggctctaagggtcttgaacaagttaaagagatttttggggaagaagcaattgacgaaaatggtgagatgaatcgtcaatatgtaggagagatagtttttaatcatcctgacttacgcgaggctcttaatgaaatagttcatcctattgtaagagagataatggaacaagagaaaaacaattatctagaacatggatatcatgtaattatggatatcccattgttgtacgaaaatgaactacaagatactgtagatgaagtttgggtggtttatacatctgaaagtattcaaatcgatcgtttaatggagaggaataatttatcattagaagatgctaaagcacgtgtttatagtcaaatatctatagataaaaaaagtaggatggcagatcatgtgatagataatctaggtgataaattagaacttaaacagaatttacaaaaattacttgaagaagaagggtatattcaatcggagagtgaatagtaaatataatgaaaattgtataggcgtgtttggtggtgtatttaaggatatacctgcctatgaactaggtgcaacagttattcgtcaaattttagaacatagtcaaatagatcctaatgaaatcaatgaagttattctaggaaacgtattacaggcaggtcaaggacaaaatcctgctcgtattgctgcgattcatggtggtgtgccagaagcggtaccttcttttactgtaaataaagtttgcggttctggattaaaagcgattcaacttgcctatcaatctattgtagcgggagataatgagattgttatcgctggaggcatggaaagtatgtctcaatctccaatgcttcttaaaaatagtcgtttcggttttaaaatgggaaatcaaactttagaagatagtatgatagctgatggtttaactgataagtttaatgattaccatatgggtatcacagccgaaaatctagttgaacagtatcagattagtcgtaaagaacaagatcaatttgcattcgattctcaacaaaaagcatcacgtgcacaacaagctggtgtatttgatgctgaaattgtacctgtagaggtaccacaacgtaaaggcgaccccctaattatttctcaagatgaaggcattagacctcaaacgacaattgataagttagcacaactccgtccagcatttaaaaaagatggatcagtaactgctggtaatgcatccggtatcaatgacggtgctgctgctatgctcgttatgacggaggacaaagcgaaagcattgggcttacaacctatagctgtattagatagttttggtgcgagtggtgtggcgccttcaattatgggtattcgacgcacaaaaacaaaccaaagaagaaatagcaactgttaaagcagatgttattgatatcaaagaaaatcaaaagctagatgcaggagaatacggattgataacaaaaacagttcatcaacgcgttgcttatatcagacaaattcacggactacctaataataaagaagttaacaaacctctttag

SEQ ID NO: 4329 - DNA, 2674 bp, Artificial Sequence
  Description of Artificial Sequence: synthetic nucleic acid sequence
acaattaaagaaaatgattcaagatggcaagaagaactttcaaattttaataatgttataaatcaagagattacaagaccattaaaacctattcaagtaagagcgagtttttatttagccaccatgaaaagagcagccaatttttctgtacctggagctggtaaaacggctatgatgtatggcacatttgcttttttgtctagtgaaataaagcggaaagttgataaattaatagttatttctccaattaatgcatttgaagcttggcgttcagaatttattgaagtttttcaagataaaagagaattacactttatgaacctaagagataaaaaatataatgatttaggtaaagtacgaacagattggggaagtgcaaatgtcattgttttgaattttgaagcaatacaaaagtatgtaggggttttaaatgaacttattaatgataagacaatgatagtttatgatgaggttcataggataaaaggtattaatagtagcagagcaagttatgcattaactttaggtcctaaaagttattacagatacgttttaactggtaccccaattccaaatagttatcaagacatatttaacttcttaaatattttatataaagatgagtatgatacttattttggttggaatgttgctgatttacaaaatcctgatcctaatgaaattaatgacaagttgaacccttttttctggcgtacaaataagaacgatttggaagtgcctcaagcagaaaatgatattatattatgtgttaagcctagtaatattcaaattgaattagcaaaagcgatatacgaaaatgaatctgggatactagcgatttatataaggttactacaagcttcaactaacccagaattattgcaaaagaatattaattatagcgaactaggaatgttgaatgatgaattaaatttcgatttggataaagcattaaataaagaagaagaaaatcaagtaaaacaacaaatttataattcttttgatttaaaaaatgtaacttctccaaaattcgaaaaaggtattgaattgattgaaaacttagttagccaaggaaaaaaagttctagtatggggattgtttgtaggtacaatgaataaaatcaataagaggttactagaaagtgatattaattcaatattgatttatggagaaacacctaaagaagatagggtagatatgatcaataattttaggaatggaaatgcacaagttctaatatctaatcctaatacattaggcgagtccatatctttacatcagacagtacatgatgcaatatattttgaatataactttaatttaacgtttatgttgcaatcacgtgatagaatacatcgtttagggttaaataataatcaatatacaaggtattattatttgatgtctgaaggggatagagcccataaaggttttatcgataaagcagtttataacagactgaaggaaaaagaagatgtaatgttaaatgctattgatggaaatactttaaagccaatgattgaagatgattacttagaagatgttaagaaaattattattgaatgaaaaacgatacagaaaagctaatcggaagaatgcgtaagaacagtaaaaatatgcttttattcgtatttagtgggaagaattaaaagaatattttaatcatgaacagtcaaactaagtattctattgttttttaattagataataataccaatgaattaaatgatattaaatagagcattcctcaccgcaaagtgaaggatgctctatttttttataagtattataatattcactttgatagataatggttaataattgtctgtaaatcattattaagtacggttgctatagagtaatcattcataaaatcattatagattttatccaatatttcttagccttcgattactgtgaaatgacatactagacccttaatattgaaacgtattcatgcgatactaggcagctactagcaaccgtgtgtcagtcagtctgattgtgtagtcacatggttcatagataatcctccttttatttcaatgtccatttttggcgtgctttaggattgagtgggtgcatgatttcatttgttgctgggtttatgagctttttaattttctttttgtgaggcttcaacatttccatcacttgttcaacacgttcgataacaaatggtcgcttcgcataggctccataagctagaattactgtgtcactctcacttattgctttcattaagtgtctgtctgtatgtttatcataaggctctttaatatgtttgagattatctggggttttaatattcgaaaataaattcactaaatatacagcaccgtatcgttctgaattcgctaattgattgaggataagaacagttgtaagatcgagtgataatatgccgtctaaatgaggggacatcgttatcactgtacatgtgggcttcttttcattccacgtctttttaagtaagtatcggtgttgttcatcatcgctaaaaatcgcttctgtgtgtatcgtacttttgattgtattcatatttgttactccttttagtattcttctggtaaaagcatcacataataaaaagcgtccacgtcatcttcacgaatgacgtagactttttaggtaatgtatttttattttttacatagtttgcatagtgatattc

SEQ ID NO: 4330 - DNA, 3014 bp, Artificial Sequence
  Description of Artificial Sequence: synthetic nucleic acid sequence
tataaaaattaaattatggcatttcatactcgttattttgggtattattcttttaacatccatcattactgtagtatcaacaattttaattagccatcaaaaaagtggtttaaataaagaacaacgtgcaaatttaaaaaaaattgaatatgtctatcaaacacttaataaagattattacaaaaagcaaagttctgataaattaactcaatctgccatagatggtatggttaaagaacttaaagatccatattcagaatatatgactgctgaagaaacaaaacaatttaatgaaggtgtatcaggtgatttcgttggcataggtgctgaaatgcaaaagaaaaatgaacagataagtgttactagcccaatgaaggattcaccagcagaaaaagctggtattcaacctaaagatatcgtcacacaagtgaatcatcattcggtagtcggtaaaccacttgatcaagttgttaaaatggtccgcggcaaaaaaggaacatatgttactttaactataaaacgtggttcgcaagaaaaggatattaagattaaacgcgataccattcacgttaagagtgtagagtatgagaagaaaggcaatgtaggcgtactaacaatcaataaattccaaagcaatacttctggtgaactcaaatctgcaatcatcaaagcgcataagcaaggcatccgtcatatcattttagatttgagaaataatccgggggggttattagatgaggcagtcaagatggctaacatctttattgataagggaaatactgtcgttcaattagaaaaaggtaaggataaggaagaattaaaaacttctaatcaagcactaaaacaagcaaaagatatgaaagtatccatcttagttaatgagggatcagctagtgcttcagaagtgtttacaggtgctatgaaagactatcataaagctaaagtttacggttctaaaacatttggtaaaggtatcgttcagaccactcgtgaatttagtgatggttcattaattaaatatacagagatgaaatggctaacgcctgatggccattatattcatggtaaaggaattagaccagatgttagtatctcaacaccaaaataccaatcactcaatgtcattccagataacaaaacttatcatcaaggtgaaaaagataaaaatgttaaaacgatgaaaataggtctaaaagctttaggttatccaattgataacgaaacaaacatatttgacgaacaattagaatctgctattaaaacatttcaacaagacaataatttaaaagttaatggcaattttgataaaaaaacaaatgataaatttactgaaaaactagttgaaaaagcgaataaaaaagatactgttttaaacgatttactaaacaaactaaaataaacttgcgagtaaatcattaaacaaaaataatgtattcaaccctttaagtgtaatttcatacttaaagggttggattccttaaatttaataaccattcacgtttgaattaagagcctgagacatatagtatatgtacaggctcttaatcatatctgataattctgatttgttgaaaatacaactttaataaaaagttattcctattaaggtataatcccaatcatttcttaactttttcagattttcgttaattgattgagtcttaaaagtatcaacatgatttatatttattgttaccactcgttaaaattctaaaaaagaggtgttttagtaagatgattagattagcaactaaagatgatttacttagtattactcaattagtcaaagaggctaaacagattatggaagaattcaacaacaaccaatgggatgatgaatatcccgcgaaagagcattttgaagaagacatcgaaaataaaacacttgtgttgatttcagaagcatatattggaaattgattttcatatttaaataaccatttttctaataattcttttaatccttctttcataacatactcactataatgattgatgtctaataaatttacattttggattttagcatctaaagcatcatggtgtttaatatcaccagtaacaaaaacatctgctccaagttggctagctttatactcaaatcctatacctgaaccacctatgatagctactttcttaattggactatcatgttgacctgtatatcgtacgctcggtatattgagctgttttttggcatattcagaaaattcatctaaagtcatagtttggtttaattgtccaataatccctaatccatactcactttctttgttcattttaataaaatcaaaaactggtgtttcgtatgggtgattatctaaaatagcacgtttagttatttctaattcattgtcttttatcataaactcaagttttatttcatcaacatattcgatactatctaacttccctatataaggacttgcatcacctactggtttaaattgccctttaccttcactttcaaagaaacaatattcgtaattaccttctttagctaatccaagttcgtttaaactgtctttgaaatcttcaatataatttttaggtataaaagtttgaactttgtaataatatgagctatttgtattaatcattgatatgttctctaaacctatttgatccgctaacattcgattgacacctttaggatttacatcaagattagtgtgtaatgctataagattgatattattttggataagtttacgaattatactaccatatccatcttcaacgatacgttttactcctttgaaaataagtggatgatgagcaatgatggtattggtattaagttcaattgcttggttaacaacatcatcggtgcagtcgagtgttgtcagaatacctgtaatatctaacttatcattaccaattaataatcctacattaccaaccataggcttcgaaacgctgttttgtatcttcagaaaatgatttatctaaatctccatctaaagatatatcatttgaatcataaaggacaattaatttatctaactgattat

SEQ ID NO: 4331 - DNA, 3853 bp, Artificial Sequence
  Description of Artificial Sequence: synthetic nucleic acid sequence
gaataaagaaattcttagtcatcaaattctaaaaaataaaaaagaaaatattgtctatcctagagaagcatattcatatgaattagaacttattaatgctggcatgaatcatctatcttttcacaatataattgtgcaagaattaagagaagatagtaatcaagcttatgaggcaacgcaatatatagatcctaagaaaaaacttaaagtaattaatcaaataataaccaatataaggacacatcatctagactcatcaaactatcacaggagtgatatgaatggctaaaggtgttaaccaaattattaataatattaggttaagaaaattgcgcaaaatattaaatcaaattaatgcgcttagtgaggagttctcaaattttagtgatgaagcacttcaagcgaagacaaaagaatttaaagtttatttaaatgataataaagcttcactcaatcacattctgccacaagcttatgcaacagttagagaggcttctaagcgcgttttaggtatgtatccaaaagatgtgcagattttaggagcaatcgctatgcatcaggggaatattgcagaaatgcaaacaggagaaggtaagacgcttacagctaccatgcctctgtacttaaatgcacttacaggtaaaggtgcttatctaatcacaacaaatgattacttagcaaaacgcgattttttagaaatgaaaccactatatgaatggctaggcttgtctgtatcattaggatttgtggacattccagaatatgaatacgctgaaaatgaaaaatatgaactgtaccaccatgacattgtttacacgactaatgggcgactagggtttgattatttaattgataatttagctgatgatattcgtgccaaatttttaccgaaattaaactttgctattattgatgaagtcgattctattatattagacgctgcccaaacgcctttagttatttctggtgcaccacgtgtacaatctaatttatttcataaacttaattctttagtcttttctttatcatctttaacagctttgaattggttaagtacatcgtctgacattttgatgccaggcacttcattatgtaagaaaagtgcgttgttataacttgcgattggcatgatacctatgaagaaaggtgtatttaaatgttttgtttcttcatatacttgaataattttttctttactataaacgggttgagttatgaaataactcatgccacttgctactttcttttcaagtcgtttaatggctccatctaattttcgtacgttaggatcaaacgcaccagcgatgttaaagttagtatgttttttcagcgcatcgccgtcagtgttaatacctttgttaaatcttagtgcaagttctgtaaggccttttgagttcacgtcatagacatttgtagctccaggtaaatggcctactttagaaggatctccggtaatagctagtatttcattgacaccaatgagtgataaacctaggagatgagactgtaatcctattaaattacggtcacgacatgtcacatgtacaagaggctcaatatcgtagtgttgtttaattaaacttgccgctgcgatgttacttactcttacggtagctaatgaattatccgccaatgtaacagcatctatgccagcttcatctaatttgcctacattatcgaaaaatgtatcagtatccaaatgtttaggtgtatcaagttctacgatgactgttgggccatttttaactttagaagtaaggttttgtttaagaactcgcgtttgcttttgagatgaagctttattaatagggattacctttttatctttaacgggttttaaatgtttaactgctgatttaatatagcgaatatgttcaggtgttgtaccacaacaaccacctatcaatctgactccctcattaattaattcttgagctatatctccgaaatattgagcattatcactatatttgaattcactattctcgatatctaataaactagcgtttggataacacgataaatacgcatgtttaggaagttctatatgtgaaaatgatcgttgcatatggtgtgggccatggtgacaatttaatccaactacattggcgccacattcaactacgtatttcaatgcggcattaatttcagtgccatcaactaagtaattcgtatttgaagcggtgagttgagcgatgattggaatatcgtatttttgtcgtgtagcagtgacgatgcgagttaattcatctaaatcgtaataagtttcaaatagaagggcatctacaccttcatcaattaatgtatcgatttgaagttctgtatgatattgaattgttgaaagactgatatcctcttgccggacgcctctgaatccacctaccgttccaagtataattgtgtcctcatttgctgcacgtttagcaatttgaactgcagcttggtgaatttctttaactttatgttcaagaccaaaggactttaatttttcaaagttagcaccatacgtattcgtttgaatgacgtctgcaccagcttcgatataagaacgatgaatccgctcgaccttatctggatgagtaagattgtatgcttccggacaagtatcaagaccttccgagtagaatattgttccaatagcgccatcagctactaaaacgttgctctttaattggttcagtaaatgactcattgaaagcctcctttaaagcgtagttaaaatctgcgatgagttcttctgaattctcaagacctacacttaaacggaataacccgaaagtgatgccacgttcacgtctcacatcttctggcactgctgcatgagacattgttgcgggatgtgataggatagtttctacaccaccgagactcactgatacaagtggtaaagtaagagaatcgacgaacttttgtgctttagattcatctttaagtcggaaacctatcactgcacctccagttgaagcttgcttgagatgtgtaagattatttcccgggtaatacacctcagaaatctcctctctttgactcaaaaattgaacaaggcgttcagcattatgaacagattgtttaaaacgaactggtaatgttttaagatgttttgcaagtgcccaactatcatatgcagaaagggctgtgcccgtgccgttctgtaataagtacaatgcatttgcaacctctctattattagtaattgctgcacctgcaattaaatcgctatgtccacctagaaatttagttgcactatgaataactatgtcagcgcctagtgctaaaggtgattgacccaaaggtgtcataaacgtattatcaacagctaatagtatcttatgttcctttgctagcgttgctacagcatgaatatctgtaattttgaaaagtggatttgaaggcgtctctacatagatgagttttgtgtttgattgaatagcttcagtgatatgatctatatgtgtagcgttaactgtagtaaattcaatattgaatcgattgagtatttgttcagttaatctaaatgtgcccccgtaaacatcatcaggtaaaataacatgatcccctgcgtttaatgtgagtaaaacggctgaaattgcagcaatgcctgaagcataagcaaatccatatttaccaccttctaaacgtgcaagtttctcttcaagtaaagttcggttagggttaccacttcgtgcataatcatattgagtctcaccgcctaacactttttgatggaatgtagatgaatcgtaaagtggcgggttagctgagtcgtagtctttacctctacgcacatcgaatattacttctgtttctttagataaactcatgaaatcactcctactttagaattctctaatgc

SEQ ID NO: 4332 - DNA, 2125 bp, Artificial Sequence
  Description of Artificial Sequence: synthetic nucleic acid sequence
aatatctaaattctgaatcataatcatcttcgataatatatctttgcttagcttgatgggaccaattgattaattgtgttcttttttttaaattggtgacataaccagttggaaattgatgagatggtgttatatacaaaatattgttatttgtatttaaaatagggtcgatttgtattccattttgttcaactgggacttgaatataacttataccttttttatcaagcgtatgtttaataggtggataacttggctgttcaataataaattcttctttttttagtaaattggttatcatatcgagtaactggcttgttgatgatccaacaataatttgatttgggtgacaagtgacgccacgactattaaataagtaatgtgaaatttgttgccttaaaatatattccccttgacgctcgcctcgttgtaatagtgatagctgatggtcttcaaaaacgtctttcgcatattttctaaaaatgtgcataggaaaactttcagaatcaatttcagctaaattaaaagcatatttatattgtcgttgcttcttttctaagttatcagtgtttaattgatttgtttgtcgatgtatcactggcaacgattctatatcggaaacgaagtagccagatctaggtttcgaataaatgaaaccctcatctacaagtaattgatatgcatgttctattgtagtgtggctaacagataaatagttacttaactgtcgtttagatggaaatctatcatttgattgatattgaccttcgataatttgattttttaacttttcatataacgataaataaagtggttgatttactttcaattaactgacccctatctttatgtacaaattgaacctttttaaatatcagtttatctcgtaaaatatatttaatcaataagaaaaggggtaagtagtatgtctaaaatagtaggatcagatcgagttaaaagaggaatggctgaaatgcaaaaaggcggtgtcattatggacgtcgttaatgcagaacaagctaaaattgctgaagaagccggagctgttgccgtaatggcattagagcgtgtaccatcagatattcgtgctgctggcggtgttgcacgtatggcgaatcctaaaatagttgaagaagttatgaatgccgtatcaattccggttatggctaaagccagaattggtcatattacagaagctagagttttagaatcgatgggtgttgactatatagatgagtctgaagtattaacgcctgcagacgaagaatatcatttaagaaaagatcaatttacagttccttttgtgtgtggctgtcgtaacttaggtgaagcagcacgacgcattggtgaaggtgcggcgatgttgcgtacgaaaggtgaacctggtactggtaatattgttgaagctgtccgtcatatgagacgtgttaattctgaagttagccgcttaacagttatgaatgatgatgaaattatgacatttgcaaaagatttgggtgcaccttatgaagtattaaaacaaattaaagataatggacgtcttcctgtagttaattttgcagctggtggtgttgctacgcctcaggatgcagcactaatgatggaattaggtgcagatggtgtatttgttggttcaggtatatttaaatctgaagatcctgaaaaatttgctaaagctatcgttcaagctacaacacattatcaagattatgagttaatcggaaaattggctagtgagctaggtacggctatgaaaggtctagatattaatcaaatttcactagaagaaagaatgcaagagcgtggttggtaatgattaaaattggtgttttagccttacaaggtgctgtacgtgaacatatacgtcatattgaattaagtggttatgaaggcattgctataaaaagagtagagcaactagatgaaattgatggtctaatattacctggtggagagtctacaacattacgtcgtttaatggatttatatggatttaaagaaaagttacaacaattagatttgccaatgtttggaacatgtgctggattaattgttcttgcaaaaaatgttgaaaatgagtctggttatttaaataaattagatataactgttgagcgtaattcat

SEQ ID NO: 4333 - DNA, 1089 bp, Artificial Sequence
  Description of Artificial Sequence: synthetic nucleic acid sequence
gtttagacacaaaaggaaaagtcatttatattagtactttctcaaaatctttatatccaagctgtaagattgcatatattgttttgccacaaaatttaatgcacaaatataataatcaaaaatataaagagggaaatacagtgcctgtgcatgttcaacacatgattgctcaattcatgataagtgggaaatttgaaagacatttgaataaaatgcgaaagatatatagagataaacttgattatattttaaaacgattaaagccctacaatactcaaataaagattgaaggcgcactaactggaatgcattttacaataactgttaataatggattgtcaatgaaacaatgtttaaaaaatgcgaaaaaaaataatttaaaattaaaaccttatcattacgaaaattattctaaagtttatccaaaatttattttaggatttggggggataaaaaaagaagaattagaagatcatgttaatgcattaattcattcactcgttatataaatactagattttaagaaactttaaaatgttttaattattgttacgatacacaacagtaattaaagcatttaaggttggatatgttacttaacctttataagccacatatgaaattacctcttataaaagttgttaagtagcgaatttatttattaatactttcttttttagaactatttttgcataaaaaaaagagacctttcggtctcgattaggctcatcgcatcttatacgatatttgcctggcaacgtcctactctagcggaacgtcagtccgactaccatcggcgctaaggagcttaacttctgtgttcggcatgggaacaggtgtgacctccttgccattgtcaccagacaaatgaatgattatacattcaaaactagatagtaagtaagattttgcgtcgcaaaacgttttttaaaaattgattaagtcttcgatcgattagtattcgtcagctccacgtgtcaccacgcttccacctcgaacctattaacctcgtcatcttcgagagatcttataaccgaagttgggaaatctcatcttgaggggggcttcatgcttagatgctttcagcac

SEQ ID NO: 4334 - DNA, 2662 bp, Artificial Sequence
  Description of Artificial Sequence: synthetic nucleic acid sequence
atctttaatttgttttaatacttcataaggtgcacccaaatcttttgcaaatgtcataatttcatcatcattcataactgttaagcggctaacttcagaattaacacgtctcatatgacggacagcttcaacaatattaccagtaccaggttcacctttcgtacgcaacatcgccgcaccttcaccaatgcgtcgtgctgcttcacctaagttacgacagccacacacaaaaggaactgtaaattgatcttttcttaaatgatattcttcgtctgcaggcgttaatacttcagactcatctatatagtcaacacccatcgattctaaaactctagcttctgtaatatgaccaattctggctttagccataaccggaattgatacggcattcataacttcttcaactattttaggattcgccatacgtgcaacaccgccagcagcacgaatatctgatggtacacgctctaatgccattacggcaacagctccggcttcttcagcaattttagcttgttctgcattaacgacgtccataatgacaccgcctttttgcatttcagccattcctcttttaactcgatctgatcctactattttagacatactacttaccccttttcttattgattaaatatattttacgagataaactgatatttaaaaaggttcaatttgtacataaagataggggtcagttaattgaaagtaaatcaaccactttatttatcgttatatgaaaagttaaaaaatcaaattatcgaaggtcaatatcaatcaaatgatagatttccatctaaacgacagttaagtaactatttatctgttagccacactacaatagaacatgcatatcaattacttgtagatgagggtttcatttattcgaaacctagatctggctacttcgtttccgatatagaatcgttgccagtgatacatcgacaaacaaatcaattaaacactgataacttagaaaagaagcaacgacaatataaatatgcttttaatttagctgaaattgattctgaaagttttcctatgcacatttttagaaaatatgcgaaagacgtttttgaagaccatcagctatcactattacaacgaggcgagcgtcaaggggaatatattttaaggcaacaaatttcacattacttatttaatagtcgtggcgtcacttgtcacccaaatcaaattattgttggatcatcaacaagccagttactcgatatgataaccaatttactaaaaaaagaagaatttattattgaacagccaagttatccacctattaaacatacgcttgataaaaaaggtataagttatattcaagtcccagttgaacaaaatggaatacaaatcgaccctattttaaatacaaataacaatattttgtatataacaccatctcatcaatttccaactggttatgtcaccaatttaaaaaaaagaacacaattaatcaattggtcccatcaagctaagcaaagatatattatcgaagatgattatgattcagaatttagatattttggcaaacccatacctgcattacaaagtttagacacaaaaggaaaagtcatttatattagtactttctcaaaatctttatatccaagctgtaggattgcatatattgttttgccacaaaatttaatgcacaaatataataatcaaaaatataaagagggaaatacagtgcctgtgcatgttcaacacatgattgctcaattcatgataagtgggaaatttgaaagacatttgaataaaatgcgaaagatatatagagataaacttgattatattttaaaacgattaaagccctacaatactcaaataaagattgaaggcgcactaactggaatgcattttacaataactgttaataatggattgtcaatgaaacaatgtttaaaaaatgcgaaaaaaaataatttaaaattaaaaccttatcattacgaaaattattctaaagtttatccaaaatttattttaggatttggggggataaaaaaagaagaattagaagatcatgttaatgcattaattcattcactcgttatataaatactagattttaagaaactttaaaatgttttaattattgttacgatacacaacagtaattaaagcatttaaggttggatatgttacttaacctttataagccacatatgaaattacctcttataaaagttgttaagtagcgaatttatttattaatacttccttttttagaactatttttgcataaaaaaaagagacctttcggtctcgattaggctcatcgcatcttatacgatatttgcctggcaacgtcctactctagcggaacgtcagtccgactaccatcggcgctaaggagcttaacttctgtgttcggcatgggaacaggtgtgacctccttgccattgtcaccagacaaatgaatgattatacattcaaaactagatagtaagtaagattttgcgtcgcaaaacgttttttaaaaattgattaagtcttcgatcgattagtattcgtcagctccacgtgtcaccacgcttccacctcgaacctattaacctcgtcctcttcgagagatcttataaccgaagttgggaaatctcatcttgaggggggcttcatgcttagatgctttcagcacttatcccgtccatac

SEQ ID NO: 4335 - DNA, 2796 bp, Artificial Sequence
  Description of Artificial Sequence: synthetic nucleic acid sequence
atgtatcaggtgtaattgcatttatgctttgtctaccatcactcacaataccatcaatttgattattcgttgtagcattatcaatcttactaattacattttgctgtgatgcattaactaaattatttgcgacttccttctcttcagttgtagcatcatcattattttgtatagtttgtttatgttgttgaacaatatcattaatcgtagttttggcttcttgctttttcctaacattaacttgtgtattttgaatattttgaattccactagtaagtgctgtatccacattttgatttgtttgtgcttgatttatgtcgttgagtgcagtttcctttgcttgtgttaatctagttaacgcatcttgtttttcatcttgagttgcatgaggtgttgaatttaactcagcttctttttcttggaacttttgatttacttggtctctagcttgttgctttttagtgaaattagtctgtattttactgatattacttatacctatatttaaggcgttgtcgacattttgattagaagcagcctgtgtaatttgttcatcagctaaatttttagcatcattcaaactttgaattgctttttgtttttcttctatagtgccttcattgtcagtattaatcgtactctgcctttcatttgttttagcaatcaatgcttgtctggcttgaggtttttttgaacattgacattagtttgagtaataatttgttctgcattactaagttcttgatcaacatcatcattagaatttgcttggttgatatgggtaatgccattggtaacagcttgcgaaacagcactgacagcttcttgtttctcttcagtggtagcatcaggtgtttgagctattgctgactttttctcgtttcctttttgttctaatattatttttgtattatttttcttaactgcgttaggttgatcttgattaatagtatttatgccattattcttagcttcagaaacttgctgagttgactgcgcttgattgatagttgctattgcggcctgcttatgtgcttctacttgatttaatgcatcctccttttcttcagttgttgccatattatttgaattaatttgttgattttgtgcaatagctttagcttctactgctgcacgtgcatcctctttaatcttcgttgcaggactaatagcagatatgataccacttccagttgtttgtgcttgatcaacatctctattagtagttgcattggtaatattttgatttgcagttatgactgcttcattaactttacgctctgcatcagctttttcttcagtcgttgcattattgtttgcttgaattaaacgtttttgttcatccgctttagcattgatagttgctattgcattttgtcttttcactggagttaatggtacttgttgtatcgtattcgttccattattttgtgcttcagtgacatcatcattaccttgtgcagtgttaatattttgaattgcttcatcttttgatctattaacaagtgcgatagcatcatttctctcgtctaatgttgcttgtgtattattgttgatatccttaatttttgaatttgcactgttggtaactgccgctctagcttctgcttttttagttggatttggaacatctgtagctattaatttcgtaccattgtctctagcttcatttacagtggtatctgtttctgcctcacctattttggcgatagcatcagatgaatgtgcctcaacttgtctaatcgcttcattttgttcttcggtagttgcctcatgattgttacgtataagcgtcttttgttgatctgctctgttattcacaacttgtcgtgcatttggttttgttactggatgtggagtatcactttctagagtatgtaatccagcctctttgactctttcaacaccatcatctgtaagttcatcatcaatgttattagaaatttcatttttatgattttcaatttgatcaactaatgtatctttttcttcagtagttaattctgtactatcatatacagcatcagtcatttcttgagctttatcattaatttctctcgaagcactcacacgatttattagtgttgtttgtaattcgtgtaacaaatcatcaatttgagtttgagagtatctttggttaaaaggtgtattgtttgtttcttcatccagaacagtctgagcacgttctttcaacttattatatttattataagaagcaagtgtatagttcgatgggatgatatccttattgacctgttctgataaatcgtctttattcatgatgacattaatactgaaaggtgtttgttgaccagtaacagtattgtcattagtgttaatgtaatattcagaaaatgtcttatatttaattgcttcattgaaagtcacttcacgtggcgttgagatgttgacaggtctaagcttgtatctaatatttagtattttattgggcaagaatctagcaacatcctgagcacttcttcctaaatttaaaccacccgtagtgtagcggttaacacgcctgcctgtcacgcaggagatcgcgggttcgattcccgtcgggaccgccatttattaaattttaatagttatttatctataatttgtggaggaatacccaagtccggctgaagggatcggtcttgaaaaccgacagggccttaacgggccgcgggggttcgaatccctcttcctccgccattaattattagcgcgggatggagcagttcggtagctcgtcgggctcataacccgaaggtcggtggttcaaatccgcctcccgcaatattattgata

SEQ ID NO: 4336 - DNA, 3124 bp, Artificial Sequence
  Description of Artificial Sequence: synthetic nucleic acid sequence
tcatccaactcaaatgattaaaaatcagtccaaacgttgttttaaacccattctcatcaaataaatgtacagcgttaaagactttaggatttgaaaatacatttaatccgtagcctttaaaatgtttttttagttttgaaatcgttttaaatagtaatggagcgctattacttaaatcaatttcattattattcagtaattgatgattatataaatttagaaaaattaaattttcactactaaaatcaaactgctttaaatcatctattaaatgcttaaattgtagaatatttttgagtaataaaccttcctcattatcaagtaaatagggtgactttaatctagcattatcaatataaagatagtcaaattttaaacgctttatttgcgaagctaatgatttaaattgtgcagtgtcattaaacatgcaactaatatctaaacctattttatattccaattcgatgttttgtatcttcaagatattacgataaatttctcgaatacttttttcgttcaaattaaatataaattgcacattgtaatctgaaacagaacatttattcataatttttaagttttcatattgatatgtaaaaagttgattaagttcatatatttgctcgattttatcgatgctaaatgcgacgtgcaagcgatattcaataataattttaatgatatcattcatctcttcttgagagaacaaattcttatattggcataagttaggcataatacaaaaaataatatttgaaccttcataccctatttttttatgaataccttgcaaaaacaacattttaatttcatcaattgaattaatttgaacgacagaataaaacgttgaaacattagaaattggatattggtcaataacaatttcatcataattatctaactcattcgttggcattttagaacatattaatgattgtacacatgattttaagtgttctgaaacatcatcatcagaacatccattgtacttatcatattttttcattgcacgatatgcattgggcgttacacttaaataatttttgaattgtctagaatatgtagatacattactaaatcctaacgtttgttactgaacttttgcaactttttaaaacatcattgatttttaattttttattaaaattttatttagaaatagtaatttccaaaagatacttaattttgtttgatataatcacaccatcaaatgaaacgaggtgtaacaatattgaattggcaacgtaaatgtatactaactactttgttggttttaagtagtttatttttagtattttcgactatcacatatgcgagtgaacgtgattttaaagacagtcttaaaatcactacacataacgtgtatttcttacctactgctatctaccctaattggggacaatctcagcgcgctgatttaatttcaaaagcagattacattcaaaatcaagatgtcgtgattctaaatgaattatttgataaaaaagcttcaaaaagattgttaacacgtctacattcacagtacccttatcaaacacctatcgttggtaaaggtacagaaggttggcaaaatacttctggtacttatagaaaaattaaaaaagtaagtggtggcgttggtattgtgagtaaatggcctatcgtacaacaagaacaacatatttataaaaaaggttgtggggctgatatggcaggtaataaaggctttgcctacattaaaattaataagaatggcaaataccaccatattatcggaacacatctacaagctgaagatccaacatgctttaaaggaaaagataaagacattagacagagtcaaatgagtgaaattaaacagtttatcaaagacaagaatatccctaaaaatgaacccgtctatatcggtggtgacttaaatgtcattaaagattcagatgaatatcaacaaatggcaaataacttaaatgtttcattacctactcaattcgatggtaatgcatatagttgggatactagcagtaatagtattgcgaaatataattatcctaaattagaacctcaacacttagattatattttattagatcatgaccatgcacaaccaagctcatggcataatgatacacatagagtgaagtcaccagaatggtccgtgaaatcttggggaaaaacatacaaatacaatgattactcagatcattacccactctcaggctatgcatcaaatgaataggacgattgatacatttaattattaaattttaatatttagaataggagctatatgaaacattggcattatacttcgaatttcatatagcttctttatgatattattttatggttatataaaaataaacgttgtttgacaaactaagttaaatattttgaatatgaatgataacgtttaaaaaatcaatttccactattttatatttttacaggcgttatctaaaagataaatacttgctacttcatgtactattttcatgattttataactcaatctatgacaataaatattcactattttttagacattcgtttgtgtgacgtcagacaaccgtatctataaaatcgcttttataccagtattttaaatcgtgaaaatcattttaaactattttagacatccatccctaattgaatataaaaataccaatttcgcctttatatattaaaaaactgtcgataagtttatagaatcttatcgacagttaaataactttttaatattgtaatcatctagttaagtttatatgattatttgattggtttttcaattttagttttgccacccataaatggtactaatgcttcaggaattgttaatgtaccatcttcgttttgatagttttcaacgatggctgcaaatgtacgacctactgctaaaccactaccatttaatgtgtgtactaattctggtttagaagcagcatcacgtttgaatctgatatttgcgcgacgtgcttggaaatcagtacagttagagcaagacagtgcaccacgccccatcccattacctaatcaaacaaagaacctcttatttcattttgacgacgggcaaattattagaggtaaaaagacacttttttcatccaaggagcttaaactgtattcaggtgaatggttaacaatcttt

SEQ ID NO: 4337 - DNA, 3294 bp, Artificial Sequence
  Description of Artificial Sequence: synthetic nucleic acid sequence
taatcccttacataccaaggattacagctataattttaaaatcgagttatttctatatagtatcaagacaagaagaaactcgttttcaactcgtttcaaaaacctttcaaaaaccatcaatccacaaaaataccacgcgaatgacactcaaaatacaagactacaattaaaaaatacttagaataaaattaaataaaatacgaaaattaaaaggagttaaaaatgccttatatttatttaataatagccataagtactgaagttattggaagtgcatttcttaaatcttcagaaggcttttcaaaatttataccatcctttagaataaaattaaataaaatacgaaaattaaaaggagttaaaaatgccttatatttatttaataatagccataagtactgaagttattggaagtgcatttcttaaatcttcagaaggcttttcaaaatttataccatccttaggaacaataatttcatttggaatttgtttctattttttaagtaaaacaatgcaacacctaccactaaatataacttatgcaacttgggcgggactaggtttagtcttaacaaccgtagtctcaataattattttcaaagaacaaataaatctaataactatagtatctatagttttaatcatagtcggcgtagtttcgttaaacattttcggaacatcgcattaattgctttattccaattgctttattgacgttgagcctcgggaacccttaacaatcccaaaacttgtcgaatggtcggcttaatagctcacgctatgccgacattcgtctgcaagtttagttaagggttcttctcaacgcacaataaattttctcggcataaatgcgtgttcttgttataatatagacatcacatttagggtgcttattaaaagtagttttttataatctacttcgcaaaagcaaataaaaagccaatccattttatctgggttggctttttatttttatatgcctttatttgaattttaagggggcattttaaagattcagggggtaaatcatatagttttatacctaaaagtctatatacgcttttaaaacgcaaatatgagccaaataaatatatcttaatttcacaaacaaaaatttgagcaaaaccagtgactaattttttagacactgcccagttatatgcaaattaaaaatttagcaaactgggcagaaaaaaataaacactgcccagttatatgcaaattaaaaatttagcaaactgggcagaaaaaaataaacactgcccatttacatgcaaacttaaaagttaacatgaaaactggtcaaccatgccggttgaacgctatagttcccgcaggggcaaaaagacataaaaaaacgctagctttttagctaacgtttcaaatcttttaaataataattttgtttttcaaaattccaaattgccgtaattgaatgtgctttttcttcttcgtctgttgttttatcttcgtcacttgtattaatcaaattgccatcttcggcatcatctaaatttaaaatcttatgtttttgtttaagcaaaccaccataactcaacatacgttttcgatataaacctttttctaaatcattcacgatttcttgatttctttcatcatcatcagttaaaaaatcagatgacttaaccgaatatttagaggtttctttgatagctgcttgaatatctttatcgcctttttgatttggtttgatcgctttaatatttgctacgggtcgataatttacttgtaatgctttttgccataaattaacccattcttcttgagttatataattagctttattcttaaaataactattttcaactttagagatactatgagtggaacggttaaactgattttagaaattgtaagaacaatttttattattgagtttataggtgcactcttactcgcgttctatttttatcgggataatcctgatttaaaaaacgcattaatgcaaggcatttttgtgtcagtatctgctacgactaacggtggtcttgatattactggtgaatctttagttccctatgcaaaagactattttgtacaaacaatagtaatgttcttaattgtgttaggatctataggctttccagttttgttggagttaaaagcatatataaagaatcgagtaactaattttaggttctcattattcacaaaaataacgacaacaacgtatttattcttatttttattcggcgttattgttgtattaatattagaacatagcaatgcatttaaaggattgagttggcatcaatcattattttatgcattgttccaatcatcaacgaccagaagtgcaggtttgcaaacgatagatgtgtcacatttcagcgacgcaacaaatattgtaatgggattattgatgtttataggatcatctcccagttctgtaggaggtggaatcagaacaacaacatttgctattttaattttgtttgttattaattttaataatactggtgacaaaacaggtattaaaattttcaacagagaagtacatattatggatgtacaaagatcatttgccgtatttactatggcgtcattaattacatttattagcatgattattatatctgccactgaacaaggcaagttgtcctttttacaaattttctttgaagtaatgtctgcgtttggtacatgtggtttaagcttaggtgtgacaagcgatgtcaacgacattaccaaggctgtattaatgatattaatgtttataggtcgtgtaggacttatttcattcattattatgttagctggacgtaaagaacccgaaaaatatagctatcctaaagaacgtatacaaattggatagtcaatacactattagcaaagacatacgtgcacctttgctaatagtttttttatttagaatgatatcaatgcgataatagttttataacatttaatgaatggtacatgttacactaaattcaaggagaggagtggctctatggaaaaaaatgaaaataaaatagttgatgtgattgcaacttctgatatgcatagtcacttcttaaatggtgattatggctcaaacatttatcgggctggtacttatgttaatgaagctcgaaaaaataatgaaaatgtcatattactagatagtgggggaagtttggcgggatcacttgcagcattttattacgccgttgtagcaccatataaacgtcatcctatgattaagttgatgaatgcaatgcagtatgatgctagtggaattagccctaatgaatttaaatttggattatcttttttgacacgttcagttgc

SEQ ID NO: 4338 - DNA, 2378 bp, Artificial Sequence
  Description of Artificial Sequence: synthetic nucleic acid sequence
aactggtaagcaaaaaagatatttacgtagtttagctcataacattgatccaactttccaaataggtaaaggtggtattaatgaaaatatgattcaacaaatttctgaaacattagaaaagagagaattaattaagattcatatattacaaaataattttgatgataaaaaagatttagcagcaatagtatctcaacaaacgcaaagtgaattggtacaaataatcgggtcaatgattgtgttatataaagagtctgaagaaaataaagaaatcaaattgccacaatgaataaaaaaatcgttctctttggcggtcaatttaacccgattcacactgctcacttagcagtagcaagtgaggtttatcatgctattaaaccagatatatttttctttttgcctagttatatggctcctttaaagcatcataatacacaattatattctgaacatcgagtgaaaatgatacagctcgctattaaggagattggatttggtgaaatttgcactactgatttagatagaaaaggtccaagctatacgtatgaaaccattttgcatctcaaagaaatatatcataatgcacagttatactttattattggaacagatcagtataatcaattggataagtggtataaaattaatgaattaaaaaaacttgtaacctttattgtagtgaatagagaaactgataaccaaaatgtaagtaaagagatgatttctataaagatacctcgaatagatataagctcaacaatgattagaaatagagtgagaatgaaccaatctataaaagttttagtacctaaaagggtagagaattatattaaagaggaggggttttatggagataagtagagctaaagaactggtaaaagaaaaactgcctgataaacgttatcaacattcattacgagtggcggatacagcagttaagttagcagaaatatacgatggtgatatcaaaaaagctgagttggcaggtatattacatgattactgtaaatacgaagacttaagtacaatgtatcaaattgttagacaatacgaacttgaaagtgatttgcttagctatggtggagagattcttcatggaccagtatgtgcggcacttatgaagcatgaatttgatgtaaatgatgaagaagttttacttgctataaaatatcatacgactgggcgtcaacaaatgactaaaacagagaaacttgtttttattgcagactatatagagcctggtagaaaaacgcctggagttgaagaaattagagatatggcatacaatcaaggtagcttagataagacaatttatgagatttctaagcgtactgtattatttttaatagaaaaggatattactgtatatggcgccacaattgcgtgtttaaattattataattatagcgatgaaagaataaaggatgattaaatgaattcagaagaattattaaatattgctgtcgaagcggcagagaataagaaagcagaagatattatttctctcaatatgaatgaaattagtgatatgacagattattttgtagtctgtcacgggaacaatgaacgtcaagttcaatccattgctagatctgttaaagaagtggcacataaacatgatattgacgttaaacgtatggaaggctatcaagaagctcgatggatacttattgatttagcaaatgtagttgttcatgtttttcataaggatgaaagaagctattacaatttagagaaattatatcaagatgcacctattaaagaatacggtcaggcagtattttagtcatgaatcaatatgaagatatgagtttagtatatgacaaacttactcaagatcaaccgtatcattcgtggtttaatattgttgagcatttcttaccttctgatagtcatgatttgttagatattggttgcggtactggcaacttaacacaattactaacgtcactaggtgaagtcactggtatggatattagtgtagatatgttatcaatagctagacaaaaaacaaatcaagtgaagtggatcgaaggtaatatgactcactttaatttgaacaaaaaatttaatatgattacaatattttgtgattcactgaattatttagaaacattaaatgacgtaaaaatgacattcgaaagagtgtatcaacatttaaataaaaatggtgtttttatttttgatgtacatactgttcataaaatgaaaacattatttaataataaaagttatattgatgaatctgataatgtttttgtaggttgggatgcaatatgtggggatgaaccattaagtgtttatcatgaaatgactttctttgtatcacagcaaaatggattgtatcaacgctttgacgaatcacattatcaaagaac

SEQ ID NO: 4339 - DNA, 3874 bp, Artificial Sequence
  Description of Artificial Sequence: synthetic nucleic acid sequence
ttgaattgataggtctattaaattcgttagctaacatttcttcgttatagggtagactttcggataacataatgtatccttgttcgttatactttccagctaatgtcagcaacttaacccataaagtgatgattgtatctcgttctggcagtgcttctatatacttgattttgctatcatcgaacattccaacttttaatttaatccacgatacttcagccatttacttctcctttcaacattcggttgagtcgttcatctacggacacccaactttcatgtaatttgtatttctcattaaaactatctatacctatttggtgctgctctttatgatgtcttgaacatagcgctaatactttgttgtctgtgtgatctatctttcgtctgttacgtcctcgacctactgtgtgataatgcgcaagttctgctcgtggcgttccgcatattacacagttacgattgactgttgaccagtaaaggaacgctttatcatttttgagtaagtcacttgtcttataattaagtggtatattgttgtgaaacacccagtcaagaataacttctataacttgtttagcttgttctcttgtgcaatcactcaatgagagacgtttttcatagccatagagaacttctacgtaatccatgaacaaatacctcatatagtcgcgtggttgtcctgtgtaagcttctatgtcgttacagagagcaaatacttttctacgctgcttatctgtaatcttgaatggatctacaactcttacatctgcttctacttcgtaaccgttgtctaaaagtaaagatgttttgttatctagttctactcctttgatgactacagttgttgtaccgtcatcttctgtaatgtagttttttattactaccatctaatcagtccaatcagaacgggagatcttcatcagttatatcgatagggctcgttgcatttgcgaatggatttttactttttgtctgtgtagtatgttcttgttgtttttgaggttggttgttttgttggttattacctttggtatctaagaactgaacgctatcggctacaacttctgtaacaaatactcgacgaccttcgttattttcgtaattacgtgattgaacacgtccatctacacctgctagtgaaccttttgaaagataatcgtttacattcttcgcttgttttctgaacacaactacattgatgaaatctgcttctcgttcaccttgtgcgttagtaaatgttctgtttactgctaatgtgaatgtcgctacttcaactccactcggcgtagttctaaactctggatctttcgttaatcttcctactaatacaactctatttaacatttgaattctccttatctaattgttttagtcctgcatctagtttttgatgtgcatttgctatatcttttttagtaactttgttaatgttttgaatacctaaccaacgcattgttttgtctagcgttgcgtctctacctttttcttgagatgaagttacaaactggttgatacgctcttctaattctgtaatgtcattgtcgttagcgcttggaacttcttccccgttgtatatataaagacctaggccatgtaatgctgcagctttaacgaaacaacgtttttgagctttattaatatcaaatgttgtcgcgctaccctttgctaaagatttgtttctaaaatccaatactggaagccattctgtttcagtttgtccttttacagttactgacacttgtacgaagtaaccctctggagtagctaaataaggtacaaaatagttatctagtggcacatcagggtgtacaaattcatgtgttttaatactgtagttgctgtctatcttctttaattcttgatgagcgtatgaccatgctaggtaggttaatccatttttcttttctacatgatcgttaacatctttttgatttaactgattaaatagtgtttcttcagtcatactcaacctcctcatattcagttgtttctgttactttctttttaattgctctgtgcttagtcatgtcgatactcacatcttctagtcctgcaaattctcttgctctccgtctatctcttgaataagaagtatcttcttcgttgttaggtttattagtgatatacaggtcgaaaggagcgtctttcagtttaattagatatgtcactgtttctttcatcaatcaaacactcccctgcaatgacttcttttgctagttcaaatttttgttgtaattcttcatctgtgaaaaattcgtagaaattcagatgattacaattactttcatatttttgagaatagtgccaaaaggtaataccaacttctccattatcaaaagtatgaaattctgctttcactttttcatcactatgcaaaatcaatttatttaaatcattggccgtttttaataatttgtgtctcaacttgactacctccgtatattttgattaaattaagttgtatattttgattagattctgactgttacttgttggcgcaagtttcagtcttttttgttatctcaagccacttttcccagaagaatgtgctaaagataagtgttaacattgaaaatgctattaccgtaaagaaaccacctcctaaaagtaatgtgatgatcattgcgataaacatcgtcatgtaacttaatagatatttcatttatcattctctcctttcatttctaaaagtttttcgatatatcctctttcttcagtaaaactcctctaaagtgacgtttctgacaccattaaattttgttctataaagtcaattgccggtctaatcttgatgtagcgtttatgattcttgccaaatctgtacatacatttctcttggaactctttattgctataaacgtgcttttctaaatcgtttttagaaattccacttattttcacaaactcgatagcgtccgcaaatccaatgtattccattgctatcactccttatacttcgttttcaaagtccatttctaattgtttgatgacatacattgttgattgagatggaaaccaatttgtgatcatattcattacgtcatcgaaatgtttttgttttaattgtgttcttgttttaataccagccatcgtatttacgttactgttaatatctctatataaaggtttgttaacttctttattattaggtagtccgtgaatttgtctgatataagcaacgcgttgatgaactgtttttgttatcaatccgtattctcctgcatctagcttttgattttctttgatatcaataacatctgctttaacagttgctatttcttctttggtttgtttttgtgcgtcgaacataagttgcaatgcgtccattggattatcaggaacttgataagtacctgttttacgaatggaaggtaaaacatcttcggttacccaacgtttaaaacgtttagctttctttctaatactttcgtttttactttgtttagcagcgtcaaagattaagctgtataaaccagattcgttgatgattaccatgtttcgtttttgacctgatgcactaacttggtgcgtcagcttatcttcatcatcaacatgatttctaattgcattatcagatcttgtgtaacctaatatttctgccacgtctttacctaaaaaatatggttctccatctacttctatttttcttactggtaaatcttcaaaattaaatacttgtaaatcttgcatattgtttatgctcctttctgctatactccttataaaaggaggtgaaaatatgaaaagttttattattgcgtatgatttaaataaccaaaaggattatccaaaattaatagagcgtattgaggattatcctaatgttgctaaaatcaataaatcagtttggtttattaattcaactaatgat

SEQ ID NO: 4340 - DNA, 1210 bp, Artificial Sequence
  Description of Artificial Sequence: synthetic nucleic acid sequence
cagcatcttttaaaacattgactttatctaatttttcccatggtaacaatacgtctgtacgtccaaaatgaccatacgctgctgtttgtctatatatcggttgttttaagtctaacattttaatgatacctgctggtcttaaatcaaaatgctttcttacagcttcaactaaacgtgcttctgaaacctttccagtatcaaacgtattaattgaaatggaaacgggttctgctacaccaattgcatatgcaagttgtacttcacattgtttagctaaaccagctgcaacaatatttttagctacatatcttgctgcataagctgctgaacgatctactttagtaggatctttaccactaaaacaacctccaccatgacgggcataaccaccatacgtatcaactataattttacgtccagttaaaccagcatctccttgaggtcctccaataacgaaacgtccagttgggttaatgtaaaatttagtttcatcatctaataaagctttatctacagttgggtaaataacatgcgttttaatgtccttttcaatttgtgctaactctacatcttcagcatgttgtgtagaaactacaatggtatcaatacgtctaggtttgtcatctttaccatattcaacagtcacctgtacttttccatctggacgaagataatctaaaatttcatcttttcgtacatcagccaatcgtttagcaagttgatgtgacaggaatataggtagaggcatatacgtatcagtttcatcagttgcatatccaaacattaatccttggtcacctgcacctgttgcttcaatttcttcttcagaaatatcatttcgatactcaagagctttgtctacaccctgtgcaatatcaggagactgttcatcaatcgcagttaacactgccattgtttgtgaatcataaccatattttgctctagtataaccaatatctttaatcgtttctctcaccactttaggaatatctacataagtagttgttgagatttctccagaaataagtgccattcctgttgttactgttgtttcacatgctacacgagcattgggatcatcctttaatatttcatcaagaatggcatctgaaacttggtcagcaattttatcaggatggccttcagtaactgattctgaggtaaataatcgtttattgtatgtcatcattttctcctttaaataaattac

SEQ ID NO: 4341 - DNA, 2862 bp, Artificial Sequence
  Description of Artificial Sequence: synthetic nucleic acid sequence
tatagatagagagaaggctcttaaacgtccattcgctcttatcgttcagaccatatttgtctgcaaacggtttggcacctttctttaaataaagaggttgctgggtttcattgggtccatgtccctccaccactcaggataagagaatccgttaaacttaataatatctaattcaaagtatgttgtcaattttatacattgtcactatttctattttaaagtggataaattcaatctgtatgttatactatctaaatgtaagggcttacataaattatcgtatggagggattgggtatgtctatagatacatacacagaaacacttaagataaataagctaatagaaaaagctacatcacattttcaactatcatcaacacaattatacaaaaaaattttaaaaaatcatgagggtgagttaactgaactgggggcaataaatgttaaaacaggtaagtacactggtcgttcacctaaagataaatttatagtcactgaaccatcgtataaggataatataaattggggagatatcaatcagcccatggatgaagaaacatttctaaaactttacaataaagtactcgattatttaaatcagaaagaggaactttacatatttagtggatatgcagggagcgataaagagtcacgtcttaaacttaaggtgataaatgaattagcttggcataatttatttgctcgtaacatgtttattcgtccagaatctatagatgaagctcaaaatataaaacccaacttcacaattgtttcagcacctcactttaaagctaatcccaaattagatgggacacatagtgaaacatttgtcattatatcttttaaacataaagtgattttaattggtggcacagaatatgctggtgaaatgaaaaaaggtattttctctgtaatgaactatttgcttccaatacaggatatcatgagtatgcattgttcagctaatgttggagaaaaaggagatgtagcactattctttggattatcaggaactggtaagacgacgctttctgccgatccaaaacgtaagttaattggtgacgatgaacatggttggaataaaaatggcgtttttaatattgagggtgggtgttatgcaaaagcaattcatttatctaaacagaaagagcctcaaatttataatgctattaaatacggaacaatattagaaaacacagttacaaatgatgacggtacggtagattttgatgataacacctatactgaaaacactcgcgccgcctaccctattgactatatagagaatattgttacaccttcaaaggcagcacatccgaatacgattatattcttaaccgctgatgcatttggagttatccctcctatttctaagctaactaaagatcaagcaatgtatcatttcttaagtggattcacgtctaaactagctggaacagaacgtggtgttactgaacctcaaccttcgttttcaacttgctttggtgcaccattcttacctttgagtccaacaaagtacgctgatctacttggaaatttaatcgatattcatgatgtagatgtatatctagtaaatactggatggacaggtggtaaatatggtgtagggcgaagaattagtctacactatactcgtgaaatggtagatcaagcaatatcaggtaaattaaaaaatactaaatatattaaagatgatacatttggcttaaatattccagttcaaattgacagtgtacctacaactattctgaatcctatcaatgcttggaacaataaagataactacaaagcacaagcttacgatttgattcaacgctttaataataattttaaaaaattcggcaaggaagtcgaacatattgccaacaaaggtgcatttaatcaataattaatataagcatttattacgctaaatttaaaagcattgtgcctgagaaagcttttaatatctcgggcacttaaatttttatttaaatgacgatggaaataataatacatttatttgaggatatctagatatgatattacatttctagagtttcaaacagtctctttatttaataactaattattcctaatatctacattgctatcatcaacttgtataatccattgttactatatatttaaatttttattttcgacgtcgttcatccattgatgtatatatcgaattacgtctctcatcgcaggaggtcgtggtacatgaccttcatccaattgataataggtttgataataaattcctttggattttaattttttttctaaatcataagcttgatgtattccaacttgaatatctttgccaccatgaataatgagaataggaggactatctttttttataaattgcattgcatctctgcttttataagctttcgcatctttttttggatgtccaaccattcgtcgtagcatacctctcaagtcaactcgttcttcatacattaaatgtatatcagatacgccaccccaaatcatataactatctacaggcaaatcattaaaagtaagtaatccttgtagacctccacgtgaaaatcctaccatatgtataaatgcagaaggatagttttgatttaaaagtcgaatcaaatgcgttacatcatttaaatcaccgcggtaaaattcatctcttccttcacttccattatttcctctatagtaaggacctataactaaagtatattcatttgcaaattgcataagtcttgcagctctctcccttagcttttctttttataattcattcaatttattttatttcatatcatgaacagctttttcatattgtctaacgatatcaaagtctgaatctttagtatcaacataaccttcatgagaatatacctcgctaa

SEQ ID NO: 4342 - DNA, 3701 bp, Artificial Sequence
  Description of Artificial Sequence: synthetic nucleic acid sequence
ttgatacctataattcatttcatcaatatcctctaacaattgtttaatgatttgatacatttagatgcctcctacttaattaatttaacatattataaatccgaaagtcatggaaatatacatagagtaaaaaattagaaaatgatatttttggtttgttaaattctattagtaatactaaataaaaaaatatgaaatttatggaattttattaacttgaagattacatttatctttcatttatgaaagaaatcgtgacagattggcataagcaagttaaaatagtgattgatgtatgttttctttgtgacatatacattcaaatacgatagtttgttttaattttataattttaaataatcatttagtataaaataggaacaaacttgtgtggtgaattatgatgaattatccaaatggtaaaccatactctaaaaataagcctttggacggacgtaagagttcgccattttcaagtaatattgaatatggtggacgaggtatgacactagagaaagatattgaacaatcgaatactttctatcttaaaagtggcatagcagttattcataaaaagccgactccggttcaaatagttaatgttcactatccgaaacgtagtaaggctgtaataaatgaggcttattttcgcactccttcaacaactgattataatggtgtctataatggatattacattgattttgaagctaaagaaactaagaacaaaacttcatttccactcaataatattcatgcacatcaagtagaacatatgaaaaatacatatcatcaaaaaggaattgtctttttaatgatacgttttaaatcacttgatgaagtgtatcttttaccctattcaaaatttgaaaaatattggcaaagatacattaataatattaaaaagtcgataactgttgaagaaattcggaaaaatggttaccatattccttatcaatatcaaccaagattgaattacctcaaggcagttgataagttgatattagatgaaagtgaggaccgcgtatgacggaaaataaagggtcttcccaacctaaaaagaacaacaatgggaagtccaatggaaaaaagaataggaatgtaaagagaacgattattaagattataggttttatgattattgcctttttcgttctattgctactcggtatcttgttgtttgcttattatgcgtggaaagctccagcatttagcgaatcaaaattagatgatccaattccagcaaagatttacgataaaaacggagaacttgtaaaaacacttgataacggacagcgacatgaacatgtgaatatcaaagatgttcctaaagacatgaaaaacgctgttttagctactgaagataaccgtttctaccaacatggagcattagattacaaacgtttatttggtgccattggtaaaaacttaacaggtggatttggttcgcaaggtgcgtctacacttacacaacaagttgtaaaagactcattcttgacacaacaaaaatctatcggtcgtaaagcacaagaagcttatctttcttatagattagaacaagagtacagcaaagatgaaatattccaagtttacatgaataagatttattattcggatggcgttactggaattaaggccgccgctaaatattacttcaacaaagatatgaaggatttaaatttagctgaagaagcttatctagctggtttacctcaagttcctaacctttacaacatttacaacaatcctaaggaagctaataatcgtaaagatactgtgctttatcttatgcataaacataaccgtattaatgataaacaatatgcggatgcgaagaagattgatcttaaagctaacttagttgaacgtactaaaaaagaacgtcaagtcactggaaatgaaaaaaatcctgagtatgattcttacgttaatttcgttcaatctgaattaatgaataacaagtactttaaggataaaaatttaggttcagttcttcaaagtggtataaaaatttatactaatatggataaagatgttcaacaaacgttacaagatcgaattaacaatggttctttctacaagaatgaagaccaacaagttggtgcaacaattctagatagtaaaactggtggattagttgcgatctcaggtggacgtaattataaaaatgttgttgaaagaaaccaagctactgaccctcaccctactggttcatcattaaaacctttcttagcttatggacctgcaatagaaaatatgaagtggtcaacaaatcatgcgattcaagacgaatcatcatattgggtagatggttctcaattcaagaactatgatacgaaaggccatggaacagtttctatctatgatgcattgcgtcaaagtttcaatattccagctttaaaaacttggcaacaagttaaaagtcaagctggtaatgatgcacctcagaaatttgcatctaaattaggattggattatagtggcaaaattggaccttctgaagtattaggtggatcttcatcagaattctcacctactcaactagcttccgcttttgcagcaatagcaaatggtggtacttataataacgcgcattcaatacaaaaagttgttactcatgaaggagatacaattgagtatgaacatacgagtcacaaagctatgaaagactatacatcatatatgttagctgaaattcttaaaggtacatttaaagcatatggttcggcttatggacatggtgtgtcaggcgtaaacatgggtgcgaaaactggtactggtacgtatggacaagaaatatacgaaaagtataatttacctgataatgctgccaaagatgtttggattaatggtttcagtccagaatatactatgtcggtatggatgggcttcaataaggttaaacaatatggaacaaattcatttatcggtcattcagaacaagattatccacaatacttgtatgaagatgtgatgtctagtatctcatctaaagatggtgaagatttcaaaaagcctaatgatgtacaaggaagttcaccggacagtctatctgtatcaggtcattctgataataatactactaaccgtagtgttcatggaagtagcgatacatcttcttcatcaaatggtggctctaactcagcatcaagtggaaacaactcgaatagttcgaatggtaccagtcaaggtaactcaggcaatgcatttacacgtctgttcaatttaaactctatattcgatctttagagcacagtggcgatgatatcagatctgccggtctccctatagtgagtcgtattaatttcgataagccaggttaacctgcattaatgaatcggctgcagtacccgggaatttaacccgcctaatgagcgggcttttttttgtgatccaaaggatcttcttgagatcctttttttctgcgcgtaatctgctgcttgcaaacaaaaaaaccaccgctaccagcggtggtttgtttgccggatcaagagctaccaactctttttccgaaggtaactggcttcagcagagcgcagataccaaatactgttcttctagtgtagccgtagttaggccaccacttcaagaactctgtagcaccgcctacatacctcgctctgctaatcctgttaccagtggctgctgccagtggcgataagtcgtgtcttaccgggttggactcaagacgatagttaccg

SEQ ID NO: 4343 - DNA, 2550 bp, Artificial Sequence
  Description of Artificial Sequence: synthetic nucleic acid sequence
aataccagcatttataggtgcaggattaatcggtgggattgcagcaatacttagtaacttgcttacagcaggttccatttcaggtcaatggattcaacaaattgttactgtcttaaatgttattaaagatggtatgttattttacttagctattttcactggtattaactcagcgaaagtattcggtgctacaccaggtttaggtggagtaatcggtggtactacattactaaccggtatcacggatgaaaatccaattaaaaatattttcactggagaacatctagctgctggacaaggtggtattattggtgttattttcgcagtttggttattaagcatggttgagaaacgactacataaaataatacctaactctattgatatcatcgtaacgcccacaataaccttactacttattggtttgttaactatatttataatcatgccactagctggctttgtctccgatggtcttgtttatgtaattaactggattattggagtaggaggcattttcagtggattcattataggagcattctttttacctttagtcatgctaggattacatcatatcttcaccccaatccatatcgaattaatcaatcaaactggctccacttacttgttacctattgccgctatggctggtgctggacaagtcggtgcggcgattgcattgtgggtgagatgcggtaaaaataaagaattacgtaatacgctcaaaggtgcccttcctgtagggttcttaggtataggtgaacctttaatttatggtgtaacacttccattaggtcgccctttcttcactgcgtgtataggtggcggtgttggtggtgctgtcattggtggtatcggtcatattggggcgacagctgtaggaccaagtggtatttcattattaccattgattgctaataatatgtatctcggttacatcgtaggtttactagctgcttatgcgggtggctttatctttacttatttcttcggcacaactaaagaaatgagaaatcctgaataaatgggtgatttaattgccaaacattttgtataagattgacaaccagtatccctatttcactaaaaacgagaaaaaaattgcgcaatttattctcaactatcctcataaagttgttaatatgacttctcaagaaattgcaaatcaattagaaactagttctacttctatcatacgtctaagtaaaaaggtaacacccggtggctttaatgaacttaaaacacgtttgtctaaatttttacctaaagaagtcacacaatataatgttgagttagttgataacgaaagtacaatttcacttaaaaacaaattgcattctcgctctaaggcagcgttaagtaatgctaatgaaaccattaacgctgctatcatcgatgaaatttgtgatctaattaaaaattctgaaaccatatttatttacggctatggtgcctcatttgttgtagcaacagatttatatcaaaaattatctcgcatcggtctaaatattcaactagtgcatgaaactcatattttcaccactatgttagcaacacgtaactctaatgattgtgttatatttatatctaacaatggtactcaaagtgaaatgcaatctattgctaaagtcattgcagactatcacattcccattgcgactatttcaagcacttctgataatccagttgcaaagcaatctaatattgttttaacctatggacaaaccgatgaaaatgagatgcgtatgggagccacaacttcgttatttgcacaaatgtttactattgatatattgtactatcgatatattgcgctaaattatcaatcatctttagattttattactcaatcaaaaattgcattagataattaccgtaaacatctctcgaatatagattttaaacattaaaataataaaaagcgattctttatacttatcctagaaaagataatgtatgaaagaatcgctttaatttatactaactcttaaaaattactgattttaacaatcaatcttcatttcatcttttattatatttgtcgttcctttttgtgatatctaataagataataaagtgtcacagctgttaaaaacacgataccaataacaaccgatactacagtttctttgttaagtaacataccgactaatactaggagtaaaaacatgatagttaaataattggcaattgcccctcccggcattttaaaaggatgattgtgaaccttttcaggatgtaaccttctaaatcttagatgactaaataaaatcataaaccaaggtatcattcccggtaaaatagaggcactatatacatatacaaagatactatcagctccatcaataattaatggaagtataacatttaataaagcaccaattaatattcccatagatactgcaaatacagtgtagaaaggtacgccatttttcattactttagtaaatactttaggcatttgtcctttttttgccaaagtataaatcattcgacttgcactaaaaatacctgaattacaaccagacaatgctgctgttaagacta

SEQ ID NO: 4344 - DNA, 2066 bp, Artificial Sequence
  Description of Artificial Sequence: synthetic nucleic acid sequence
aacaaataatgctactgaaaaaaacttagctcttgttggtcatattgatccaggaaattatttcatcactgttaagtttggtgataaagtagaacaatttgaaattagatcaaaaccaactccaccaagaatcattacaactgctaatgaattacgtggaaatcctaaccacaagcctgaaataagagtaacagatataccaaatgatactactgctaaaatcaaacttgtgatgggcggaaccgatggtgatcatgatccagaaataaatccatatactgtccctgaaaactacacagtagttgcagaagcataccatgataatgatccaagtaaaaatggggtcttaacattccgttcatcagactaccttaaagatctaccattaagcggtgaattaaaggcaattgtttattacaatcaatatgtacaatcaaactttagtaatagcgttccgtttagtagcgatacaacaccacctacaattaatgaaccagcaggactagttcataagtattacaggggagatcatgtagaaattactcttccagtcactgataatactggcggttcaggtttaagagatgtaaacgtcaatttacctcaaggttggacaaaaacctttacaatcaatcctaataataatactgagggtacgcttaagttaattggtaatatacctagtaatgaagcatataatacgacatatcatttcaatattactgcaaccgataattctggaaatacaacaaatccagctaaaacctttattttaaatgttggtaagttggctgatgatttaaatccagtcggattatctagagatcaactacaattagtgacagacccttcttcattatctaattccgaacgagaagaggtaaaaagaaaaataagtgaagcaaatgctaatataagatcatatttattacaaaataacccaatactcgctggagtaaacggcgatgttacattttattatagagatggttctgtagatgttattgatgctgaaaatgtaatcacatatgagcccgaaagaaaatccattttcagtgaaaatggtaatacaaataaaaaagaagcagtaatcactattgctagaggacaaaactataccattggtccaaacttaagaaaatatttctcattaagtaatggttcggatttacctaatagagatttcacctctatatcagctattggatctttaccttcatcgagtgaaattagtcgactcaatgttggaaattataactatagagttaatgctaaaaatgcttatcataagactcaacaagaacttaatttaaaacttaaaatagtagaggttaatgcacctactggtaataatcgtgtatatagagttagtacttataatttaactaatgatgaaatcaataaaatcaaacaagcatttaaagcagctaattctggacttaatttaaacgataacgatatcactgtttcgaataactttgaccatagaaatgttagtagtgtgacagtaactatacgtaagggcgatttgataaaagagttttcatcaaatctcaataatatgaatttcttacgttgggttaatataagggatgattataccatttcgtggacttctagtaagattcaaggtagaaatacagatggtggattagaatggtcaccagatcataaatcacttatttataaatatgatgcaacattaggtagacaaataaatactaatgacgtgttaactttacttcaagcaacagctaaaaactcaaatttacgttcaaatatcaatagtaatgaaaaacagttagcagaacgagggtctaatgggtattctaaatctataattagagatgatggcgagaaatcttatttacttaactcaaatcctattcaagtattagacttagtagaaccagataatggttacggtggacgtcaagtcagtcattctaacgttatatataatgaaaaaaattcttctatcgtaaatggtcaagttccagaagctaatggggcatccgcttttaatattgataaagttgttaaagctaatgcggcaaataatggta

SEQ ID NO: 4345 - DNA, 3151 bp, Artificial Sequence
  Description of Artificial Sequence: synthetic nucleic acid sequence
aataccaatatccacatcatcattagatgttaagttctcaacaattttaccaccaccctcaatcacttcatatgtcacattaggatagagtctgtgaaactgattcaatgcatttgtaaacatttgaacattcatcattggtgataagcctattttaatatgacctttttgaacgttcacaatgtcattcatttctaaagataatttctcgaataaagctaaaaattctaaactattatcataaaatgtttgacctatatctgttagttttatttgtttttgtgaccggtcaaacaatgtaatatcgtattcattttcaatatttttaatcgctttgctaatcgttgactgtgcaatgtataagtgttcagatgcttgcgtcataccaccttgtcgtacaacttctacgaaatatttaatttgtttaatttccatttacattcatccttaattatcaacatttgattgatggatatcttctctcatagaaccatcgtttgatatctagcatttttttaacataacttcttcaattaatcatttacactaacactcattgaacaataattccgtgtatataattgttttaattgactaataccgattatttttcatcattatcatgatgctctcttttacgataacatgttttacaaatataattactttactaatttataaatcatgtgaagaaatacatgacaaataccataaatgaaaattcctgtgatattaacattcaatttatatcctttttagcctattgaaattttactatattaacttaatcactgaggaaaataatttttgttaatttttcagaatttttagacaaaatatttatcttctgtgctattatattaattatcagaatcagccaattcattttatctacatgtagatgattttttaatacgtattgttaaggaatgtttgctgactcatgttaatagtaagttgatgttatggaggtttgttatgggaagtttttttaatcggatgactcgaaaagagaatcctactatttatcaaagtaaagatgggcatcttaaacgcacattacgtgtacgcgactttcttgcactaggtgttggtacaattgtttctacatctatcttcactttaccaggtgttgtcgcggctgagcatgccggacctgctgtttcattgtcattcttattagctgctattgtggcaggtcttgtagcctttacttatgcagaaatggcatctacaatgccttttgctggttcagcttattcatggaatattcattcgatacctggtattggtaaactaagcacagctatgattattggggagattggtgatattaagcgatttaaatcaaataaacaactcaatgcttttgttggcattgatatcaaacgatatcaatcaggtcatacacactgtagagataccatcaacaagcgtggtaataaaaaagcgagaaaacttttattttgggtgattatgaatataataagagggcagcatcattatgacaatcatgtcgtcgattattactacaaactaagaaagcagcctaatgagaaacctcataagactgccatcattgcttgtataaatcgattattaaaaacaattcattatcttgtaatgaatcataaattgtacgattatcaaatgtcaccacattagccaaacgtacaatcaaatatagtttaacaccttattcaaaaaaattaaaatgaacggtttagttaagtaatgcttattttaattataagtacttgactaatcgtaggaaagaggctgggacaaaaagttccaagataagtatttaaagacaatttctattgaaataatatagaaattgtcttttttatagttttttgattattttcagttcgttgagctgttacttttcttatattaagccacgatgatgtctgaattcatcgaattcagtatcgggaattgtttctgcaatatcatttacatgtcgtgaaatatcattcgcggggataagaactgaagtttccattagtagagtatgttgagtcatgttatagtctttatacataaggcacctcgttaatttagtttattgctatttattaaattgtacgaaagggctttatttttttaaagtattttaatgtaaaattacatatgaatacaaagtattttggcgagactcttgagggaacaggacaagctgaagactacaggctgaagctgtcccctaagaaagcgagccaacaatacgaagtattgtaaataaagaagccagtaaatgaatttctgaaaactcatttactggctattttgctaggaattatatcccaacctcattttactattgatttacttaccgttaaattcaagagggttaggtccaattcttttatcttgatttaattgatcgattctttccatttggttgtcgcttaattcaaaattccatacgtctaaattttcttctatgcgatgtggtgttacggatttaggtataacaacaacatcgtgctgaatattccatcttattacaacttgggctggagtttttcctacttcattagctacttcatttatgacttcatcatggagaatttgtgaattcattaatggagaccatgattccatgataatattttgagcttctaaatactttcgtaattcattttgtgttaaataaggatgaaattctacttggttaatgaccggtttaatagaaacttgggcaagcaatgcttcaaaatgttctggagtaaaattgctcacaccaatatttttcacctgattttgtttatacaagtcttccatacctctccaagtatcaatcattaccgcttcatttgtacctggccaatgcatcagatataaatctaaataatccagtcctaattttgcaacagattgtcgataggcatcttccacattttgacgtccaaaatcagttagccataatttagaagttataaataaatcttcacgacttaaaccagtcgattctaatccttctttaataccttgacctaccgtttcttcgttaccataaatcattgccgtatctatacttctataaccttgttcgatagcatattttacagattctctacattcatcgccatcttttactctataagttccgagccctattttcggcattgttcttccgtta

SEQ ID NO: 4346 - DNA, 3404 bp, Artificial Sequence
  Description of Artificial Sequence: synthetic nucleic acid sequence
agtggatgaagcacatccaatatgtacctcaatatcaacgtgatactttaaatcagcgtaaaacggtattagctacattattagaaccacttaagaattataaggtaaataaacagcgttatacatcaagcattgaagcagtgcttgatcagtgtaatttaccacacgatatacttaatcataaagtttcgacattaagtggtggccaatttcaacgcgtctggatagctaaagctttaatattagaaccagagattctcatattggatgaagctacaaccaacttagatgtcattaatgaagaagctatacttcaaatgttgatttccttaaagatgacacaattaatcattatttcacatgatacatacgtcttaagccaatttgaaggaattcagttacagctaaataaattgaataattaagatcacaaatcttaatatggtgaatatttaatggtacctaaaaaataaaatttaaactacaatgtctaaatccatatgttgtttcattagaggatttaaaaatgattataacactaaaagatttcaaattattatatttaatataaatttacatatgataaacgaataacaattccaatataaattattttttgattatttttatttataactatatatttatatgaaaaatataagttataataataagtttaatattgcctcgtggttctgagcttgaacttatctctaaatcattttgagctacttatctatcaattcatatattctataacaatatttgtgacatcacgtgctatttcatgaagtgattttacgatatcaccttctttagaaaaaatatatttcagtaggcaccgacgtatacagaatcatttgagtattaaaaataaaaactagaaaaagaaaccgcatcattaactgatacgcagaagcgtatcgtaagtgaggcgggttttatttattaattatgaaagtaaaataaaatttgaattccatcttaaatgtattatatgttcattgtttggtaatatgtagatgtttaagaagttgatttatataatgtttaccaatttatgataaatagaaagatgtgaaaatatgcaacattcaagcaaaataatagtatttgtaagtttcttaattttaacgatttttattggaggatgtggttttataaataaagaagatagcaaagaaacggaaatcaaacaaaactttaataaaatgttagacgtgtatccaactaaaaatctagaagacttttatgataaagagggctatcgtgatgaagagtttgataaagatgacaaaggaacatggattattaggtctgaaatgacaaaacagccaaaaggtaaaattatgacctcaagaggtatggttctctatatcaatcgcaacactagaacagccaaagggtattttttaatagataagataaaagatgatagtaatggtagaccgatagagaatgaaaagaaataccctgtaaaaatgaaccataataagatctttccaacaaagccaatatctgatgataagttaaaaaaagaaattgaaaacttcaaattttttgtgcaatatggaaattttaaaaacttaaaggattataaaaacggggatattttatacaatcctaatgttcctagttattctgcgaaatatcaattgagtaataatgaatataacgtacaacaattaagaaaaagatatgacatcccaactaaaaaagcacctaaactattgttaaaaggggatggcgacttaaaaggatcatccgtaggtcatagagacctagaatttacctttgtagagaataagaaagaaaacatcttttttacggatagtattaattttaaaccgactgagcgtgatgaatcatgaacagtactgaatataaaataaaaccaggtaatataattagaaactatgaataaaccagcgcagtatccaaaatcatttctgaaattgaaaatgcgaataataatagtttgaaaaaatgtcaaaggttattcgatggatggttttatgattacacctggaagtgactaaaaaatcagtactcttaagatgattttttatatagaaattcataaagcatccttcatcaaaaagtgaagggtgctatgtttatttataagtgttatatttagaaatgacttactgctcattatctataaagatttatacattgaaaatattaattgttttaacaataggaggtcatgttgttattatgagtcagtttaaggacacattatataaactatttgagccaatgatgaaaatagagttctatcaaaatcttttggttaatcttttaattatacttgcttatatcttgatgggtatgattgtaattgcgatatcaagaaagttagttactaaatttttcaacgttaatgaaaagaaaaagaaccgtcataaaattaagagaagtgaaacactatccacattgattcaaaatttaataagttatgtcgtatggtttattgtccttacgtcaatactttcacgtttcggtattagtgtatcagcaattttagcaggagctggagttgttggtgttgccgttggtttcggagcacaaacaattgtaaaagacattattactggtttctttatcatatttgaaggacagtttgatgtgagtgattatgttcaaattaatgcatctggggtaacaattgctgaaggtacggttaaaacgattggtttaagatcaacgcgtatacaatcagatactggagaaatttatacattacctaatggtatgattagtgaaatagttaattattctgctacagatgtttcacctattgtgatgataccgatttctccaaatgagaattataaagtgatagaagagaaattattaacatttttacctacattaaagaataaatatgacatatttgtatccgcaccagatttacttggtttagatagtgttgatggcaatgaaatggtgattaaacttttagcacatgttaagcctggaatgcattttccaggacaacgtttacttcgtaaagaggtcatacaatactttagtgaagaaggcattcatattccgaaaccaacacttgtaaaacttgataaagaattgaataaaaaagaatagtctgtagattcattttgtatgtgaaaattcataaagcatccctcatcgcaaagtgaaggatgccactttaatgctcaccttaggacacaatttttatttatatacgaatagctttctcttttttatttaaatgaatcattgtaataagagcaattacaccaaatatagccaagaagaagaaagcgagatgacttgaaccagtgatactcgttacaaaagtaatcaccagtggtgggaagaaaccgcctagtcctcccatcatggatacaataccattcgctgaacctgcttct

SEQ ID NO: 4347 - DNA, 3774 bp, Artificial Sequence
  Description of Artificial Sequence: synthetic nucleic acid sequence
tatcaaatcagaagatgaaattatcaatataaaaaaagcagctgcgttagctgataaatgtattgaaattggtaaatcctttcttaaagaaggtgttgaagaaagagaagttgtcaaccatatcgaaaacgaaataaaaaaatatggtgttaatgaaatgagtttcgacacgatggtactcttcggtgaccatgctgcttcaccacatggaacacccggtgacagaaaattacagcaaaatgagtttgtactatttgatttaggtgttgtataccatcattattgcagtgatatgacacgcacaattcattttggcacacctaataaggaagcacaaaatatatataacattgttttaaaagcagaaacagaagcaattaaatctattaaaccaggagttaccatcaaagatattgataaaattgctagagatatcatcgaagaagcaggttatggtgattacttcccacatagactaggtcatggattaggtcttgaagaacacgaatatcaagatatatcaagtgtaaataataatcaacttgaagcaggcatggtgattactatagagcctggcatatatgtccctcatgtggctggtgttagaattgaagatgatattttagtaactgaaaatggttatgaaatattaactcaatacgaaaaataacaaaacaacaaaaaaccccaagctccattcacatgaatgaagtcttggggtaaatttcacgcattatttcaatgcatcttcaattgaagtgtattcaaaattaaatgtatcagctacattcttattagtcacatgtccattaaatgtattcagacctagagataatggatgatttactttaaatgcttcacgataacctttattagccaataattgcgcataaggtaatgttgcattgttcaatccaattgtagatgtacgtggaacggcacctggcatattagctacagcataatgcacgacaccatgtttagtgtaagtcggattatcatgagtagtaatcttatcagttgtttcaaaaattccaccttgatctatcgcaatatctacaatcactgatccatctttcatttcttttatcatatcttcagtcactaagtttggagctttagcacctggaataaggactgctccaatcactaaatcgctttctttcacatacatttctatatttaatggattagacataattgttcttactctgccatcaaataagtcctctaattcttctaaacgtttaggattaacatctagtattgtcacttcagctcccaatcctaaagctatcttagctgcatttgtacctgcttgaccaccaccaatgatagtgactttgcctttaggtactccaggtatgccacctagtaagatacccatacctccattaaatctttgtaaaaattcagctcccacttgtgtagacattctaccagccacttcactcattggtgttaataacggtaaagaaccgtctggtaattgtacagtttcataggcaatagatataaccttgttgtccacaagtgcctgagttaatttctgttcattcgcaaggtgtaaataagtaaataagattaactcttctttaaagaatttgtattccgattcaagtggttctttaactttgatgaccatatcaacatcccaagcttttgactgcttatcaacaattttggcaccggcttcttgataatcaccatcttcaaagtaagatcctagaccagcatttgtttctactaaaacttcatgtccttggtctacaagtgcatgtacaccacttggggataaccccactcgattctcattattctttatttctttaggaatcccaattttcatattatctacctccaaccttatcgtaacgtgtccttattaaaacggcaaacaataacatataatgacataattttgtaattattattaattaaatattctgtttattatgttaaaatagaattaagaaagataaagggggcaataatgatgatttcttataaaaacatattaatcgcagtcgatggatctcacgaagcagaatgggcttttaacaaagctgtcggtgttgctaaacgtaacgatgctcaattaactattgtgaatgtaattgactcacgtacgtattcttcttatgaagtatacgatgctcaattcacagaaaaatcaaagcatttctccgaagaattacttaaaggttataaagaagtagccacaaatgcaggtgtaaaaaatgtggacacacgtttagaattcggctcacctaaagcaattatacctaaaaaattagcgcgtgatgttggtgctgatttgattatgagtggtacatcaggtttaaatgcggtagaacgttttattgttggctctgtatcagaagcgattgttcgacatgcaccttgtgacgtattagttgtgcgtacagaagaaatgcctgaagatttccaacctcaagtagcaacacctcaattacgtgaaaaatatcaagattagtcactgttatagatgaaattaaaatgaggctgggacataattcctagcaaaatagccagtaaatgagttttcataaattcatttactggcttctttatttacaatacttcgttttgttggctcgctttcttaggggacagcttcagcctgtagtcttcagcttgtcctgttccctcaagagtctcgccaaaatactttgagtttatatgtaattttacattaaaatactttgaaaaataaggacctttcacataatttaataaataccaataataaaaccaatcaaaaaaaccaccaaaaaaattacgacacatatatgtttgataatttcataattgtcattttgaaagaccacgttgatcgtaccgtgttctttccccactggtatggttttatcgaatatagattctatttcgtcaggcgttgcactggtggtaatatcaacatcatgtataggtcgttgcatgatgtaatcacgtactgatccgccaacgaaataagccttaaaacctttattttgaatcttttttaaaataggttttgcttgttcaaatatctcatgactcattgttgttctcaccttgttctagcatctttcgataatagttttcatattggtcagtaattaaatctgaactaaatcttgcttcaatatctttcagcatttgtgattgcattttttgatataactctggatttgataaaagtttaatagcatattttgcagcttgtgtacctatcaaaacacgctacaactcacagaaaaatcttctagtctctcatgtttttactgttatcattactcatacttttatgatgatttagtgatcaccacaatccttttatcatgtaactaacctagtaaatttaagtttcaacttttacttatagtgtttgactttaattataaatcaaaattcgtcataataagacgtgctaaatttacaatagctaaaacatgatagaggtgacttttatgtctacgaataatgagattgaatttaaacaaatactagatcaagatacttactcaaaaatctatgaacactatttcaaaaatcaatcaccttttaagcaaactaatttctatatcgacacagagaattttaaattaaaacagcatcatgctgctttgcgtataagggtaaaagattatatgtttgaaatgactttaaaagtccctgctgaagttggattgacagaatataatcactcagtaaatatagaacctgaacttgatatgtcacttcaactttctcaattacccaacgatatta

SEQ ID NO: 4348 - DNA, 2803 bp, Artificial Sequence
  Description of Artificial Sequence: synthetic nucleic acid sequence
ggattcatacagcggccagccatccgtcatccatatcaccacgtcaaagggtgacagcaggctcataagacgccccagcgtcgccatagtgcgttcaccgaatacgtgcgcaacaaccgtcttccggagactgtcatacgcgtaaaacagccagcgctggcgcgatttagccccgacatagccccactgttcgtccatttccgcgcagacgatgacgtcactgcccggctgtatgcgcgaggttaccgactgcggcctgagttttttaagtgacgtaaaatcgtgttgaggccaacgcccataatgcgggctgttgcccggcatccaacgccattcatggccatatcaatgattttctggtgcgtaccgggttgagaagcggtgtaagtgaactgcagttgccatgttttacggcagtgagagcagagatagcgctgatgtccggcggtgcttttgccgttacgcaccaccccgtcagtagctgaacaggagggacagctgatagaaacagaagccactggagcacctcaaaaacaccatcatacactaaatcagtaagttggcagcatcaccaaattgtaagagaagtagttagtaaagaaaaagcaaaagacttcttcaaggatgacccttataaattagaacttattgatgcaattcctgaagatgagagtgtaacactttatactcaaggtgaatttactgatttatgtcgaggtgtacacgtaccttctacttctaaaattaaagagttcaaactattatctacagctggtgcttattggcgtggaaatagtgataataaaatgttacaacgaatttatggtacagcattctttgacaaaaaagatttgaaagcacatctaaaaatgttggaagaacgtcgtgagcgtgatcatcgtaaaattggtaaagatttagaattgtttacaaacaatcaactcgttggtgctggtttaccattatggttaccaaatggtgctacaatacgtagggaaatagaacgttatattgtcgataaagaagtaagtatgggatacgatcatgtttacacaccagtattagccaatgttgatttatataaaacatctggtcactgggatcattatcaagaagatatgttcccagcaatgaagttagatgaagacgaagcaatggtcttaagaccaatgaactgtccacatcatatgatgatttataaaaacaaacctcattcttatcgcgaattacctatacgtattgctgaattgggtactatgcatcgttacgaagcaagtggtgcagtatcaggtttacaacgtgttcgaggaatgacattgaatgattcccatattttcgttagacctgatcaaattaaagaagaatttaaacgtgtagttaatatgattcaagatgtgtacaaagattttggttttgaagattatcgcttcagattgagttatagagatcctgaagataagcataagtactttgatgatgatgaaatgtgggaaaaagctgaatccatgcttaaagaagcatcagatgaattaggtttaacttatgaagaagctattggtgaggcagcattctatggacctaagttagatgttcaagtaaaaacagctatgggaaaagaagaaactctatcaacagcacaacttgattttcttttaccagaacgttttgacttaacgtacattggtcaagatggagaacaacatcgtcctgtagttatacaccgtggtgtagtttctactatggaacgttttgttgcatttttaacagaagaaacaaaaggtgcatttccaacttggttggcgcctatgcaagttgaaattattcctgtaaatatagatttacattatgattatgcaagacttttacaagatgaactaaaatcgcaaggtgtccgcgttgaaattgatgaccgtaatgaaaaaatgggatataaaattcgtgaagctcaaatgaaaaaaataccttatcagattgttgtaggtgaccaagaagtagagaatcaagaagtaaatgtaagaaaatatggttctgaaaaacaagaatcagttgaaaaagatgaatttatttggaatgttattgatgaaatccgtttgaaaaagcatagataaacttgaaaatataaagtatatcatgtatattacaaattaatataataaatagagttagaggttgcattattaatgactaacttatcagaagtcgtatgggacatgtgttgaataagtgaaaggtaataatgccgaaatgatgttatttccataaattagcattgttgggacaactttcgaatagaagttgtactgtcactttatgtgatgtgctaccttatatagataaacattagtggttgcatatcttaaaggtatgtaaccactttttacattattgatacagatataaagacaagtgatataaaagtaaaatgatattaatattattttacttttatatcatctataccaaatttatctacaacaatgatatgcattgatgtggtaacaagttagcctctacttatgaaggaaagggagcttctatgaaaaagaataataaacaaaatgacggtgttcaaagaggattaaaagatagacatatttcaatgattgccattgggggatgtataggaactggtctattcatgacttctggtggagctatacatgacgcaggtgcattgggtgctttgattgcctatgcagttattggagcgatggtgttctttctaatgacgtcgttaggggagatggcgacatatttgcctgtgtcaggttcatttagtacttatgctacacgctttgtcgat

SEQ ID NO: 4349 - DNA, 962 bp, Artificial Sequence
  Description of Artificial Sequence: synthetic nucleic acid sequence
ttgctttaggatggaattattggttcaactgggtgataacagtagcagctgatgttactattgcagcgcaagttatacaatattggtcccctatgcaaggtataccagcttgggtctggagttgtattttccttattattattttcgcgcttaattctttatccgttagagtatatggagagagtgaatattggttcgcacttatcaaagtagttacagtcatcatatttataggaattggtatcttaactattttagggattatgggtggagaatttgtaggatttgatacgtttacaaaaggagatgggccaatactaggtgggaatttaggaggtagcttgctatcaattcttggtgtatttctagtcgcaggcttctcattccaaggaactgaacttattggtattacagcaggtgaatctgaaaatccagaaagagcagttccaaaagcgattaaacaagtattttggcgtatacttttattttacattctagctattttcattattggtatgttgattccatatgatagtaaggcattaatgggcggtggtgatagtatagctacttcaccttttacattagtatttaagaatgctggattagcttttgctgcttcatttatgaatgctgttatattaacaagtgtattatcagcaggtaactcaggaatgtatgcttcaacaagaatgttatattcgatgagtaaagataaattagcttataattcttttggaaaaacaaataaaagtggcgtaccttatgtatctctaattgcaactggagtactagtcattcttattttcgcattgcaacatttaagtggagatgcatatgaatacattgtagctgctagcggaatgactggttttattgcttgggttggtatagcaatcagtcactttagatttagacgcgcatttgataaacaaaattatgataaatcaaaattaaaatat

SEQ ID NO: 4350 - DNA, 2433 bp, Artificial Sequence
  Description of Artificial Sequence: synthetic nucleic acid sequence
cacttgtattgttctcaaataattttcaaatgtaccttgctccaattgctcttcaaattcatcacgagatttcgcatacgtacctatagtaatctttgcaccttcatcagcttcaatgatgtaccaacattcagattttccatattgaccttcttcgtgttcatatgcataagaatcgtcgggatgtacatgaatagacaatggcgcagcagcatctacaattttagccattaatggaaaatctttacttggaaaatctccaaatatttctctatgattgttccatacttgatccaatgtttgaccagcaaatataccattttcaatcacactttttccgtgtggatgtgctgaaattccccaacattcacctatgtgattattaggtagttgatacccaaattgacgaagattatcactgccccatactttatccagaaaaatgggttttaaaaataacggcatgttcacacctccattattaaaagcttaaacttaaatcattatctatgcttgaatatcacacaatgttaaataataaaactacttttgatacaacatagcccttcttttaagatatgtatttgaagctaactatctttctcactcgtattgagtgtagcatatatgattatttcacaaactactatatgaatatactatcattttataaactttctatcctgtgtccatttgacgtaggattcttacatattatatcaactgcctaataaattgaatagcatcatttttactaatctaataaagcgttttattgattactataccattattttctgaaaatgaccctttaaaataacaatgctttaaattggattcaatagaatcaagcattacacttttttcaagttcatttaaaagtagaaaatttagtataattatactcattaaaatatttaactttgaatataaaaagggaacaagataagacttttgatttccttatcttgccccctcaaatactgattagaaattgaagtatttaaaaacaaattacaacaattctaacgataataggaacgaactttgtatcaagttgtattataaaagacaaataatttttaatacgtacttaattttaaattttaagattcatagtttttcaatgcatctttaacaccatgattgccacttaaaatttggaattcttgattattaaaaccatcagaagttactacttcttttaaaactgtagcaacatcttcacgtggaattgatcctgctttgtcgaaatataaatcagcttctatttttccagttccagcatcatctgtaagtgaacctggatgtacaattgtataattaagatctgatgttcttaagtaatcatcagcataatgctttgcaattgtatacggttttaaatctccactcgcatcgaatgcttcacgtctagaatcgtatgttgataccataacataatgtttgatacccgcttctttactagctttaattgtttttacagcaccatctaaatcaacaatgattgttttatccgctccagtgcttccaccagatccaactgaaaagataactttatcataatctgtaaagatattttttaaatcattaatactatttttttctacatctattaatatagctttaatccctttattttctaattctttaacttgatcttccttacgtacaccagctgtaaaatcaacgtgttcttcatttaattgacttactagtttagaacctacgcctccatttgctccaataactaaaatactcatttcaaacgtcctccttcaaaaaatcgtacttagtatttaccacttcaagagaatattaaacgttagtttattattgacatatttcaatcttctcattatattaatatatgaacaaatattcatatgttggagtgtgaattttcaatgagtggatatcatattaacgttgaaagcaatcaggatacattgattaaagtcactcatattttcaaagctttaagtgattttaatcgtgtgagaataatggagtttcttgaaaacggtgaagcaagtgttggacatatttcacattctttaaatatgactcaatcaaatgtatcacatcaattgaaactacttaaaagcactcatcttgttaaatctaaaagacaagggcaatcaatgatttattctatagatgatatacacgtttcaactttacttaaacaagccattcaccacgccaaacatcctagtgaaggtggaatttctaatgacaaatcataatcatcaacatcatcattctcatgcacacggacacgttcatacagataataaaaaggtactcatgttttctttcattatcattagtctcttcatgcttgtagaaattataggtgggtttttagcaaatagtctagcattattgtctgatggttttcacatgctaagtgacgctatatccttagga

SEQ ID NO: 4351 - DNA, 3001 bp, Artificial Sequence
  Description of Artificial Sequence: synthetic nucleic acid sequence
attacgtgcagctttcccttcaggcgggattcatacagcggccagccatccgtcatccatatcaccacgtcaaagggtgacagcaggctcataagacgccccagcgtcgccatagtgcgttcaccgaatacgtgcgcaacaaccgtcttccggagactgtcatacgcgtaaaacagccagcgctggcgcgatttagccccgacatagccccactgttcgtccatttccgcgcagacgatgacgtcactgcccggctgtatgcgcgaggttaccgactgcggcctgagttttttaagtgacgtaaaatcgtgttgaggccaacgcccataatgcgggctgttgcccggcatccaacgccattcatggccatatcaatgattttctggtgcgtaccgggttgagaagcggtgtaagtgaactgcagttgccatgttttacggcagtgagagcagagatagcgctgatgtccggcggtgcttttgccgttacgcaccaccccgtcagtagctgaacaggagggacagctgatagaaacagaagccactggagcacctcaaaaacaccatcatacactaaatcagtaagttggcagcatcacctagagttactacgtattttatataattatgatcgtttatctcaatacgatttaactatgaagattagtagggaacaatcaattgtatcaagatggattaaaaagttagtccaaaaaggttatatcatgagtcaacaatctcatgaagatttacgatgtaaagaactgatattaactgaagaagcaagggctttaattcagcaaatcaacacggcgagatgcgagttaattgaagcgagatgtcaatgtctatcttcagacgaaattgcaagtttaaatcaattattaaacaaacttaatagtagacacattttcatctgatatatatcggtttttaattatgatgttaagtgtaaaatacattcaattatatataaacatataaagctaagcaactgaattgtaatattaaattacatataagtgtgcttagcttttttatatttgaaaaagtttaatatttagcatatgtcatattcgaagcagtgacaggataaataatcatcaaaaaagtaggcagctctactttcatgaactatgagagctgccttacttcatatttatttgtatgttggaatttcgaagtacttaccgacttcaccaattttatcataaaattgttttaatacttgtgcgttgacatttgcccaattaatatcagttgcatattgatgcgtaccagggtttgcaggattccaacgcattttatatagcgtattttgtcctgctttcacgtatgaatttccaatgaatttagcgccaccaataattgctttagagacagaagtccatccagcatttttagcgtatttgataccatctacaagtgcattattgtcaaatgcaccaattccaaagacattatggtatttgtgacctgttttagttgtgaatttaccttttgaaacatctccacctttagcaagttgtgaagttccattacctgtttctactaaagcatgtgagataagataaatttcatttagaccatacttacgtgcagcttggctaaatgcagcgccttggttttcaagtacacctttgccttttaataatttattgagagcttgtgctgacaagtattgtggttgatctaaacgtaagaattgatattttaaggatgaatcattagctaaacgctttgtatccatagcatttttaatttgactataattagcatttgaccatttcaaaggctcattttgtacttgtggtttatatttaagacgagattggatatttatcgcgttatttaaagtcattccagtatatgcatatttaattttttccttaactaagtcagttgattttatccaaacatatttaccgtctaaaagttgaccatagtaccatttaacgccattaatatttttttgcttaatgactgtgaaagtttgttcataatatggttttaaagaatatcggtttgcttttgttggatccatatagaaataacttttactattattgataacaaaagtatagttatatggtgttgattgagcgtcagtactgttttggattaaatccttagcagcaatccatcctgttctgttattgactgtaccgtatagatataaatctttaccaacgtaaacagctttggaagcattaaatgcttgattagctagcgtattaggtgctagtaattgttggtttttagtaccccaagcaatagaatatagaccattatttgtaggttttactgaatatttacctatagactgagtttgttttccgatattttgagttgtcacatcattaatgtttacccatcctaatggagtattacttgttccatcttgaagtagtacatacgtgttattaccttgagtacgttgtttattgataaggaatgtacggttagcgtatttcgtaccacttttggctgttttatcatatacagatgctcttattccagaattattagctttcacttgagcaatttgatttacagtttgtgtagatggttttacttgtttaggtgctggtgttgattgagtagacaaagcttgaacttttgatggtgcagttaaatagtatttactaatccaaccagatttaccgttcactgtaccataaagatatgttgctttatcaatttgttgttgtttagttgctttaaaagtttgatcgcctttacctgaaactgttccagccacttgattatatgtgccccaaggtactgtgtgtaatttaacaccaggtttgacgttgtatgtttgattgatttttacaggtgatttagctgtgttgtaaatgacctcatcttgttttacccaaccataatttgtaccagtattataatcaccaacaagatagaattttttatcaccaagtgtggcagctttcgtcactgacaatgtacgttggatttgatttgttgtctttcctttagtgtca

SEQ ID NO: 4352 - DNA, 3069 bp, Artificial Sequence
  Description of Artificial Sequence: synthetic nucleic acid sequence
gtagccaaagaatgcaaataacatttgcaatataaccatgataaaagctagaccgtgtttctttttaaatatagtcagtaatccagctattataaaaaatataaagctgattgcaaacatccaccaataattaaaaatagcagttctaaagtgatcagaattttgaattctaagagataagaaaacaaataatgaaatcacaatcataggtggcccccaaaaaatatgccattgtcgtgtcatatcataagcaggttgatcatttgctttatgagcataatatgttaaaaaacctgatgaaatataaagaactgaaacaatggctaagaatactacagaccatgcaaatggacttaataataattgtatccagtctaaatcaatatgtgtgccatgctcatagatataaccaccttctgaaattgttagagcagttgctagagaagctggaattaacagccctgttaaaccatataatacaatccagggcagtttagtatcttgaccataattttcaaaagcataaaaactacttcgtatagaaataagaattaaagctattgatccgggtactaataaaactgttcctaagtatttagcagaatcaggaaaaaaacctataaatcctacaaaaaagaaaacgaaaaagacatttgtaacttcccaaactggattgaggtatctatggattaaatgattaacctttttctcattacctgtcattttagaatgcaatgcgaaaaatcctgcaccaaaatcaatggaggcgataataatataacaaaataaaaatacccataatactgttataccgatataagcgtaaatcattttgtttcacctctctctttaatcactttttctacatctttataagcaggttgatttttaaacattctaattagtacataagccgaagtaactagtaataaaagatatagtaaaccgaatagcgtcgttactaatgtgattccccccgcctgggtagcagcttctgatacgcgcatatatcctcgtataatccacggttgacgacccatttcagttaagaaccaaccaaattctatcgctaacattgatgcaggaccagttaacaagatagcgtataacatcatattactagttacatatttacgtaactttttaacaattaaaaataacatatatagtcctgaaatgataaaacagaatattcccattgataccatcaaatcgaaaaagtaatgcactatcataggaggtaattcatttttaggaaattcatttaaacctttaacttttgtattaaagctattatctgctaaaaaactaagtaatccgggaatctctagtgctcctgaaacttcatgtgttttttcatttaatacaccgaaaagaactaaattcgcatgagattgcgtatcataatgccattcatatgctgcaagcttatctggttgaactttgtgtaaaaatttagcagataaatctcctgcaatcatcgaaagaacggtattgatgaatccaacaatcatgcttaaattaagagcttttgtatggtatgttctatcttctgtatgattatgacgtaataatttaaacgctgcgatggctgctaatataaacgccatcgtcatacctgcagttgcaactacatgtaaagcacgaaccataaacgatgaattaaacattgcttctaatggctgaacatttaccatacgaccatttttaatttcaaaaccagctggggtattcataaatgaattgactgatgtaataaagaatgctgagaatgaacctcctataataacgggtatagatatgaaaaaatgtgtccatttatttttaaatctttcccaagtgtataaataaatacttaaaaagattgcttcaaaaaagaatgcaaaagtttccatgaatagtggtaatgcgataacatgaccgcccattttcataaatgttggccagacaagtgaaagttgtaaaccaataatagtacctgtaacgactccaacagcaacggttatcgtgtagcctttcgaccatcttttagccaatgtgatataattcgcatcatttttctttatgccaataaactctgctattgcaaacataagtggcataccaacaccaattgttgcaaatatgatatgcactgcaagtgtcatacccgtcaacaatcgagctatttctactgaatccatctattaatcacccttcattttttttagttattggagtgacaagtgattagaattataagtccttagtactattgaactaaattaaattgctttaaatcactgtgacgattttatgtcttttcacacaacgttcacaaagttgaaatgacgtctcattttttatatagtgtggtaagataaatcatgagaggatgtaatgtatgactgatacagtgattatttatacacaagatgactgtccaccttgtgcttttattaaaaattatttagtaaataaaaatataaaatttacagaaaaaaatatcaaaaaccaaaaatataaaaatgaaatgatggattacgatgcttttgctacaccttttattttgcttaaagggatgccaatgtatcaagtagatatggaaaaattgaatgatgaattgaatattacaccttaatttctatttattattttatgcgtgtctaatttcaaattttcagactagctaaacaaaatcctcgtcttttaaaaatttattaaataaatataatatattaacaaaaaataaaaatattccagaacatattttgtagaaaaatagcaattcaacaaacgaatataatttaaacaattataaaaagacaatttctatattatttcaatagaaattgtctttttctagtctaagaactttatgtcctagactcttaaattattctttttaaagtcaattatttagctaattggttaactaaatcaacgacttcctcttgcgttgagcattcaacagctctattagcgagttcagccatttcatttttacttaaaccattgatttgtcttctagcttttaggatagaagtcgcactcattgagaactcatctaaacctaaacctaataataaa

SEQ ID NO: 4353 - DNA, 3270 bp, Artificial Sequence
  Description of Artificial Sequence: synthetic nucleic acid sequence
tgaatttgatccaaatgcacctgtagatagtaaaactgaagttccaggtaaaccaggagttaaaaatcctgatacaggtgaagttgttaccccaccagtggatgatgtgacaaaatatggtccgaaagttggtaatccaatcacatcaacggaagagattccatttgataagaaacgtgtatttaatcctgatttaaaaccaggtgaagagcgcgttaaacaaaaaggtgaaccaggaacaaaaacaattacaacaccaatattagttaatcctattacaggagaaaaagttggcgaaggtaaatcaacagaaaaagtcactaaacaacctgttgacgaaattgttgagtatggtccaacaaaagcagaaccaggtaaaccagcggaaccaggtaaaccagcggaaccaggtaaaccagcggaaccaggtacgccagcagaaccaggtaaaccagcggaaccaggtacgccagcagaaccaggtaaaccagcagaaccaggtaaaccagcggaaccaggtaaaccagcggaaccaggtacgccagcagaaccaggtaaaccagcggaaccaggtaaaccagcagaaccaggtaaaccagcggaaccaggtaaaccagcggaaccaggtaaaccagcggaaccaggtaaaccagcggaaccaggtacgccagcagaaccaggtaaaccagtggaaccaggtacgccagcacaatcaggtgcaccagaacaaccaaatagatcaatgcattcaacagataataaaaatcaattacctgatacaggtgaaaatcgtcaagctaatgagggaactttagtcggatctctattagcaattgtcggatcattgttcatatttggtcgtcgtaaaaaaggtaatgaaaaataatttcatataaaaactttctgccattaacttattagttaatggcagttttggtatatgattattaagtattgaagttattgtgttaaaacattttgagggttaattgtaaaactcatattattaattgccgctcaattcaaggcaattaaaacatattgtttgaaattaatttgtgaatttagtcgatagagtgttagattattctcaaatgagtgttattctaccattgaatacgaaatgagggagggataacttaatggaacacgtttctaaattaggcgaagcgattgtggatacagtaacagcagcacaagcagaagatggtgctgaattagcaaaaagtatcgttaacatcgtagctaatgcaggtggcatcattcaagatattgctcacgcatttggttattaatattgatacgcatatgaatgattttatttataatcatctgggacatcaatgatagtctcaggtgtatttttttgcaataatcgccattgctagaatgaatcttctaattgtcctcttatacaaattatttctatccttattttgtaacaatgaattcaaaaattatgtttatcttcacatttaaaatatgtagcacgtactatttctcgaaattcttttactttcctcatttaatcacacactttacctacttattgttatcacttgcaaccttcatattctaaatgtaaactttaaaatgtaataagtttacattaaagataggtgacatgataaacatgaatatatttgtaactggaacgaatactgacatcggtaaaacgtatgtcactaaatatctctataaggcattaagaacgaggggatatcgggtatgtattttcaaaccttttcaaactgaagaaattggtggaggtagatacccagatttagaaatttataaaaacgaatgcgatttagactatgacgttacgtctctttacacattcaaagatccagtttcaccacatttagcattcaaaattgaaaggcatcagcaattgaaccatcaaacaatgatagacaaactcgaatcactagaagcacaattcgatatgattctcattgaaggtgcaggtggtattgcagtgcctatctatgaatacagtgaccatttttatatgacaacagatttaattaaagacacatcggatttcattgtgagtgtcttaccttcaaagttaggtgcgattaatgatgccatcgttcaccagaaatatattgatcatcaagaacttcccccgaatgtgttaatcatgaataactatactgatagtgctattgaacaggataatttacataccattgaaaaattaatacacaagtctgtttatacgttgggtcatcaagcgactcaagaaagcttttccgaagcatttatacaacgaattataggaggatccaatggctaatacacgagagttaaatcataaagatgcacagtatgtatggcacccatttacacaaatgggcgtctatactaaaaatgacaatattattattgaaaaaggtcgtggaagttatttatacgatactgaaggtaataaatatttagatggttatgcgtcattatgggtcaatgtgcatgggcatcagcataaaaagttaaataaagctattcataaacaacttgataagattgctcattctatgctattaggttcgtctaatattccatcgattgagctagccgaacagttagtcaaattaacaccagatagattacaaaaagtgttttactctgatacagggagtgcgtcggtagagattgctattaagatggcttatcaatattggaagaatatcgatgctgaacgatatgcgaagaagaataaatttcttacattacatcatggatatcatggagatacaataggttctgttagcgttggtggtatcgatagtttccacaaaatttttaaagaccttatttttgaaaatatacagatagaaacaccgtgtttatataaaagtaagtaccgcaatgaagcggaaatgcttaattcaatactgaatcaaattgaaaatatattatctgagagaaatgatgaaatagtaggatttattctagagccacttatacaaggtgcaacaggtttattcgttcatccgcatggttttttgaaagctgtagaacagttatgtagaaaatatgatgtattactaatttgtgatgaagtagcggttggtttcggacgtacgggagaaatgtttgcttgtaaccatgaagatgtacaaccagatattatgtgtctgggtaaggcgattacaggtggttatttaccgttagcggcaactttaacatctcaaaagatatatgatgcttttttaagtcagagtcacggtaagaatacgtttttccacggtcatacatata

SEQ ID NO: 4354 - DNA, 4187 bp, Artificial Sequence
  Description of Artificial Sequence: synthetic nucleic acid sequence
atgatgttgtttaatgctttttttatttctaataagtttagtatcaataagttttgtaattgctgtgtatcaaatgttagaatttctaaaaaatggaacgcaatattatgctgtttggacgaccgatacattttttgatatggttcactagtgctttttcaggctgcttcaatagtttatgagatataatgctgttttcttatttcagaaaattctaactattgttataatataaagtacttactaattaaattattttaatgaggaggcatagcatggaaatgtcagaaaggctagcttcaattcctgatagctactttggcaaaacaatgggccgtatagttgaacatggtcctttaccacttataaatatggcagttggaattccagatggagaaacgccaaagggtattatcaatcatttttcagaggcgctatgtattccagaaaatcaaaagtatggtccatttcacggcaaagatgcctttaaacaagctattgttaacttctaccaaagacattacgatgttgaattagacaaagaagatgaagtttgtattttatatgggactaaaaatggtcttgttgcattacctacttgtgttgttaatcctggtgaaattgtacttttacctgatccgggatatacagattatttagcgggggtcatgttagctgatgctaagccactccctttaaaattgtcgccaccaaattatttgccgaattggaatactataagtgctaaagttcttgagaagactaagctaatttatttaacatatcccaataatcctaccggttcgacagcgacacaagatgattttgatgaagcgattcatcgttttaaaggtactcaaacaaagatagttcatgactttgcatatagtgcttttggatttgacgccaaaaatccaagcatattagcttctaaaaatgcaaaagatgttgctatcgagatattctctttatctaaaggttataatatgtcaggctttcgtgttgggtttgctgttggtaataaaaaaatgattcaagcgttaaagaagtatcaaactcatacaaatgcaggtatgtttggagcacttcaagatgctgctacgtatgcactcaatcattatgatgagtttttagaaaagcaaaatgaaatatttagacgtagacgtgataattttgaatcacaactaaaacatgcacatttaccgtttgttcactctaagggaggtatttacatttggttacatacacccccgggttatgatagtgaagcattcgaacagttgttattaaaagaaaagtcaattttagttgcacctggtaaaccatttggtgaaaatggtaatcaatatgtgagggtttcattggcgctcgatgataaacaattagaagaagcggcgaatcgcttaacacaattacggtatttgtatgaaagataaaggagttataaaatgactaaaattaaattaatgggtgtcagagaagaagatgaacattatattgaaatgtggtcacaacaacatgaagtggaagtggatatgtcgaaagaacagttaactgaagacaatgtccaatctattgaaggatttgatggactatcattgtctcaaacattaccattatcagaaacaatttataataaattaaatcaacttggaattcggcagatcgctcaacgaagtgctggatttgatggttataatttagagttagcatctaaatatggtcttattatatctaatgtgccttcctattcacctcgaagcattgctgagtttaccgtgactcaagccatcaatattgtacgtcactttaatcatattcaaagaaaaatgagattgcacgattttaggtgggaagcatcaattttatctcaatcaatcaaagatttaaaggtagcggttattggcacgggacatattggtggcattgttgcacaaatattctcagaaggatatctatgtgacgttgtagcgtatgatccttttccaagtgaacatgtgaaaccttacgttacctataaacaaagtataaatgaggcaattaaagaggcagatattgtcacaatacatatgccgtcaacacaatataacaattacctgtttaatgaaaacatgtttcaaatgtttaaaaagggtgctgtgtttgtaaattgtgctagaggatccttagtagataccaaggctttgttatctgcaatagagcaaggtcaaattaaaggtgcagcacttgatacttatgaatatgaaattggagtatatacgacagatagaagtgaagaaggtttgaatgacccacttttagaggaattaattactagagaagatattattgttacaccgcatatagcattttatactgaagaggcaatcaaacatcttatttttgatgctttagatgcaacaatggaagtattaaatactggcacgacggagttaagagtaaattaaaaagcataaagggtaatgagaagcattccctttatgctttttaacgttagcaattatttaacatcataaccttgttcttcaattgcttctttcatattttcaaatgtaacttttgaatcattatactcaacgcgtacatgattttcatctaaatttacttcagcacttgatacgccatttagtttagctagtgccgattctacggcgtttctacaatgttcgcaactcattccttcaacttttatgattttttgtgtcataattatcactcctttttactccgcatattacatattatcataaagcttaaatgtaaatttttaaagctttatgtatagattgtttagaaagtaaatcattttgtaagatatttatcatcatcttatatatgctatagtttcatttttttcagtcttaatgcattcataactacgctaacagaacttaatgccatagcagcaccggcaatccaaggtgctaataaaccacaagcagctattgggatgccagctacgttatatccaaatgcccaaaataaattttgtcgaatatttttaatcgtagctttacttgctttgatagcttttggaactaatagcaagtcaccaccaagaatcgtaatatctgcagcttcaatcgctacctcagctccagtgcctatagccattccaatatcggcttttacaagtgcaggcgcatcattaattccatcaccgaccatggcaacctgtttacctttgtcttgtaataaagagatttgatgtgccttttcttcgggcaacacttctgcaattacatgttcaatgccaacttgtttggcgatggtttgagctgttcgattgttatcaccagtcagcataaccacgtcgatattcatatttcttagttcttttatcgcttgtttagcatcattttttactgtatcagcaacagcaatgattccattaatttgattatccacggcaatcatcattgccgtttgacctaaatgttcatagtgatttaattggtcatttaatttattactaatagatatattgtaatcgttcattaattttcgattgcccacaaggatttgttgttgatgaatcgtagctttaataccatgtcccggaattgatttaaaagtgtcattatcaagtaaattaagacctttatctttagcataagtaacaatagcatcagcaagaggatgttctgaagcattttcagcacttgctaaaagttgtaatgtatcattgtcaccaacataatcagttactacaggttgaccattagtaattgtgcctgttttatctagcacgattgtatcaacataatgtgcacgttctacaaattggcctcctttgaataatatgccattttctgcagcacgtcctgtacctaccataatagatgtaggcgttgctaaaccaagtgcacagggacaagcaataactaaaacagatattgctgaaacaagtgcaggttcaaattgcccggggtgaacgaatataatccatatgataaaagtaataaccgcaatgctaactacaatcggaacaaaatatccagaaataatatcagctaagcgttgaatcggtgctttagaactttgagcatcctcaaccactttaattatatgtgataatgcagtatcaccacctacttgagttgcttcaatcatgattgaaccatttttattcatggtagaaccaatcactgaatcgccactacttttttcaacaggtatagactcac

SEQ ID NO: 4355 - DNA, 3019 bp, Artificial Sequence
  Description of Artificial Sequence: synthetic nucleic acid sequence
acttacaagatagttttaataataaatgtacattaattgttcaataattatagaaaaatcaacatagcctcaaatgatttgtgtaatttcatttgaggctaaatttttaacttttttgtatatgggaatcacttaaataatatatgttttgctttactgatttttgaaatagtcattttaaatattcatataaactcatgattaaaaagcactatatcgatgtatggacataataatgaaaatgtttaaaaggtaaatataagcattttaatctgatgactcagttgttgaataaatgagccaattttcgtcaaaatattcattgccaattttgctagcgtttttttcaaaagcaagattttcaaaacctatagaactaaagaacactttagcacttatattgtttgatgcaatagcaatcatcaatgtttcaatattttgttctttagcgtattgatgttaaacgtaataagtcatttcttttaacttgaccaccgatagctaatacagggtcaccttcagaagttgcagttaataaaccagtagttaagttacttacccctgggccacttgtagtaatagccacacctggttttcctgttaaacgaccaataccttgtgcaatcatcgctgcgttttgttcatgacgcgtaacgactaattcaatatcgtcatcctctagtgcattaaataagtagtcgattttcgcacctggaataccaaatacatactcaactccattattttttaaagtatcaattaccatttgtgctgcagaatattgtttttccgccatttatattcatttcctttcaaaaattaagttcactcaaaacatcttcgtcattctcataagttttaaactaaatgttttatagaatcataagtgtcttctaaagttttcactgatttttctagtaattgtagttcgttatcatttaatggtgtttcataaattttaactgcaccattttgattgataagtgttggtaagccaagataaacatcgttaaatccatattgaccattaagttgactagaaactgtcaaaatactattttcattatttagtaaagctttagaaatacgtaatagtgctagagctataccataatacgtagatcctttagcttgaatgatatcgtaagcagcatctcttgtattaatataaatttcattcgctttagcatcgctaccagtttcttctttcaatgtatcatacactgaaatacctccaacgtttgcttgagaccaaactgcaagttcagagtcaccatgttcacctataatgctagcgtgaacactacttgatgtaacacctaattctttacttattaaatatctgaatcttgcactatcaagcactgtaccagaaccaataacacgttcagctggtaaacctgtaacttctttaacataacgtgttaagatatcaactgggtttgcagcaattaggaagaaaccatcaaagccactatccatgacactagttacgatacttttcatgattttagtatttttctcaacaagttgtaaacgagtttcacccggtttttgaggtgcacctgctgtaataacaactaaatctgcatctttacaatcttcatattctccagcttttacagtcactggtgaagaactgtaaagtgcaccatggtttaaatctttaacgtctgcttccactttatcttttgcaatatcaataattacaaattcatctgcaattccttgagtcaccatagcaaatgcataacttgaacctacggaaccgtctcctactaaaacaacttttttcccaaattttttcattttaacgaactccttcataataaagttacacaaataactgtgttagcttatttgtataatatttctattaaaataactagaattttacttcagttcagatataaaaaattcattttaatgacaatttttcaacacttttctgaagcaatcaattcagcgactaactttattacgtttattattatagtacgtgacaaagtattaataaaatacataataacgatgttaaccattcataaaaggaataggtttcctatagaaaaatgtaatactttgtttattcatatatgaaataaacgaatatgagttaatcgcggtctttttcgtcaataaagacatcaattcaatgcctttattaaaagactacctactaggccatacccacctctatgtataaactaacaattaaatacagtgaattccaaatatttatcaataaatataacgtcaaaacatcaaaaaaatagtaattgattaaaatatctaccgtcgtatacctttttaaagaatttataatataaagatttacttcggcacattttaaattcagccattaacttccaatatacaaaacacctgagacaaatatcgatgtctcaggctcagttatttaagtataaacacctacttgaaaagcacacttcaatttatgtactagtcattttaatatttaaattgtggagtgagaactattggtgtaccttaatgaaatttacgtgcatatgtacaatacattaaagatgtgtttgtgcctcttacatatctttggcgttattaaaaattgacaagttgtaatatcgactttgatataaaatcttttactaaatattgacctatgttggtttcatctcagaaataaattcaatccatttgcgagttacatgattgagataagcatcttttctccatatcacgccaagatgccatgataattcaacattctctaattgaatggacgttacgttattccccattaaattaactaaactttctggaacgatactaattcctattccttgttgaatcatattagcgataaaactaatttgagaaatattagcaacagttttagggtaatagcctagccttttacagttctctataatttgatcttttaaataataatcatcatgaaataaaacaaactcttcatctttcaaatctgccatgtctactttatttaaatgtgctaaatgatggtcattactta

SEQ ID NO: 4356 - DNA, 3444 bp, Artificial Sequence
  Description of Artificial Sequence: synthetic nucleic acid sequence
tcgcacaaataaatattataatgattcaaaagcaactaatactttagctactcaatttgcgcttaactcttttgatcaaccaattatttggttgtgtggtggattagatcgtggtaatgaattcgatgaacttattccttatatggaaaatgtacgtgtgatggttgtttttggagaaacacaagataaatttgctaaattgggaaatagtcaaggtaagtatgtgattaaagcaacagatgtagaggatgctgttgataaaattcaagatatagtcgagccaaatgatgttgttctattatcaccagcttgtgcaagttgggatcagtatcatacatttgaagaacgtggtgagaagtttatcgatagattccgagcgcacttgccatcatactaaggagtgtgaatgctcatggaagagaataaaaatcaacctaataaggagaatatgtcgaataaagacgataatgcaactcatttgaatgacagtcacagaaatgaagatttagagctttttagacggaataaaaacgctcgccaacgcagaagacgtcgtatagataaccaaagtaaagaaaaggatgctacgtctacacaatcacagttagaaactaaaccaatggataaatttttagataatcacaagtcgcataatcaaaacaaagaaataaaaagtgacttaattgaagaaaatgttaatgatgaaaacgacaatcaaaaaaatattaatgataaattaaatgaccgtattgtccaagaaacaaatgaaagtcgtcaaagtactgaagacgatgaggaatttctacttgatcatcggagtgaacaacaacctaaagcctctcgtcattctaaaaagcataaattactaagtaaatttacttctaaaaaagaaaaggaaacatctacatcgttcaatagtaatgagaaggtaactcaaattaaaccgcttagtttagaagaaaaaagagccataagacgtaaaaagcaaaaaagaatccaatataccattatcacactactcattcttatcattgttctcattttactctatatgtttacaccactgagtaaaatatcaaatgtaaatgttaaaggtaataacaacgtaagtacgagtaaaataaagaaagaacttaacgttacttcgcgatcacgaatgtatacttttagtaaaaataaagcgattaggaacttaaaacagaatcctttaatcaaagaagttgatattcataaacaattaccaaacacgttaactgtcaacgtgactgagtaccaaattgtcggtttagaaaaaaataaagataaatatgtgccaattatagaagatggtaaagaattaacagaatacaaagatgaagtgtcacatgatgggcctatcattgatggtttcaaaggagacaaaaaaacacgaattataaaagctttatcagaaatgtcacctaaagtgagaaacttaattgcagaggtgagttacgcaccaactaaaaataaacaaagtcgcataaaaatcttcaccaaagataatatgcaagttattggtgacattacaacgattgcagacaaaatgcaatattatcctcaaatgtcacaatcattaagcagagatgactctggcgaacttaagacaaatggctatattgatttatcggttggagcgtcatttattccttatcaaggttcatcaactgttcaatcgggtacagaacaaaatgtaaccaagtcaacacaagaagaaaatgatgcaaaagaagaacttcaaaatgtgttgaataaaataaataaacaatctaccagtggcgaaggcgactttctggtctgtaactgacgctgatgtgcgaaagcgtggggatcaaacaggattagataccctggtagtccacgccgtaaacgatgagtgctaagtgttagggggtttccgccccttagtgctgcagctaacgcattaagcactccgcctggggagtacgaccgcaaggttgaaactcaaaggaattgacggggacccgcacaagcggtggagcatgtggtttaattcgaagcaacgcgaagaaccttaccaaatcttgacatcctctgacccctctagagatagagttttccccttcgggggacagagtgacaggtggtgcatggttgtcgtcagctcgtgtcgtgagatgttgggttaagtcccgcaacgagcgcaacccttaagcttagttgccatcattaagttgggcactctaagttgactgccggtgacaaaccggaggaaggtggggatgacgtcaaatcatcatgccccttatgatttgggctacacacgtgctacaatggacaatacaaagggtagcgaaaccgcgaggtcaagcaaatcccataaagttgttctcagttcggattgtagtctgcaactcgactatatgaagctggaatcgctagtaatcgtagatcagcatgctacggtgaatacgttcccgggtcttgtacacaccgcccgtcacaccacgagagtttgtaacacccgaagccggtggagtaaccatttggagctagccgtcgaaggtgggacaaatgattggggtgaagtcgtaacaaggtagccgtatcggaaggtgcggctggatcacctcctttctaaggatatattcggaacatcttctacgaagatgagggatgacgtgacatattgtattcagttttgaatgtttattagcattcaagttttaatgggcctatagctcagctggttagagcgcacgcctgataagcgtgaggtcggtggttcgagtccacttaggcccaccattcaataatttaaaaccttagggggcttagctcagctgggagagcgcctgctttgcacgcaggaggtcagcggttcgatcccgctagtctccaccattatattttgtacattgaaaactggataagtaagtaagattttaccaagcaaaaccgagtgaatagagttttaaataagcttgaattcataaataatcgctagtgttcgaaagaacactcacaagattaataactagttttagctatttattttgaataacaattcaaaatatggtggaaacatagattaagttattaagggcgcacggtggatgccttggcactagaagccgatgaaggacgttactaacgacgatatgctttgggtagctgtaagtaagcgttgatccagagatttccgaatgggggaacccagcatgagttatgtcatgtttgacattcatttgggcagtattgttacttcaaatggttaatttcgtattgaatagcttaaatagtggaccagaactaaatgtaattaatccaattattattgctgtcatcttcactattgttgtagctattttagatccaattcttaagccgtctaaaggttcaaatcaatacgaatcttaattctttaaataatagtgtaggagggcatgaatgcttgtcctccta

SEQ ID NO: 4357 - DNA, 2317 bp, Artificial Sequence
  Description of Artificial Sequence: synthetic nucleic acid sequence
tttggaagttctgttgataaaatcaaattattcgctgaattgacttctaaatataaagattaccatcctgagtatctgggtaagtttaacagatatgaaatagataaatatattcaagaaattagcaaaagttataaaaaaagaggtaatgaaaatggctgaaaatcaagctaaaaaagaacaagttcatacagtattccaaaatatttctcaaaaatacgatcgactcaacaacatcataagtttcgaacagcataaagtatggagaaaacatgttatgagtactatgaatgtacaaaaaggcagtaaagctttagatgtgtgttgtggtactgcagattggactattgcattaagcgaagcagtaggctcaaaaggccaagtaactggtcttgattttagtgaaaatatgcttgaggtaggtaaacagaaaactgcttcattggaaaatatccagcttgttcatggtgatgctatgaatttaccttttgatgataactcatttgattatgttactattggttttggcttacgcaatgttccggattatttgtcagcactcaaagaaatgcatcgagttttaaaaccaggaggcatggtggtatgtcttgaaacaagccaaccgacattgccattattcaaacaaatctatagtttatactttaaatttgtgatgccaatttttggtaaaatgtttgctaagtccaaagaagaatatgaatggttgcaacaatcaacatttaattttcctgacaaacaaacattgaaaggcttattcttcgaagcaggatttaacgatatcattgtacgtagctttacaggtggcgttgctgcaatgcaccttggctataaagaaaacagttctagcaaaggtgattaacgtggcaaagttaaacattaacaacgaaataaagaaagtagaaaagcgacttgaagaagcaattataagttctgatcaaacattacaagaagcctcattccatttactatcttcagggggaaaaagagttagacccgcttttgttattttaagtggtcaatttggctctaacaacaaaccttcagaagacacgtatcgtgtagcagtagctttagaactaattcacatggctaccttagtccacgatgatgtgatagataaaagtgataaacgtagaggccgactcactatttcaaaaaaatgggaccaaagtacagctattttaacaggaaatttcttacttgctatggggctcaagcatttatctgaaatcagtgatactcgtgtccattcgaccatttctaaatcaattgttgatgtgtgtagaggagaactattccaatttcaagatcaatttaatagcaatcaaacaattactaattacttacgtcgtatcaaccgtaaaacagcacttcttattcaactgtctacacaagttggtgcgattacttccaatgcgtcaaatgacgttattcgtaaattaaaaatgatcggacattatataggtatgagtttccaaataatagatgatgtgctagattttactagttctgaaaagaaacttggtaagccggttggtagtgaccttatgaatggtcatattacattacctgtactattagaaatgcgaaaaaataagacttttaaagataaaatttcacaacttaatcctgacagtcctcaacatgcctttgaaacttgtataacaataattagacagtccgaaagcatagaacaatcaaaacaaataagtgaaaagtatttaaataaagcaatcaatttaatcgatgaattagaggatggtcctaataaagaactatttagaaagcttattaaaaaaatgggaagtcgaaataagtaagttttgtgacaaaagttgaaagcgcttcattatcctgttaccatactaagtagcaggatatttttatagcttgcaatgttttaagttttttacatacttataaaaatgaatgaaacacatgcacagggggacacacgaagtggaacgcacatttttgatgattaaaccggacgctgtccaaagaaatttaattggtgagattatatctcgcattgaaaagaaaggtcttaagcttgttggcggtaagtttatgcaagtgcctatggaactagctgaaaaacattatagtgaacatgaaggaaaaccgttctacgacaagttaatttcattcattacttctgcacccgtttttgctatggtagtagaaggtgaaaatgctgtagctgtatctcgtaaaattattggaagcacaaatccaagcgaagcagctcctggtacaatccgaggcgactatggtttaaatctaggtcgtaata

SEQ ID NO: 4358 - DNA, 3732 bp, Artificial Sequence
  Description of Artificial Sequence: synthetic nucleic acid sequence
taatcattcatttgtctggtgacaatggcaaggaggtcacacctgttcccatgccgaacacagaagttaagctccttagcgccgatggtagtcggactgacgttccgctagagtaggacgttgccaggcaaatatcgtatggatgcgatgagcctaatcgagaccgaaaggtctctttttttatacaaaattagttttaaaaaagaaagtgtttgatatgaaaaagtaaacatatcgaggaatagaaagcgcttgtaacttatgaatttgggagcgagagtaatgaaattagtcgagctacaaggttcaacaagagacgaaaatgaaacacaagagggcgagcgcttatctcaagtgaagaaagtttcttagccgagggaacaaactgacattctaaaataagatactaaaatgaagacgacgaattaataatatattcgtcgtcttcggatttggttataaaattaacttaaataagtaatgaatataacattttattttcattgatataaatattagaaggatcaaattgacatacgcgatcttttaactgaatgagatcatcatgatgtttcagctgtatacctataataacagttccagtgttttgtgatgttttctttaaatattcaaattttgtaatatcgtcttgaggtccgaggacatcattgacaaattctcttaaagcaccaggtctttgtgggaaatttaaaataaagtaatgtttcatttcttcaaatagaagggaacgctcctcaatttctttcattcgattaatatcattgttgcctccacttactatgcatacaatagttttattttcaatctgctttttatattgttctaaggcacttacacttaaagcaccagctggttcagcaacaatcgcttgtttagagtacatatccagaattgtggagcaaacagctccttcgtcaacttgaacataatcatccactttatctttcgcaatatcaaaggtaatatcaccaactcttgctactgaagctccatcaacaaacttatcaatattttctaaagtaactatactatggttgataacgactgattgatacatactactggcaccggttggttcaacaccaataattttagtatggggggaatgtgctttaaaatatgtgctcactcctgaaataagaccgccaccacctatagcagcaaatacataatcaaatgttttatcctctttttcagcttgatttaatatttccttagctaaagtgccttgtcctgcaatagtatatacattattaaatgggtcaataaaattcattttatgttgcttcgtatagtttaaagcttgtgctaagcagtgatcaaatgtatcgccaattaatactatttctacgttactatccccgaagaatttgacttgattgattttttgtcgtggtgtagttactggcatgaaaataacagcttttaaattgagttttttggcagtataagcaacaccttgagcatgatttccagcacttgcgcaagtaatacctttatttttttcttcattggataatactgaaatagcattataagctcctcttaatttaaaggatcgtacccactgtaaatcttctctttttaaataaacattacaattatatttttgagataagtaatggtcgaattgtaagggagtttcttttactatattttttagacgtaaatatgcttcatctatatcttttgtcgaaactttagttcttactgtcactgtcattcacacctttaaaaagttttttcgtatttttctattaaattttcaaattgtaaagtaatagcaatatcgtctaagccatggattaatttatttttccaggtttcatctatatcaaaatgaaaagactgagacaccgtagacactgtttgattaggtaaatcaacagttatttcatcaaattgagctaaatgttctctttctttctgatttaaacatataggtaacattgcgtttttagtacaattcatgtaaaagatgtcactaaaacttcctgcaataataatgttaaaaccataatcttttaaggcccacgctgcatgctcacggctagaaccacaaccaaagttatctccagtaattagaattgacgcaccatgatattttggtttattaggattaaaatcaggattatcactaccatcaggtaagtaacgccattcatcaaaagcaaaaggtccaaagcctgatttagagacccgcttaagatgcactttgggaatgatttggtcagtatctatattgtcataaaaaagggggacagtttttccggtatatatagtgattggtttgatttccaattatactaccacctttctaacatcaatgaatttaccattaatcgcagcagcagcagccatagcaggggataccaaatgtgtacgagcgcctttgccttgtcttccttcaaaattgcgattactcgtggatgcacaatgtactccttcaggaacttgatctggattcatacctaagcacatagaacatcctggttcacgccactcaaatccagcatctttaaataatttatctagtcccagagcttcagcttccttcttaacagttcttgaacccggaaccacaatagcagtaatatttggatgaacttgttgtcctttaataatatgacttgcttcaataagatcagataatcttgcattcgtgcatgaacctaaaaaaacataacctaattttatatcttcggctttttgacctgggtgaagtcccatatagtcataagcacgttggtcatttgcatttttaatttctgggaatggattactaaaactaactcccatttctgggttagttccccaagttacttgaggttctaaatttgttacatcaagttcaataactttatcaaaataggcatcatcatcagaataaagttctttccaccacgccatagaactatcaaaatcagtagcataaggacgaccttttacgtaattaaaggttgtttcatcaggttgcattaaaccatactttgctcctgcttcaatagccatattacaaatcgtcatacgtgcttccatggataaattttttatagtttctcctgtaaattcaagagcataaccagtaccgaaatctaggtgatgctgccaacttactgatttagtgtatgatggtgtttttgaggtgctccagtggcttctgtttctatcagctgtccctcctgttcagctactgacggggtggtgcgtaacggcaaaagcaccgccggacatcagcgctatctctgctctcactgccgtaaaacatggcaactgcagttcacttacaccgcttctcaacccggtacgcaccagaaaatcattgatatggccatgaatggcgttggatgccgggcaacagcccgcattatgggcgttggcctcaacacgattttacgtcacttaaaaaactcaggccgcagtcggtaacctcgcgcatacagccgggcagtgacgtcatcgtctgcgcggaaatggacgaacagtggggctatgtcggggctaaatcgcgccagcgctggctgttttacgcgtatgacagtctccggaagacggttgttgcgcacgtattcggtgaacgcactatggcgacgctggggcgtcttatgagcctgctgtcaccctttgacgtggtgatatggatgacggatggctggccgctgtatgaatcccgcctgaagggaaagctgcacgtaatcagcaagcgatata

SEQ ID NO: 4359 - DNA, 2908 bp, Artificial Sequence
  Description of Artificial Sequence: synthetic nucleic acid sequence
tacttccacgcgaacgagattggttaaccttatatttacaaggatacaaacaatatgaaatttcccaaattttagatttttcacctacaacgattaaaaaaataaaatctaacgcaatacgaaaactacgttgttatttaaattcatctacaaaggattgacatctatgaaatgtatatcaacgcattcacttttatatattcaaactgcgttttcaacaaatgttgaaacctatattcagtatgaacattacgctattcatttaccatgtacacctgaaaaaacattacattatttattggaattacatcaaaaatcctatcataatcaatgtatgttatctaaaaatattttaaacattaaaaaattcatacctatctatattaatgaggaaaccatattatttccagttacgcaaaaacgtgcaccgattaaatattttatcaatgcacgaaatattataggaattcattcttcaattcataccacaatgattgtttttgaagatggtacgactatcgaactgaacatcccctatacacttgtaacaaaaaaatggcaagaaagtcttaccgtaggtcatatcatagagaaaactaccttttattaaatttatattctaaaagcttcttagtaaacaatgcagtcgtatgtttaatagcatataaactagcaatcattataattatcgcgacaatcaaaacagttaacataacaaaaactgataaatcaatatttgggttgatataggcatgcacgatagctaagctggccactaaccctaaaataaagagtccgagcaaaaatgcataagctaaaaccatacaaattaaaagtacgaacacatgagaagtcgattttttcttatgattaaatataaatttctttaaatattcatttgaaaatcttattggcttattggtatcaatacttttattctgatcaactgagtcaatatatttgttaagcgcattcttctctttagcatctaaaaaccataattgcttatttactcttttgatgaattcatttttactcatttgataggtacctcttttcagaattagtcatatttatcaatagtaaatgaatcaaactattctttcaaatcttcttatataactaaaataaaacagcaatctagtgaaataaatccacttaattgctgtttttttacatttataaaattgacaaaccggaactttgaatgtctttggcaaaacctttgactgtatctactgaaagttctcctatatcacggcctaaattgttattaaccttttttacaacatcagctgggcaagtaataatatcagctccaatttcatcagcttgaattacattatatacttcacgacaacttgcccataataattgaacaccttctttactatgagtgaccttaactgattctttcatcaaaggaagtggatcaatcccagtatctgcaatgcgtcctgcaaatactgacacatatgttggcacaccttcagtcacagcgtcagtaattgcttttacttgctctatagtatagacagctgtgacattcaaccttacctgtttcgatgataaacgtttaattaatggtagtgtagactcaccagttgttgtaacaataggaatttttacaaatacattatcaccatattgttttaaaatctcagcttctttttccatagtaggtaaatcgtcagcaaacacctcaaaagaaattgaagcgtctggtatttcactaaccacttcctctgcaaaagctttataatcagttacacccgctttagccatcaagcttggattcgttgtaaaaccatcaacgagttgattcttatatgctgatttcatttcttcaatatctgcaccatccgcaaacactttaacatttaattttgtcatgtcatttctcctcctgaacgtgaaaggtcaatactatcaattatatgtatagaattgattatttgtatgtatatcagactaaaactagggatagcgatttattatcacgttttaaatttaaaaattttataacttatttataacatgaccttgaaatgtaagcgaattatttgctttaattttaaatatactgtttaaaatggaatgaaaattactatgtttaagtttaataaatatgatagtatattgtaataatgtttatctaggaggcagtttatggctcggtcaaaaaagtacttttatcttagtctattaatgataattttaagttttttctttaataccaataattcattattgagtaatatatttcaatcgtttatgaaaattgttgtagttacaagtatcgttaatattataatacttattttatcgattgtttttgccgataaatctataaagtatgctaaggaaagttcagattggattagatttgcaagcaaaatattaccattgattattttaatcactattattatccatatactttcatctttacatacttttggttacatttttaaataataataatcaacttttatattttgaggtgaaatatagatgcaatatctatatatttttgtaggtggtgctttaggtgcattgataagattctgtttatcaatgcttaatgaaggttcaaccattccgttggggacatttgttgcaaatttattaggtgcttttttaatgggtagttgaacattttttcctgcaatcgttgaatcaggtctcgcaaaataaatatattccatagctgaaattgcagttgttgtttgtcgtgtgtaagtcttaacttctataccttcatccgtaataacaacatactcacctgcatgaatatcttgtataaattcagcacctaaaacatcaatcgcacatgtttcacttgctaaaatataagcaccgttctccatttttccaactactaatggtcgaatagcattaggatcta

SEQ ID NO: 4360 - DNA, 2019 bp, Artificial Sequence
  Description of Artificial Sequence: synthetic nucleic acid sequence
ttgtactgttttgcaaatgaatctataaactattggattaaaattatcattatattaaaatacctgagacaaaatttgcctcaggttataaattgttgatttgattttatctctgaaaataaatactgacttcatacactttatacaatacaacaaaacttatagttgcaattaaagattaaattattcttctacatctatcgattcaatgactacatcataaacaggtttgtcttgagcaccaactttagtatttgcaatatcttctaaagttgattcaccctcaataagttgaccaaatactgtacttttgcacgtttaatcagaacttgcttagcagcttcttcctctgtgttatcgatcttcttaggctcaaatagtatcccttttctttcacatgctttctcaagtagataatcagttatttcatgattttttggtaaaattggaccgtgaagataagaacctaatagatttttatagtgtataccttcttttcgatcgttatcattattaccaaaaaacttaaaatctttttcataaatgaattccccctaaatatttataaaacacttactagtattttaatttctacggataaccctagcgataaagttacctaacgtttgtataatttgaacaataataataagtacaatgactgtaatcacaatgacaattgtatcgaatcgttgataaccatacactaaagccaaatcacctataccgccaccaccaacagcaccagccattgctgtactacctatgagaccaataatagctgtagttatagctagaattaatgaaccaagtgcttctggcaataaaaaataacgtataatttgaagaggtgatgcacccattgctttagctgcctcaataatcccgtcatcgacttccagtaatgagttttctactaagcgtgcgatataaggtgctacataaaccgtgagtggtactatggctgctgttgtgccgatagatgtgccaactagcaatttagtaaaaggcactatggctattaataaaataatgaacggaattgatcttaaaatattaatgataggatttaatacttgatgcaatattgtattcgaccatataccgttttttctagttaccactaacaagatgccaagaggtatacctattaaagcaccgattacaagtgatacagtcaccatatacaatgtttcgtatagagcttgtaataattgagatgaatctaaacttgaaccaaacatatttatataacctcctcataccgaatatgtcgttttgaaaggtaatcagtaagtttaaaatcattaaatgactcatcatgctcaaatctcaaccacaaataacaaaccgtttcatcttgaatttctgacatagaagaaaataatacgttaacgttaagatgatgctcgttgataagctcgttcaatattggcaattgaatttgttcagagtctaaaaacagtttataatctgtgaaatttgaatcttttctcgagttaaaagaggcccgtaactcttttgaaggctcagtgttaatcaccgtcgaaacgaaattttttgcagtgttcgtttgtggatgactaaagacatctttaactgtccccatttctatcacttcgccattttccatgacagctacacgatgacaaattttttgaattacgctcatttcatgtgtaatcatcataatcgtcacaccaaatgttcgattcacattacttaataaatttaaaattgagcttgtagtagctggatccagagcacttgtcgcttcatcacataataatattttaggatgcgttactaatgctcttgcgatggcaacacgttgtttttgtccacctgataattcatctggaaattgatcttttttatcagcaagccccacaaattctaacatttcgtcaactttttccttaatttctttcttatttgtcttacttaaaataagtggcattgcaacatttttatagactgatttagaattaagcaaattgaaatgttgaaagatcatac

SEQ ID NO: 4361 - DNA, 1385 bp, Artificial Sequence
  Description of Artificial Sequence: synthetic nucleic acid sequence
atagggaccgaactgtctcacgacgttctgaacccagctcgcgtaccgctttaatgggcgaacagcccaacccttgggaccgactacagccccaggatgcgatgagccgacatcgaggtgccaaacctccccgtcgatgtgaactcttgggggagataagcctgttatccccggggtagcttttatccgttgagcgatggcccttccatgcggaaccaccggatcactaagtccgtctttcgaccctgctcgacttgtaggtctcgcagtcaagctcccttatgcctttacactctatgaatgatttccaaccattctgagggaacctttgagcgcctccgttaccttttaggaggcgaccgccccagtcaaactgcccgcctgacactgtctcccaccacgataagtggtgcgggttagaaagccaacacagctagggtagtatcccaccaacgcctccacgtaagctagcgctcacgtttcaaaggctcctacctatcctgtacaagctgtgccgaatttcaatatcaggctacagtaaagctccacggggtctttccgtcctgtcgcgggtaacctgcatcttcacaggtactatgatttcaccgagtctctcgttgagacagtgcccaaatcgttacgcctttcgtgcgggtcggaacttacccgacaaggaatttcgctaccttaggaccgttatagttacggccgccgtttactggggctttgattcgtagcttcgcagaagctaaccactcctcttaaccttccagcaccgggcaggcgtcagcccctatacatcaccttacggtttagcagagacctgtgtttttgataaacagtcgcttgggcctattcactgcggctcttctgggcgtgaaccctaaagagcaccccttctcccgaagttacggggtcattttgccgagttccttaacgagagttcgctcgctcaccttagaattctcatcttgactacctgtgtcggtttgcggtacgggcacctgttatctatctagaggcttttctcggcagtgtgaaatcaacgactcgaggaaacaatttcctctccccatcacagctcagccttatgagtgccggatttgcctaacactcagccttactgcttggacgtgcactccaacagcacgcttcgcctatcctactgcgtccccccatcgattaaaacgatactaggtggtacaggaatatcaacctgttatccatcgcctacgcctgtcggcctcagcttaggacccgactaacccagagcggacgagccttcctctggaaaccttagtcaatcggtggacgggattctcacccgtctttcgctactcacaccggcattctcacttctaagcgctccacatgtccttgcgatc

SEQ ID NO: 4362 - DNA, 2839 bp, Artificial Sequence
  Description of Artificial Sequence: synthetic nucleic acid sequence
cccatcgattaaaacgatactaggtggtacaggaatatcaacctgttatccatcgcctacgcctgtcggcctcagcttaggacccgactaacccagagcggacgagccttcctctggaaaccttagtcaatcggtggacgggattctcacccgtctttcgctactcacaccggcattctcacttctaagcgctccacatgtccttgcgatcatgcttcgacgcccttagaacgctctcctaccattgtccaaaggacaatccacagcttcggtaatatgtttagccccggtacattttcggcgcagtgtcactcgactagtgagctattacgcactctttaaatgatggctgcttctaagccaacatcctagttgtctgggcaacgccacatccttttccacttaacatatattttgggaccttagctggtggtctgggctgtttccctttcgaacacggaccttatcacccatgttctgactcccaagttaaattaattggcattcggagtttgtctgaattcggtaacccgagaggggcccctcgtccaaacagtgctctacctccaataatcatcacttgaggctagccctaaagctatttcggagagaaccagctatctccaagttcgattggaatttctccgctaccctcagttcatccgctcacttttcaacgtaagtcggttcggtcctccattcagtgttacctgaacttcaacctgaccaagggtagatcacctggtttcgggtctacgaccaaatactcaacgccctattcagactcgctttcgctgcggctccacatttgctgcttaaccttgcatcagatcgtaactcgccggttcattctacaaaaggcacgccatcacccattaacgggctctgactacttgtaagcacacggtttcaagttctctttcactccccttccggggtacttttcacctttccctcacggtactggttcactatcggtcactagagagtatttagccttaggagatggtcctcccagattccgacggaatttcacgtgctccgtcgtactcaggatccactcaagagagaatatgttttcgactacaggattattaccttctttgattcatctttccagatgattcgtctaacatgttcttttgtaactccgtatagagtgtcctacaaccccaacaagcaagcttgttggtttgggctcttcccgtttcgctcgccgctactcagggaatcgatttttctttctcttcctccgggtactaagatgtttcagttctccgggtctgccttctgacatgctatgaattcacatgtcgataacatgacataactcatgctgggttcccccattcggaaatctctggatcaacgcttacttacagctacccaaagcatatcgtcgttagtaacgtccttcatcggcttctagtgccaaggcatccaccgtgcgcccttaataacttaatctatgtttccaccatattttgaattgttattcaaaataaatagctaaaactagttattaatcttgtgagtgttctttcgaacactagcgattatttatgaattcaagcttatttaaaactctattcactcggttttgcttggtaaaatcttacttacttatccagttttcaatgtacaaaatataatggtggagactagcgggatcgaaccgctgacctcctgcgtgcaaagcaggcgctctcccagctgagctaagccccctaaggttttaaattattgaatggtgggcctaagtggactcgaaccaccgacctcacgcttatcaggcgtgcgctctaaccagctgagctataggcccattaaaacttgaatgctaataaacattcaaaactgaatacaatatgtcacgtcatccctcatcttcgtagaagatgttccgaatatatccttagaaaggaggtgatccagccgcaccttccgatacggctaccttgttacgacttcaccccaatcatttgtcccaccttcgacggctagctccaaatggttactccaccggcttcgggtgttacaaactctcgtggtgtgacgggcggtgtgtacaagacccgggaacgtattcaccgtagcatgctgatctacgattactagcgattccagcttcatatagtcgagttgcagactacaatccgaactgagaacaactttatgggatttgcttgacctcgcggtttcgctaccctttgtattgtccattgtagcacgtgtgtagcccaaatcataaggggcatgatgatttgacgtcatccccaccttcctccggtttgtcaccggcagtcaacttagagtgcccaacttaatgatggcaactaagcttaagggttgcgctcgttgcgggacttaacccaacatctcacgacacgagctgacgacaaccatgcaccacctgtcactctgtcccccgaaggggaaaactctatctctagaggggtcagaggatgtcaagatttggtaaggttcttcgcgttgcttcgaattaaaccacatgctccaccgcttgtgcgggtccccgtcaattcctttgagtttcaaccttgcggtcgtactccccaggcggagtgcttaatgcgttagctgcagcactaaggggcggaaaccccctaacacttagcactcatcgtttacggcgtggactaccagggtatctaatcctgtttgatccccacgctttcgcacatcagcgtcagttacagaccagaaagtcgccttcgccactggtgttcctccatatctctgcgcatttcaccgctacacatggaattccactttcctcttctgcactcaagttttccagtttccaatgaccctccac

SEQ ID NO: 4363 - DNA, 3315 bp, Artificial Sequence
  Description of Artificial Sequence: synthetic nucleic acid sequence
tatatggagatgtgaagtggactgccccacttactgtaaaagaaacagtatacgcgcaaagcttaactgacaaaccagtaaaaggtatgcttacaggtccagttactattttaaactggtcatttgaacgcgtagacgtacctagaaaggttgttcaagatcaaattgccttagccattgatgaagaagtgttagctttagaagaagcaggtatcaaagtcattcaagttgacgaaccaacgttgcgtgaaggcttacctctacgctctgaatatcacgaacaatatttagaagatgctgtacattcatttaaattagcgacatcatctgtgcatgatgaaacacaaattcatacacatatgtgctattctcaatttggacaaatcattcatgctatccatgatttagatgcagatgttatttctattgaaacttctcgtagtcacggagacttaattcaagatttcgaagatattaattatgatttaggaattggattaggtgtttacgatattcacagtccacgtattccaaccgaagaagagattactactgcaattaatcgttcattacaacaaattgatcgttctctattctgggttaacccagactgtggtctaaaaacacgtaaagaaaatgaagtgaaagatgcattaacagtgttagtcaatgcagttaaaaagaaacgtcaagaatctgaatcaacaacagcataatacgagctagaggtgaggcaaatgtcacagtatccactttggaatcaattaaatactttaaaagaggctcagtgggtcgatttaacacatactttcgacccaaatatccctcgttttagcgaatttgaaaaaggtgaagtctcaacgctattcaatgttaaagatcatgggttttatgtacaacgttggagtatcgtaactcaatatggaacacacattgatgctccaatccatttcgttgaaaatagaagatatttagaagaattagatttaaaagaacttgttttaccattaattgttttagattattctaaagaagctgcacaaaattcagattttatcgtatcacgtaaacatttagaagattgggaacaacaacacggtcgcattgaagcaggtacttttgtcgcattacgtactgattggtcaaaacgttggccagatatagaaaaatttgaaaataaagatgtagatggccatcaacatcttccaggttggggccttgatgcattaaaatttctcattgaagaacgtggtgttaaatccataggtcacgaaacatttgatactgatgcctcaattgatacagctaaaaatggtgatattgttggcgaaagatatatcttaggtcaagacacattccaagtcgaattacttaccaatttagatcaattacctaccagaggtgcaattatctatgcaatcagcccaaaaccaaaagatgcaccaggctttccagttcgtgcattcgcaataaaaccttaattgatgtctttcatctagcgttctcaaccacgtggtggttcaagtggtgcacaaccgctatgatattattccatcaatgttcatcatcataatatttgaatagcaatgaactctttctaactaagtaaaaagctataaacgaagtttttaaaacgacttcgtttatagcttttttaatacacacttttatgatataaaaaccgtgctccactaaatgttaaacttcatatttagatacaaccgtagcgataccttgaccgccaccgatacataaagatgccacacctgttggcttagcatcacttaattgatgtaataatgaaactaaagtacgcgcacccgaagcccctatcggatgtcctagtgcaatcgcaccaccattaacattgactttatcttgcggtaattgcaactcacggtttacagcaattgattgcgctgcaaaagcttcgtttaattcaaaaatatcaacatcatttatcactttattagaacgttttaaagctttatgtatcgcttcaactggaccaatacccataattgaaggcgccacaccactcgcaccaaaactatctaatacagctataggttgtaagcccaatgctttcgctttgtcctccgtcataacgagcatagcagcagcaccgtcattgataccggatgcattaccagcagttactgatccatcttttttaaatgctggacggagttgtgctaacttatcaattgtcgtttgaggtctaatgccttcatcttgagaaataattagggggtcgcctttacgttgtggtacctctacaggtacaatttcagcatcaaatacaccagcttgttgtgcacgtgatgctttttgttgagaatcgaatgcaaattgatcttgttctttacgactaatctgatactgttcaactagattttcggctgtgatacccatatggtaatcattaaacttatcagttaaaccatcagctatcatactatcttctaaagtttgatttcccattttaaaaccgaaacgactatttttaagaagcattggagattgagacatactttccatgcctccagcgataacaatctcattatctcccgctacaatagattgataggcaagttgaatcgcttttaatccagaaccgcaaactttatttacagtaaaagaaggtaccgcttctggcacaccaccatgaatcgcagcaatacgagcaggattttgtccttgacctgcctgtaatacgtttcctagaataacttcattgatttcattaggatctatttgactatgttctaaaatttgacgaataactgttgcacctagttcataggcaggtatatccttaaatacaccaccaaacacgcctataggtgttcgatatgcttcagctaatactatgcgtgacatgtcatattcatctccttaatataacttatacttttctaaaaatgagggaagaagcaaaccttcttttcttattgtcattatatttggatattcaaatctattatttaagagtttatctcttaccttcattgtatttaaatgagtattacatactttaattgcagtaaacacattccacattatattaccaaatttacatagaaaaattccattatgatctatcatcatcaaatgcatcactttctttctaagcaatgatcaattttaatttcataatcactctcacttcactaaatatagttaatccattgttgtaaaaaaagaggaaaccataaaagaaatactcatgtctatacaaacggggtagtctaaccgtcccacttaacacaagtcatctttataagatttccttaacatctactattatatcta

SEQ ID NO: 4364 - DNA, 1894 bp, Artificial Sequence
  Description of Artificial Sequence: synthetic nucleic acid sequence
tttattctctaggtacttgatacgcttcttcatcattctttttggaatgtctaattccataaattaaataaataattatacctacaataaaccatatcagtgtatacaacttagcttcaaaacttaatccccaaaatactagcaatactaatataaatgtattgcaggcaaaataggatataaaggtaatttaaactctggcttaggtaaatctttcccttcacgttttcttaatcgatacattgctagtgacacaaacatgaatgcaacaagggtacctgcggaaatcaattgtgctaagaaagcaaacgggaacattgatccgataactacgccaatgattgtaagtatgacaagtgctcgattaggtaaatgtttgtgattcaattgacttaaccaagaagggagtaaaccatctcgtccaaatgaatataatagacgtgaacctgcaagcatcataccgattaatgcagtgaacataccgatgacagaaattgcttgaacaattgcagcaataataccatgaccactttctcgtaatgcccaacctactggctctgcattatcagcgtattgagagtagtggaacatgccaacaagaacaagtgctacggccacaaacaatacaattgctactatgagtgaccctaagattcctctaggcattgtcttctgtggattaatcgcttcagctgaattagcagcaatagagtcaaaaccaatataagctaaaaaaatcattgaaactccagcataaataccttgccaacctccaaagtcgccagtttcagtaactttatgttctggaataaaaggtatatagttactgaaattaatcgcagttagcccaacaatcacaaataaaatgatggccaacacctttaatataaccaatacattttccatacgagcggcttcgttcattccgcgtgataatagtaatgcagttaaaataatcactacagcagcaatgatatcaatgacaccaccgttacttccaaatggattagataatgatttaggtaaagaaatgcccaatggtgcaataagacctcttaagttagcagaaaagcctgaagcaacgaaagcaacagcaataaagtattctgctaaaagcgcccaaccggcaacccatccgaataattcaccaaaaagaacattaatccatgaataagctgaaccagcaaaaggcattgtagatgccatttctgcataagtaaaggctacaagacctgccacaatagcagctaataagaatgacaatgaaacagcaggtccggcatgctcagccgcgacaacacctggtaaagtgaagatagatgtagaaacaattgtaccaacacctagtgcaagaaagtcgcgtacacgtaatgtgcgtttaagatgcccatctttactttgataaatagtaggattctcttttcgagtcatccgattaaaaaaacttcccataacaaacctccataacatcaacttactattaacatgagtcagcaaacattccttaacaatacgtattaaaaaatcatctacatgtagataaaatgaattggctgattctgataattaatataatagcacagaagataaatattttgtctaaaaattctgaaaaattaacaaaaattattttcctcagtgattaagttaatatagtaaaatttcaataggctaaaaaggatataaattgaatgttaatatcacaggaattttcatttatggtatttgtcatgtatttcttcacatgatttataaattagtaaagtaattatatttgtaaaacatgttatcgtaaaagagagcatcatgataatgatgaaaaataatcggtattagtcaattaaaacaattatatacacggaattattgttcaatgagtgttagtgtaaatgat

SEQ ID NO: 4365 - DNA, 2986 bp, Artificial Sequence
  Description of Artificial Sequence: synthetic nucleic acid sequence
tagttcaaaaaagtatgaatcgagaaaatattagcttacaacactataattttaatgatgatgaggggaagattgaatggctgttaccatttttatctaattctgggcctacaattatatatgtttcttctaaaaaaagatgtttagaactagctcaaatgatttatgactcaggatatctaacaggtatatatcatggagatttaagttatcaggaacgccaaacagttcaacaacagttttttaataatgacatccccgttatagtagcaacaagtgcttttggaatgggaataaataaaaaagatattcgtacagtcatacattttcatttatcatcttcaccatctaactatttacaagaaattggtcgtgctggtagggatggtaaacaaagtcaagccattagtttatttcaacctgatgatagttttattctagaaacactactattcactgatattatcacagatgacgatattacaatgtttgagacgggaaaccacttaccagatgaaaaggaaaaaattttaagtactttaaatatacaattcacatttagccaacttaaagatatatttcatcaatcatatcaacgtaagcgactaggttatatgagaatgatgggctatactaatttagatcaatgtcgacgtaaatacttactagaattttttggcgaacatcctcaaagtccaaaacaatgttgtgatcaagattcaagattagagcctattcagatattgaatcgtaaaaaggtgaaaagaaaactaagttttaatgaaaaattatataatttgttcgaaacctagctatcactttacttactgaaatttaacaagctataatcaatatgtagacccaattaagcagtgttaaatacttttaattattttacatatttaatttcaacttgggtatagagttataacgtgattgaattaattaaaatggaagggatgatagttgtgtctaataataattttaaagatgatttcgaaaagaatcgtcaatctattaatccagacgaacatcaaacagaattaaaagaagatgataaaacaaatgaaaataaaaaagaagctgactctcaaaacagtttatctaataactcaaatcaacaatttcctccgagaaatgcccaacgacgaaaaagacgcagagagacagcaactaatcaaagcaaacaacaagacgacaaacatcaaaaaaatagtgacgctaaaactacagaaggttcattagatgaccgttatgacgaagcacagttacagcaacaacatgataaatcgcaacaacaaaataaaactgaaaaacaatcacaagataatagaatgaaagatggaaaagatgcagctattgtaaatggaacatctgagtcaccagaacataaatcaaaatcaacacaaaatagacccggccctaaagctcaacaacaaaagcgtaaatcagaaagtacgcaatcaaaaccgtcaacaaacaaagataaaaaagcagctacaggtgctggaatagctggtgcagctggtgttgctggtgcagcagaaacatccaaacgtcatcataataaaaaagataaacaagattctaaacactcaaaccatgagaatgacgaaaaatctgttaaaaatgatgaccaaaagcaatctaaaaaaggcaaaaaagcagcagtcggtgctggcgcagctgcaggagttggtgcggctggtgttgcgcatcataataatcaaaataaacatcataatgaggaaaaaaattctaatcaaaacaatcagtacaatgaccaatcagaaggtaagaaaaaaggtggtttcatgaaaatcttgttaccacttatagcagccattcttattctaggtgcaatagcaatattcggtggtatggctctaaataatcacaacgatagtaaaagtgatgaccaaaaaatagcgaatcaaagtaagaaagactcagataaaaaagatggtgcgcaatccgaagataacaaagacaaaaaatctgatagtaacaaagacaaaaaatctgattctgataagaacgcagatgatgactctgataatagttcctcaaatcctaacgctacttcaactaataataacgataatgtagccaataataactcaaattatacaaaccaaaatcaacaagataatgcaaaccaaaatagcaataatcaacaggcaactcaaggtcaacaatcacatacagtatacggtcaagaaaacttatatcgtatcgccatacaatattatggagaaggaactcaagctaacgtagataaaattaaacgtgcgaatggattaagcagtaataatattcataatggtcaaacattagttattcctcaataacattattaatagtctcagtattggtgataaacaccaatattggggctatatttttatttaattcaaaattcaggtcttagctaaaatagaaaataactgatataataatttggtgattaaaggaggataagtatgcaaactattgaaagcatcattataggtggcggtccatgcggattaagcgcggcaattgaacaaaagaaaaaaggtattgaaacattagtaattgaaaaaggtaatgttgttgaatcaatctataattatccaacacatcagacttttttctcatcaagtgataaattaagtatcggcgatattccttttattgttgaagatagtaagccaagacgtaatcaagcgcttgtatattatagggaagtcgttaaacatcatcaacttaacatacatccattcgaagaagttttaacagttaaaaaaataaacaataaatttgcaattacaactacaaaaggtgtatatgaatgtaaatatttaactgttgctacgggttattatggtcaacataacactttagaagcggaaggggcagaattaccaaaagtattccattactttaaagaagcacatccgtattttaatcaaaatgttgttattattggaggcaaaaactctgc

SEQ ID NO: 4366 - DNA, 2883 bp, Artificial Sequence
  Description of Artificial Sequence: synthetic nucleic acid sequence
accagcagacttggggttttttggtcatctatttgcctttccattttatttccaaccaaatacgaaagacaatgagtatgccaccggtaattaatgtaatgattccatcttgccaccacgtcattatactacacctcccaaaaagatgagtgtcatataatatgatgacctatcaatagtttaacataaaaacagaacgtatgttctgtttttgatagataatttttaatttatatctttagtacaaccctttatctttaaagcaatacaagataatatatatataaacacattattgaaaagaggttaagacaatgatgaatccattagcccaaaaattgaatgatgaaataaagcaatcaagtccagaagtattagatatgatgtcacaattaggtaaagatatgttttatccaaaaggaattttatcgcaatctgccgaagcaaaacgcacaacatataatgctactattggtatggcaaccaaaaaagaaggtaaaatgtacgcaaattcacttaaccaaatgtttaatgaccttacaccggatgaaattttcccatatgcacctcctcaaggtgtagaggaattacgtgatttatggcagaaaaaaatgcttaaagaaaatcccgacttaaagtctaaatctatctctcgtcccatcgttacaaatgctctcacgcacggtctttctctagtagctgatttatttgtagatacagatgataccgtcttattaccgacacacaactggggtaattataaacttgtatttagcacacgtcacggtgctcatatcaatacgtattctatttttgatgactcaggtcacttcactacatctgaacttgtaaaaacattaaaagaatataaaaaagacaaagtgattattattttaaattatcctaataacccaactggttacacaccaaataaaaaagaagttaatactattgtaaatgcaattgaagaactagctaataaaggtactaaagtagtaactgttgtcgatgatgcatactatgggttattttatgaagaagtttaccaacagtcaattttcacggctttaacacaggtgaaatcttctaaccttttaccagtgcgtttggatggagctactaaagaattcttctcttgggggttccgagttggctttatgacgtttggaattgatcatgaaacgttaaaaaatgcgctagaagctaaagtaaaaggattaattcgtagcaatatttcaagttctccactaccttctcaaagtgcaatcaaacatgtacttaaatatcatgagcaatttgataaagaaatcgatcaaaatatcaatattttaaaagaacgctacgaagtaactaaacaagtagtgtatgataataaatatgccaaatattggcaagcctatgactttaattcaggatactttatgtcattgaaattaaatcaagtcgatccagaagaattacgtaaacatttaattaataactattcaattggtattattgctttaaatagtacagatattcgtattgcctttagttgtgtagaaaaagaagatattccttatgtctttgagtctattgctaatgcaattgatgatattaaataagtttaaggggctgggattatgaatagagagcattcataatcctagttctattcttatcttgatttttatgctcttgaaaactatgtgataaaaccttttaatttaatttaatttgatatgacattatatgtacaaaaaaatattaattattattttcttcggatataatttttaagaatattcacaatttcgttagtcgacactttaataatttattgttttctttttgtgtgatttaagtacaaaagctaaaacgaataaattgatactcagtacattagtttttgacttttgatttctatctccattatctcgaagttgagtatctgtgatttttctacaatgattatttatcaaataactacactcgccaccctattctttaagtttttaatatagaaaaagtgtggattgtacatccacactctatgactaactattctcttattttatttctaaataatcctaataaacctaaaccagcaagtaacattattaaagcaggattttgaatatcgtttgttttacctgtttccggtaatttatcttgtacatcattgttattatctttcttggaagttgttgtaatttcgtcttctttgtctttcttagttatttttgtgtctttctcgtctttgccgctttttggtattactggttttttctcttctctatctttcttcggagtttttatgtctttcttttctttgtctttctttggtgtttttgtgtctttagattctttctcgtctttatctttctttagtgtttttgtgtcttcgtctttctcgtttttggtaatttgtgtatttgttactgaagtatttgcttgattttgttcttttccattcacttcatctttattttgattggttgtttcaacaactttatttgtattattatcttgttgattattttcaactataggtgattgtgcagtgctaattttacgataaataaacttagtaattccgtcactcacagaagttctataatgttggtacccaggaattttcaccggttgcctttctgaagcaggggttttagcatcttccacagcatctttaataatatttccttgatcatctagccagacagttacataaagaattggaagttcatatgacgcatcgtattcttcttcatcattattattttgatctgttgttatggctgtggcatctgtattttcagtattatttgtaggtgctgtctgtgaagtttttggtgatgttccttgattttggtttgcagtattttcatccgcatacacagttac

SEQ ID NO: 4367 - DNA, 2987 bp, Artificial Sequence
  Description of Artificial Sequence: synthetic nucleic acid sequence
actttgaatcaccaatgatttacccgctccagacatacctgtaacaactaacaattcacttttacccatttctttttcgttgcttgtcattttcttaagtcaccgccaattataatcttcaatcaatatcattatattaaattcatcttatcacactcaaatatgcaaagtaacatacttatattgtaattaaaaaagctagaatcattgatgacgatactttgacgcaaacaatgttctagctatgtgtaaaatgagttaaattttaattatcttttaattctgtaatataatcagctgcactttgagccgcaatactaccgtctcctgtagcagtaacaatttgacgtaaccctttatcacgaacgtcacctgcagcaaaaatacctcgtactttagtactcatgtcatcttgtgtgacaatgtatcccgcgtcatttgtaataccaagatttttaaatggtgctgtgagtggtttcattccaatataaatgaatacaccgtcggcatcataagtctgttcagcaccatctttagttgattcaagtgtaactgaaccaactttaccatctttttcattaattgttttaagtgtatgactccaaataaagtcaactttatcatttttgaaggcacgttcttgcaagatgttttgtgcacgtaattcatctctacggtgaacaatcgttactttatctgcaaatttagttaagaaagtaccttcttctaccgctgaatctccgccgccaattacgaaaagacgtttatttttaaagaatgctccatcacaaaccgcacaataacttactccacgtcctcctaattcttgttcaccaggaacgccaatctttttatactctgctccagttgagataataactgcatgtgctgttatctctttattccctaaattgataactttatagtcgcctttatcttcaacagatttaatatcgccatattggtattccgcaccaaattttttagcatgttcaaacattttagtagataagtcaggacctgtgatcatctcaaatcctggaaaattctctacttcttcagtgtttgccatttgaccgcctggcataccgcgttcaatcatgacagtttttaaattggcacgagatgcatatactgctgctgtcataccggcaggacctgcaccgattattgctacatcaaaatctacttcagtcattttaaatgcctcctacttattaatcattatgcgcattatatatcatacttttcatttcataaatttatatgctcaatataaattcaattgctttattcagtttgtatctagaaacattaaaatcgtccatcaattgcctcttggtaagtggttggctagaacgacgatacgataggtaaacaaatgcagctacatatctatcgacatctactaaatctacattttcagctataatcatttctgcttgattaatccaatctgtaaataaagacgtgttatatttgaatttcttaaaattatacaacctttgcatacctctgtgtataaaatctaatttattgagtgtgagtccttgtaccaaatatgtgagataaagtttctcatagtcattcattgattcaagaattgaccaaatatcttcagtcattagtatttcttttccatttaattgatgaagtaaaaaaataccgtaaagtcgataatgattattatcatctagtaataatggtaacactcgtgattcaaataccgttttactttcctcaattacccaaggtgcataaccaacatcaacttcagaaatttgagtgagcttgttccacatctcaatactttcgtctttatttcctaggtaataaaaattgaaactcaatgcattatacatttgaatagagacaaatttaccttttttataaagtggataaagtaaattttgagaagcacgatactgttttaaataactcaatacgattcctaatttaaaggtttcgtcgtcatttagtggtactactttattaagtattttaagatatttttgatatttttctgtttcttttttattataaagtaataatgtgtagtgacaaagtgcatgcacgtctgaattatcttcctttaaaagttcttcaaacattgctttggcgctatcatactcacctagatacaaataacacattgcaagtaaattcctaatcaccctatgctgttgtatctcgtaagattgattcaaaatatatgataactgttttattatataatatttaaagctgtactgtgtagattaacaacgatatttaactactttgtcttgtgcgttgcgttctagcaatgagttgatgacgagcattaaagaactgaccgtaactcatatacgttgcaatgagtgcagacataatcgtcgctgttgtatgaataaacacgacaagcaattgaaatttaattgcttgaagtgggtcaacgcctccgataatcaatcctgtcatcatacctggaattgaaactagaccatatgtttttacagaatcaattgtaggaacaattgctaagcgtatactttctctaatagctgattttgatgcgagcttaggtgtcgctgctaacgtaagtttggattcaatatcagaaacatcttgaacaaatgctctttctaaattctgataagcgagattaatcgcgattaaaccattattagctaacatacctccaattggaatcacttcattcgctgtaaatttaattgcacctgtagcaacagttgctgccaatggtagcgctgttcccacaaatatagccacaaatgatatccaaaaaacatgatgcatgacaggtgaagcacgacttattgtattccaagatgcattgataataatgactaacacacatagcactaataaccatttttcattaatttcgaaaatataatgtaataaaaagcctaaaatcaatagttgtatggttgctctaattgtagcaataactaaatctttgataatatgtaatccttctttac

SEQ ID NO: 4368 - DNA, 3041 bp, Artificial Sequence
  Description of Artificial Sequence: synthetic nucleic acid sequence
tataactgtttgtggtatgggagggccattaattgcaaaaatattaaacgatggaaaagataaattagttaaccatccaagactcatactacaaagcaacatacaaactcaagcattaagacaaactcttaataaactttcatatgaaatcgttgatgaaagaatcattgaggaaaagggtcacatatatgaaatcgtggtagctgagtttaataataacttagttaaattaaatatattacaagaaaaattcggaccatttttacttagagaatgtaataacatttttcaaaaaaaatggcaaagagagttagaagcactgcgtgatataaaatcccaattgaattcaacatcacatcatgagagactaaaagaaatagaagatgaaattaacttaatacaagaggtgttaattaatgaaaattagtgaactgatggaagttttaaataatcacgttccatttcatcaagctgaatcatgggataatgtaggattattaattggtaatgataagttagatattacaggtattctgacaacactcgactgcaccgatgatgttgttaaccaagcaattgaacttaataccaataccatcattgctcatcatccacttattttcaaaggagtaaaacgtatcgttgaagatggatatggtagtataattcgtaaacttatccaaaataatatcaatcttatagcattacacactaatcttgatgtaaatcctaaaggtgtcaatcgaatgttagcggatcaaataggtttagagaacatatcaatgattaatacaaatagctcatattattacaaagttcaaacttttatacctaaaaattatattgaagatttcaaagacagtttaaacgaacttggattagctaaagaaggtaattacgaatattgtttctttgaaagtgaaggtaaagggcaatttaaaccagtaggtgatgcaagtccttatatagggaagttagatagtatcgaatatgttgatgaaataaaacttgagtttatgataaaagacaatgaattagaaataactaaacgtgctattttagataatcacccatacgaaacaccagtttttgattttattaaaatgaacaaagaaagtgagtatggattagggattattggacaattaaaccaaactatgactttagatgaattttctgaatatgccaaaaaacagctcaatataccgagcgtacgatatacaggtcaacatgatagtccaattaagaaagtagctatcataggtggttcaggtataggatttgagtataaagctagccaacttggagcagatgtttttgttactggtgatattaaacaccatgatgctttagatgctaaaatccaaaatgtaaatttattagacatcaatcattatagtgagtatgttatgaaagaaggattaaaagaattattagaaaaatggttatttaaatatgaaaatcaatttccaatatatgcttctgaaatcaacacagatccatttaaatataaataaatgttattgataaacatttaaaggagaacaaattatgtcaaaacatccatttgaacactttaatttagatgagaatttaattgaagctgttaaaaatctcaattttgaaaaaccgactgaaatccaaaatagaatcataccgagaattcttaaaggaacaaatttaataggacaatctcaaactggaactggaaagtcacacgcttttcttttaatattgatggagatcgttctttttctgaagcagtacaattggacatacaagtacctggtgcttttcctaaatttggaactacagatggaacgattacgaaaaatgttgtcattgaaaaatgttattttggctgttcagatcatcctaaaatgaaagcgtggaatagagctattggctctcatgccagtagatataactgctattatgaaaacattcatatcaatcaaaacatctttgataatttaaatgagtatgctttaactcctctaaagtcaaaagacacatttattacaaaaaataaatttataaattgtaatggtggaataagatttcttggagtgaaggatggtaaaaatgctgccgatcctattacaggacaagtgatggaaactcaagctggtgagaatttcaatgtgataggtaatacttttattggtaagatgaaaagagatgcgattcatattagaagttatcatcacgtccaacatcaaaacgtttttatagcggcaaatcaatttgaagatgcttcacaatcaatacatttagaaaatattaatggacttactttaaatcaggaacaaacaaaaatcaaaatcaagagtattgatgtgaaaaacatcagtaattaaagatttagaaatatattaatcatatagtaaaagcataagagtacaatcgttaataggtaaaatgattactgaagtttccattggtagagtaagttgaatcatgtcataatttttatacttagggcacctcgttaatttagtttagtgatgtttattaaattatacgaaagtgccttatttttttagagtatttcaatgtgaaattacatataagagcaaagtattttggcgagactcatgagggaataggacaagctgaagacttatataggctgaagctgtctcataagaaagcaagccaacaatacaaagtattgtaaataaagaagccagtaaatgaatttacaaaaactcatttactggctattttctaggaattatgtcccggcctcttattttatgaaattataaaaaatattgtattcacaagaatttttacaattcatgtaaagttagtttttcttattaaaagcgccgataattttaacttgaaaatccaaagtctctaaaattgaaataattttattcacatcattatttatagcagtatcggcttgaacataaaaatgatacatacctaattgagttttaagtggtctagattcaatccacgataaatttatgttgaataaagtaaaagtatttaaaacactagctaaaagtcctggcttatcatactta

SEQ ID NO: 4369 - DNA, 2797 bp, Artificial Sequence
  Description of Artificial Sequence: synthetic nucleic acid sequence
tggtgttctactttaaaatcaataactagtgttataaaaggttgatttaatcatttttaatttcaataatcaactaccctaaataataagagcctggaacataaatcaatgttccaggctctcttatgaatagctttaaagctttgtgattatcaaatcctcttttttaatttatcatttgttaaattaaaggacgttagcataaccttcaaacactttaccttgtgacgcatctaaagtcactaacatatcatttttaatttctttagttgcttgttctacaccaacaacagtaggtatgcctttttctaaacctataattgcgcttggtgaagtaataccattttcttctgtaattagacctatagctttttcaacatatggtactaatgtttcatcaacagaatttgtaataataactttatcagataaatctttaccttctaaatcactagcactatctgcgacaattgcatggcctacaacagatcctctaccaacaccttggcctttagcaatctcatcacctactaagtggattttcatcatatttgtagttcctttttctccagtaggtacaccagcagtaataataattaaatctccgtttgaaactctaccagtttctactgctgttgctacagcattatttagtaaagcatcagttgttttacgtccttctttaacgaccggatttactccccatacaattgcacattgtctagcagttttttcgctaggtgttacagcaatgatatctgaatgtggacgatatttagaaatcgtacgtgctgttgaaccactttcagttgctgctacaatagcttttacatttaagtttaaggcagtatgtgcaacagaaacaccaattgcatttactaatgaagtttcaactaatttagtacgatcacttaataattttttatagtcttgcgctgcttcagcagaaactgcaatattacgcatagttttaacagcttcttcaggatattgacctgctgcagtttcgcctgataacattacagcgtcagtaccatcgtatattgcattagctacgtcacttgcttctgcacgtgtcgcacgtggattacgttgcatagaatcaagcatttgagtcgcagtaattacaggttttcctaatttattacattttctaattaaatctttttgaaccattggtacgctttctggtggaatttcaacacccatatcaccacgtgctaccattaatccatcagatacttcaagaatttcttcaatattatcgataccttcttggttttcgattttagggaaaattgttatttctgctttttcttcttcaagaatttgacggatatctaaaacatcacttggacgtcttacaaaacttgcagctataaagtctacattttcctttataccaaatctgatatcatcggcatctttatcagtgataccaggtaaattaactttaacaccaggtaagttaacaccttttttattttttaattcaccagtatttaagatatcacatttaacttcgcctttatctttgttaatttctttgacttgaagttcaactaaaccatcatctaatagtatatatgatccaatattgacatcattgattagattttcatatgttacagagaatttttcaggtgttccttcaacttcattcatactgacaatgacttctttgcctttttctaaaacaataagtccatctttcatattgtgcgtacgaatttctggccctttagtatccaataacaagccaattgttttatttaaacgtttagcaactttacgaattgtatcaattcttgctttatgttcttcatgactaccatgtgagaaatttaaacgcgcaacgttcattcctgcattcattagtttttcgagcatttcctctgattctgaagctggtcctattgtacatacaattttagtctttctcatttttataatcctcccaaataaatttaaattgataattcttttgctaattcatacatttgactattaaatttgcgatcactttcagcaaaaatttcatcaaacggcgtagaggttaattgattattcctaatgccaacacctttagctgtctcgccttgttttaatagttcaacagcatatccaccaagtcgagaagctaatactcgatcagcaccagatgggctaccgccacgttgaatgtgacctaacactgaaactcgtgtatcaatgttaatatacttcgttaactcatctgcacattcttggccgctcatacaaccttctgcaaccataacgatagaatgttttttccctcttttaataccctgttcaatcttttcagctacatccttaatatctgtattgacttctggtaaaacaatcgtttcagcacctacagataatccagcccataaagctaaatctccacaatcacgccccataacttcaacaataaacgttcttgcgtgacttgatgccgtatctctaatcttatcgactgattcaataatagtgtttaatgcagtatcaaaaccaattgtaaaatctgtaccattaatatcattatcaattgtaccaggaataccaattgtttgaatttctttacattcctcactaattcgttgtgcccctctatagctgccatctcctccaataacaactaaaccttcgataccacgcttacgtaaattctcaatagctttcttacgtacatcctcttctttgaactgagggcaccttgcggaaaagaggaaagttcctcctcgttgaattgtatcccctactgaacccaattcaagcttatgaatatcat

SEQ ID NO: 4370 - DNA, 3319 bp, Artificial Sequence
  Description of Artificial Sequence: synthetic nucleic acid sequence
ctagtatatgttcatacacgtgatctaaatcagctttttctatatgtgatttaccttttttatctttatatttaatctcaacatttggcgtttcagaatctccatcatttaatatttcataataaacataatcatatttatcagatttttgactttccttagatggctctttttgttttccagaacctccacatgcacttaaagtaacagttatggtaagtatacttatgatcataaatacttttttcatattaatactccttttctccattcataaattcataataaattataacaaacaatttttaaattattattaatgattaactaaaaccttatttttaaaaattcagtttaaattaagcgccatggataatccgaaaaattaaaccaaaagcattcacttatatgtattttgataaattataaaacaagtatctttcaaacatgtaagtttcatgtctataaatgtaagtttagataaaggcaaggatatcccaaccatcctacaatttaaatatagataactaaaggagtgagaggatggctattttaacagcaaatcaattatcaaaagtatatggtcacaaacaaaaatatcgagctttaaataatataagtttttcagttgaaaaaggggaatttgtagctgtcatgggtccttctggatcaggtaaaacgactttactcaatgtgttaagttcaatagatactatttcagaaggaactgtggaagttgaaggcaaagaaattaataaactgagccacaaagaagtggcaaattttcgaaaacaacatctcggttttatttttcaagattatagcgttttacccacattaacagtaaaagaaaatattatgctaccactctcagtacaaaaattccataaatatgaaatggaacaaaattataaagaagtggctgaggcattaggtatttataacctgggaaataaatatccaagtgaaatttctggcggtcagcaacaacgtacggcggcagcccgggcattcgtccataaaccaacgattattttcgcagatgaacctactggcgcattagattctaaaagtgctcaagatttgttacaccgtctagaagatatgaataaacaatttaattcaaccattatgatggtgacacatgatccttcagccgctagttacgctgagagagtcattatgttgaaagacggtgatatacactcagaaatctaccagggtaacgattcaaaacaaacattttaccaagaaattatgaaacttcaaaccgcattaggtggtgtcagtcatgacatttaaccaacttatccttaaaaatttaagaaaaaatattaagcattatggaatgtttctattttcattattgattagcattatactttattttagtttctcaactttaaaatattcacatagtattaataactcagattcttcaactattattaaaaatggtgccacaattggtgccacaattctttttatcattattgttgttttcttaatgtatgcaaatcatttatttattaaaaggcgtacaaaagagtttgccttataccaactgataggtttaacacgtggaaatattctaagaatgctcaatatagaacaactagtattttttattgtaacaggaattttaggcactttaattggtatttttggttcaaaacttttacttgttatcgcttctaaattaatgaagttaaacacacatatctctattggctttgaaccccaagctatacttattactatcgtaatgttagctgtcgcttttttattgataatgatacaaaattacattttcttaaaaaaacacagcattttagctttgatgaaagacaattataccccggaagctacccaaaaacggataactacgtttgaagcaatcggcggcattttaggaattataatgatagtatttggatattatatgtctactgaaatgtttggtgtttttaaagccttaacaactgctttgattacaccttttagcatacttttcttaactattgttggtgctttcttattctttagaagttctgtatcacttatttttaaaacactaaaacatattaaacatggtcgtgtaaatatcacagatgttgtctttacatcatctatcatgcacagaatgaagaaaaatgcgatgtctctcacagttattgctatcatttcagctttcacggttagtattctttgcttcgcggcaattacacaatctaatactaatacaactttagaaatgacctctccagatgattttaatataagccagaataaaatagctgcgcaatttaaacataaactagatcaaggaaatttaaaatatcatcagcggacttatgaagtaatcattagtgctgcatcctgaggcgtagcaacaccaccagctgcaaaattaactacaggaagacgtccattatctttaatttgttttaatacttcataaggtgcacccaaatcttttgcaaatgtcataatttcatcatcattcataactgttaagcggctaacttcagaattaacacgtctcatatgacggacagcttcaacaatattaccagtaccaggttcacctttcgtacgcaacatcgccgcaccttcaccaatgcgtcgtgctgcttcacctaagttacgacagccacacacaaaaggaactgtaaattgatcttttcttaaatgatattcttcgtctgcaggcgttaatacttcagactcatctatgatatatctatatcatttaatgctggtgaggttgtgggtctaatcggtccttcaggtactggaaaaacgacattaatacagtgcattttaggcatggagaaaattgatggtgggcaagtcactattcaagaacatacaatgccgaatagaaagatattatcaaatattggttatatggctcaaaatgatgctttatataatgatttaactggacgtgaaaatttaacgtttttcgcaagaatttatatgcgtgataaagaagatattaaaaaacgtgtgaacctatgcagttccatggttcaattagacaatgatttagataagaaagttgaaaacccaaagtaattttgatatgcttaatcaaatctttacctttaacttcattatttgcaatagcttgtgtttctgtaatatcttcaacacttttacagtggaatccattttatttaacgaattgtaatactaaatgagatactaaaaaatttcataaaatagactcatgatcgatactcttataaaagatgttattcaacaataaaagcagatattagagccgacatgagctgtatcaatcataaattaa

SEQ ID NO: 4371 - DNA, 3126 bp, Artificial Sequence
  Description of Artificial Sequence: synthetic nucleic acid sequence
attacgttactcatagtaaaagttttacctgtcccagttgcacctaataaggtttgatgacgtttcccttcatttacgccatccacaattttttgtatcgcttgtggctgatcaccttgtggctcaaattcagactttaacttaaatggaacatgttctaccattccaaaatacgcctcctaatattgttatcatttataaagattttacacatctcaaatcaattactttttcatgaatatcattttctattttaacaaattctataagaacaatacaaacatttgttcgcttttgaaatataacatttataatgcttattctaaaacaagagctctaagatgatttcttatgtaagaaattgtcttagagctttatcttttttagctgcttcaacagcttttttgatagcttctggtacctcttgcgctttaccagtaccgaaacctacacgaccatttttatctccaacaaccactaatgcagtgaaacggaaacgacgaccaccttttacaactttagcaacacggttaatcgtaacaacgcgttcttcaaattctttagtttcttcttctctacgagccatgaatgtgtccctcctttaattaaaattctaatccattttctcttgcagcatcagctaaagctttaacacgtccgtggtataaatatcctccgcgatcgaagacgatttctttaatacctttatcgttagcttttttagcaatttcttgaccaacagtagttgctaagtcaacttttgaagctgatgtgtttgcaatatctttatcttgtgatgatgcttgagcaagtgttacgcctttaacgtcatcaataatttgtgcatagatgtgtttgtttgaacgatacacatttaaacgtggcttttcagctgtacctgataatttagtacgaacacgagcatgtcttttcaaacgtactttgtttttatcaattttactgatcatttcaatactcctttctttagagtgttatctattatttaccagttttaccttctttacggcgtacatattcaccttggtagcgaatacctttacctttataaggttctggaggtcttacagaacgaatgttagaagcaatcgcaccaacttgttctttagaaacaccagatactttaacagttgtatttttctcaacagcgaaagtaatgccttcttctgctttaatttcaactgggtgagagtatccaacattaagtactaaatctttaccttgcatttgtgcacggtaacctacaccaacaagctcaagtgttttttcgtaaccttgagaaacacctagtaccatattatttaataaagcacgagttgtaccatgatctgttctgtcttctttagaatcagatggtcttacaacttcaacagtgttttcttcttgtttaaatgtcattctttcatttaaagttctttctaattcaccttttggaccttttacagtgacatgacttccgtcaaaagttactgttacgtcactaggaatgtcaataattttcttaccaacacgactcatgttatggcacctccttattatttattaccaaacgtatgcgataatttctccaccaacattacgttttcttgcttctttatcagtgataacaccttcagaagttgaaactaatgcaatacctaagccatttaatacttttggcacttcatttgctttagcgtaaacacgtaaacctggtttagaaatacgttttaaacctgtgataacacgttcattgttttgaccatatttcaagaataaacgaataacaccttgtttatcgtcttctacatattcaacatttttaatgaaaccttcactctttaagatttcagcaatttcttttttaatattagacgcaggtaattctaatttctcgtggcgaaccatgttagcgtttcttacacgagtaagcatatctgcgattggatctgtcattgtcattgattgttgcctcctttcagactcttattattaccagctagctttacgtacgccaggaatctgacctttgtaagctaattcacggaaacaaatacggcataatttaaatttacgatacacagaatgtggacgaccacagcgttcacaacgagtatattcacgtacagcgaatttttgttttttttgttgcttagcaaccattgaagttttagccactttattagcctccttttagagattatttacgaaatggcataccgaagtttgttaacaattcacgagcttcctcgtcagtgttagcagttgttacgataacaatatccattcctctaacttttgttactttatcgtagtcaatttctgggaaaattaattgttctttaacaccaagtgtgtaatttccacgaccatcaaaagctgttttagaaacaccttggaagtcacgtacacgtggtaatgaaactgcaatgagtttgtctaagaattcatacattctttctccgcgaagagtgactttcgcaccgattggcataccttcacgtaaacggaatgttgcaactgattttttagcttttgtgactaatggtttttgaccagtaattaattctaactcttcaacagcattgtctaaaactttagaattttgaactgcgtcacctacacccatattcacaacgattttctcaatttttggtacttccatcactgaactataattgaattttttcactaagttttcagtaacttctgtattaaatttttcttttaaacggttcaaagtggatcctcctttcaactagttattaattattagctttaatttcttcgcctgattttttagcgatacgaacttttttaccatcaactgttttatatcctacacgtgtaggttcatttgttttaggatctaataattgtacgttagaaacatggattgctgcctctgtttctaaaattccaccttcagggtttaattgagttggtttttggtgtttttttataacgttaacaccttccacaacgacacggtctttttttggttcagtagctactactttaccttctttacctttgtctttacctgcgataacttttacgttgtcaccttttttgatatgcatgtgggcacctccttaaattatgtgaatttatttgattggtattata

SEQ ID NO: 4372 - DNA, 2782 bp, Artificial Sequence
  Description of Artificial Sequence: synthetic nucleic acid sequence
atggcatggtcttgaagtatattacattgtatatggattataccacgcagcgttattcataggttatggttattatgagcgttggcgtaaaaagcatccaccacgttggcaaaatggtttcactacagctataagtattatcattaccttccattttgtaactttcggattcttaattttctcaggcaaatttatttaataaaggagtaattaattatggaatttagagaacaagtattagatttattagcagaagtagctgaaaacaacattgtgaaggaaaacccagatgtagaaatctttgaagaaggtattattgattcatttcaaactgtaggtttacttttagaaattcaaaataaattggatattgaagtgtcaattatggactttgatagaaatcgatttcaccttcctacatttattcttttattaacagtaggtgttattggttcgtttttaacttctgatttatttaacctatacgtgatgtttgaaattatgcttcttgcttcgtttgtacttgttacattaggacaatctgttgaacaattacgtgcagcgatagtatatgttgttctgaatattttaggttcgtggttgcttttattaggaattggctagtaagttcttcttgtacgattttaataacctgttggccaggtgttaaagattgcatgacatcagaacctagcgctcgttctgaaacagtcttaacaaattccttaacaactttgaagttaacatcggcttccaataacgctaatctcacttcacgcatcatcgttttaatatctgcttctgttactttccctttaccacgcattttttgcatcgtggcttgtaagcgatcggataatccttcaaatgccataacgtttgccctcctttattataatgatcactactctaattcttctaattgagtgatatattgtttaagcaactcaggttgattaagtgattgtttcattaaattatataattcacgacgtttctcgaatctttggtatagtcgtaatttcgattcataatcttctactaaatcgccagttcttcttatattatcataaactgcttgtctactcacttcaaatgtatcagcaatttcacttaaagaataatcttgtaaataaaataattcgagataatttttctgtttatttgtaagcaaactttgataaaaatcaaatagataattcatacgcaatgttttaactaaatcattttgtcccattttagttaccttcttcagattcaacggatgaatttctagagatttcttcaggaatatcttcattttgttctatcatatcagcaaataatccatatacatagctttcaggattaaacggttgtaagtcatccattttttcgcctaaaccaacatatttaactggaatgtgtaactcatttcgaattgctaatacaataccccctttagcagtaccgtctaatttagttaaaactatacctgagacatttgtaacttccttaaatgaacgtgcttgtgaaagtgcattttgaccagttgttgcatccaaacataataaagcttcatggggggcatcaggtattgcacgattaatcacacgtttcattttatctaactcttgcattaaattagatttattttgcaagcgtcctgcagtatcacaaattaaaatatctacgcctttattttttgcggcattaatcgcatcatatactactgctgcagggtcagaaccttcgttttgactcacaacttcaacaccaacacgttctccccagacgtttaattgttgaattgctccagctctgaaggtatcaccagcggctaacattacttttttaccttcttgttgataacgataagctaatttaccaattgttgttgttttgccgacaccattcacaccaaccatcagtatgacatttaaacgtccatcttcaatattcattgcttcagaatgatcgtcctcttgatgatagatttctacaatcttctcaactataacttctcttaagtcttctgtttcttgtatattacgtctttgtgcttctgtacgtagctcatcagttaatttcataacggtattaaaaccaacgtccgcagtaataagcatttcttccagagcttcgaagaaatcttcgtcaacttttctatatcgagcaattaaattatttaactgttcttggaagttttgacgtgatttttccaaaccggctttgaattttgctccaattttttgagcttcaatttcttcaaaatcttcaatcgatatcaagccatcttcgtcaaaatcagcttcacttaattttttaggtttctttttgggtttaacttgttcatcagaatcattcgggtccattgaatctgagtcactattagcatttgaatctacagtttcatctaggtctttttgaatatcatcttcacttttactagaaaatttatctttcagacgtttaaaaaaactcatgcttgttcctccttcataacctcatctattgtatttaggttgacgctaactaacttagaaacaccagactcttgcattgttacaccatataaacgatcagaaaactccatcgttcccttccgatgtgtaattacaatgaattgtgtttctgtagataattcatttaaatattgggcgtatcgtatcacattcgcttcatctaatgccgcttctacttcatctagtataacaaaaggtgctgatcgaactttgagaatggcgaacaataatgctatagcacttaaagcacgttcaccaccgcttaataatgaaagatg

SEQ ID NO: 4373 - DNA, 2833 bp, Artificial Sequence
  Description of Artificial Sequence: synthetic nucleic acid sequence
gatttacttcggcacattttaaattcagccattaacttccaatatacaaaacacctgagacaaatatcgatgtctcaggctcagttatttaagtataaacacctacttgaaaagcacacttcaatttatgtactagtcattttaatatttaaattgtggagtgagaactattggtgtaccttaatgaaatttacgtgcatatgtacaatacattaaagatgtgtttgtgcctcttacatatctttggcgttattaaaaattgacaagttgtaatatcgactttgatataaaatcttttactaaatattgacctatgttggtttcatctcagaaataaattcaatccatttgcgagttacatgattgagataagcatcttttctccatatcacgccaagatgccatgataattcaacattctctaattgaatggacgttacgttattccccattaaattaactaaactttctggaacgatactaattcctattccttgttgaatcatattagcgataaaactaatttgagaaatattagcaacagttttagggtaatagcctagccttttacagttctctataatttgatcttttaaataataatcatcatgaaataaaacaaactcttcatctttcaaatctgccatgtctactttatttaaatgtgctaaatgatggtcattacttactactaataataattcttcattatataaagaagttgaatgaaattcagtgtgatctacaggtaatgtagtaataccaatatccacatcatcattagatgttaagttctcaacaattttaccaccaccctcaatcacttcatatgtcacattaggatagagtctgtgaaactgattcaatgcatttgtaaacatttgaacattcatcattggtgataagcctattttaatatgacctttttgaacgttcacaatgtcattcatttctaaagataatttctcgaataaagctaaaaattctaaactattatcataaaatgtttgacctatatctgttagttttatttgtttttgtgaccggtcaaacaatgtaatatcgtattcattttcaatatttttaatcgctttgctaatcgttgactgtgcaatgtataagtgttcagatgcttgcgtcataccaccttgtcgtacaacttctacgaaatatttaatttgtttaatttccatttacattcatccttaattatcaacatttgattgatggatatcttctctcatagaaccatcgtttgatatctagcatttttttaacataacttcttcaattaatcatttacactaacactcattgaacaataattccgtgtatataattgttttaattgactaataccgattatttttcatcattatcatgatgctctcttttacgataacatgttttacaaatataattactttactaatttataaatcatgtgaagaaatacatgacaaataccataaatgaaaattcctgtgatattaacattcaatttatatcctttttagcctattgaaattttactatattaacttaatcactgaggaaaataatttttgttaatttttcagaatttttagacaaaatatttatcttctgtgctattatattaattatcagaatcagccaattcattttatctacatgtagatgattttttaatacgtattgttaaggaatgtttgctgactcatgttaatagtaagttgatgttatggaggtttgttatgggaagtttttttaatcggatgactcgaaaagagaatcctactgtagagtctggtgttaaagattttggcgtcatatctgttgaaaatggctaccaaatatttatcggaggtaatggtggtactgatgttactgtaggtaaattgttaacgacagttgaaaccgaagatgaagtgattcaattatgtggtgccctcatgcagtattacagagaaacaggtgtttacgctgaaagaacagcaccatggttagaacgtatgggctttgaaaatgtcaagaatgtcttattaaatcaagaaaagcaaaaagaactgtatttaagaattatggaagccaaaaaagctgttgagaatgaaccatgggaaactattgttgaaaataaagaagcacaaaaaatctttgaagttgagaaggtgtaagaatgaaagctaaagaaaagattaaagttacaacaatgaatgaaatgattcctcaaataggcaaaaaagtagttgtaaacgaaaaagaaataggtatttttctcacagataatggtgatttatatgccattggaaatatatgtccacataaagaaggaccgttgtctgaagggactgtaagtggtgattatgtttactgtccgttacacgatcaaaaaatagctttaaaaactggagaagtacaacaacctgatacaggatgtgtagagacatacgaagtagaagttattgatggagatatttacttatgtctataacttatcctggcacagtatatctaatcggtgcaggaccaggcaatccaaacttattaactaaaaaagctgaacggttaattagatcagctgacgtgattttatttgatcgtctcgtatgtatcgtcgggattttgaaaatctgatttgcgcattctagagacatatggattgcctttaacagtgaaacgtagtggtttatttgtccattctcctttattaggaataccgatacgaccactttctataatagtttttggatatttgcgatgattggtatctatagataatttgcagtcatttaaggttgagccatcaattgatcgtggaatattgaaagctttagtccactttcctggacca

SEQ ID NO: 4374 - DNA, 3497 bp, Artificial Sequence
  Description of Artificial Sequence: synthetic nucleic acid sequence
tgtatcatacacatacgatttaggtgacactatagaactcgagcagctgaagctccaatgtgctctaaagaatcatattatcgattttaaaaaattattaaattattgaatttaattttggtataaaactcttaaagtatgaattatagttttgtatgcttcatatcctctttaatttcatcaattttagtatctttggtatatggtgttttaatgttgtaggcagctttcatgattaaatgacttgaaagagggccagtaataaatacgaaaataattccgataattaattgcatatttacatatccttcagtgccaataaagtataaaaatgctccaaatagtaaaaacatcgcacccaacgtggctgctttaccagctgcatgtgctcttgagtaaacatcccttaatcgaatgagacccgttgcagcaaaggcactaatcaaagctccaagaacaacaaatatgatagagacactagtgacgatcgttgctatcatgcttgatcaccttaccttcatccataaatttagaaaagactgcagttcctagaaaagcaagaataccgaccattaaaataacgacgagcatgtatttaatattcagtaaaatactaaatagcgctatcacggccattaactgtaaaccaattgcatcaagtgcgacgacacggtctgctagagagggtcctaaaataacacgtattaacattgctaacattgataagacaacaataattaaggctgtaataataaatattttaaaaggcattatttctcgcctacctttctaacgaccttctctaatgaagatttgatattttgaatctcttcttcctttgtactgaaatcaattgagtggatataaatctttttacggtcatcactaatacctaaaacgactgtgccaggtgttaacgtaatcaagttggaaagtaaaacaagttgccagtcacgttctaattccgtctcgtacacaaagaatccgggtttattctcaattcgtggtttgagaataatttttagtacaccaaagtttgcttttattaactcagttaaaaatgtaatgataagcattataattctatatattctcactaaataaaactgaccaggcaagacacggtgcaggagataaactagaaacaaacctagtataaaacctaatacaaagttatttaaggtatagctatttgttacaagtaaccatatgacagaaacaagtaaattaattacaaactgtatagccaaactatttacctcctaacacactatgaatatattgacttggatcgacaaacgtttcagcgccatctttgatgattgggaataacgtgtctgcagataatccaaagattacagtaataactgtagatgcaacagcgatagttgttagatatttaacatttacctttttagataaagtatatccttcaacttcaccgaaaaatccttttaagaaaatacgtatgactgaatataacacgattaaacttgataaaagtacaatgataccacttagataaaatcctttttcaaaggtcgctcgaacaatatagaatttaccgtagaaaccactaaaaggtggtatacccgctaagcttagcgctgcaataaagaatgtccaacctagaataggatacccttttatcaagccaccaaaatgacgtaagtcagtcgttttagtgattttgtacatgacgccaatgagtaagaacaatgaagctttaactaacatatcatgtagtgtgtaatatattgcaccagtcatgcctgattcgttcatcatagcaataccaactaatatgacacctactgcaatcataatattgtaaaggatgattttcttcgtatcatagtaagctatcgcacctatacatccaaaaataattgtaagtaatgctaagaaaaggatgacataatgagaaaagcttactgtattattaaagaataaacttagagttctcgcaattgcgtatacacccactttagtcaatagtgcaccaaagaacgtgatgatcgctactggaggggcataataagcaccaggtagccatacgtacataggaaaaacgcctgctttagtggcaaagacaaagataaataaaataaaaacaatattgactaagccactgtcatgtacagaaagttgtgacaatctttcactaatatgagcgagatttaaagttcctacaactgaatataaaactgcaacacccatgacaaagaaagacgatgaaacaacattgactaaaatatacttaattgtttcttgtaattgtattttagtagtaccaataacgagtaaacaatatgaagacattaaaaagacttcaaagaacacaaacaagttgaaaatatctcctgttgtaaatgagccaataataccaatcaacataaacatgatagagaaataataataatgacgttctctatctaaaccgatagaacgatatgagtataaaatgactaatatggtaataataatacttgtgatgatgagtagagcgctaaaaatatcgactacaaatacaatgctgtatggggctttccaagagcccagttcaaccttgattggtccatctcgtagcacattctttaagttaatcaatgcaatgaccaatgttagcaatgtaccgacaagtgcaacatatctttttattattgggcgctttccaataaatatgagtaaaattgcagttaggataggtatgactaaagttaaaacaagcaagttactctctatcatcttctggcgctcctttcattagctcaacgttatcagtgcctagttctttatatgttctaaatgcaagaactaaaaagaaagctgttgtagcaaaggcgataacgatagctgttaaaatcaatgcttgggggatagggtcaacatagcttgatgttcctttttcaaatattggaacagttccgtgctttaaacctcccatagtaattaaaaataaatttgcagcatgagttagtagtgtagtccccataatgatacgtatcaaacttttagacaaaacgagatagacacttatagatgtgagaataccactaacaaagatcatgataatttccactattcgttctctccaatcgaaataattatagtcataatagttcctacaactgcacataaaacaccgaaatcaaaaaacatcgctgtcgtcatgtgcataggttcaagtaaaggcaaagggatgtcaaaagtgacatgtgtaaaaaagtttttagacatgaaccaacttgttaatggtgtacccacgcaaaataataaaccaataccaattaagattttaaaatctaaaggaaaaatctttcgcatcgtttttacatcatatgcaattgtaataactaataatgcactagcgaaaagcaaaccaccaacgaaaccgccaccaggtgtataatgtccagctaaaaataatgaaaagccaaacacaatgaccatgaagaaaataatcacggcagcgtattgaaagataaggttatttt

SEQ ID NO: 4375 - DNA, 2924 bp, Artificial Sequence
  Description of Artificial Sequence: synthetic nucleic acid sequence
cacactttagtttttggtggcggaaatgcaggattaatgggaacaattgcaaatactgtaatacataacaacggaaaaacaattggtgtaatgcctacgtttttaaaacaaagagagttagcacatgataaattagacgaactaataatcgtggaaagtatgtctgaaagaaaagaagttatcttaaagaaaggcgatgtatgcatagcacttcctggtggacctggaactttagaagaaataacggaagttgtatcatggtcaagagttggacaaaacaataacccatgtatctttttcaacacaaataattattattcccttatcgaacaattctacgatcaaatggtttcaaacgagtttttaactcaagaagatagagataaaatattattctcaaactcattccaagaaattgaagaatttatagaaaactataaaacaccaaaaataagaacttattaatcaaaattgctttattaacgttgaagctccgagctcttaacaatcgctaaatttgttgaattgttaaatggtttttggatgaggtaaaaataaataagtgttaaagtaagaatatagcattatcctcaatcaacatttagtcttttaatgtgaagtaaatcttcgcccaacacatagctgctcacaaattgagtggctatttttcatgctttattccaattgttttattgacgttgagcctccaaacctttaacatcaataaattttctcggcataaatgcatgtggtatgcttaatgcagtgctcatttttaatttcacagcattatagctattctccagaccactcatttttgagtggttcttttattttgcattttaagccctttctaggacattttattattccacgtataaaaaccaatgactaaaaactttttcgttcaacagagaggctataaatcattttaaaatttatttctcaacactttcagaaagaaaaatatattttttatctcaattgttcttcttagaaaaaagctaaaacctgaaaagtgggtgtataatgtaacttttgtattttaaagagcataagaggaatcctgcacaaaaatgtctccattcggtagccatttttgttaaaaacattgatttgacagtgtcaaatagaattcctttttatgcgctgaaatttgttatatggagactgaatgtatactaaaaagatactgaatagatcccaaaaattaaaaatggctaccgaatggagacataaaaatggaaccatttggtatacatttttatgaaatccttacaaaaaatattattatatttagacagcattacaaattttttaagaagtaattttgcttttcgaagtttccaattgctgtaattgaatgtgttttttctttatcaattgtttgaattaaattaccatcttcagcgttatctaaatttaaaagtttatgcttttatttaagtaattacaccgaaacttagtatacgttttcgatataaaattcattctaagtcattaacaatttctgcatttttttagggggggcttgttaaataatcgagcgaaataatggaatattttgattaatttttgtaggatttatgcgccgttttttcatatgttagacaagcgtaaaaacaaaagtagagcacacatttatgctaagaaattttaataatgttgtgaggctctctaactaaattttaagacgaatggcgtatagtgtgagcgatgaagtcgacaattctacaagttttggaattgttaagagtttcaaaaatcaatgttaatacattaatttcaactctaattctgtactcattttacagttaataaaatgagtattattaggctaataattattattacgagattaattaagtttataaaagtcttagagattttcttgtcattgtattctggacttttatatagaagcatgtaatatataaacaaatttgctgtaaacattccgaatattgaagctaagattccaaaatgaatctccataaaaatagtttgaataaaaaatacgagaatgaaattattaaaaataataagatttcataaattaacagaatcatgatttttctcctataaattaaagaaaacataaatcataatcaattttttaatgttcaaagcgaaaattattaggaaagctgttaaatgaaatgacgcaaatttaagagtatataggatcaaggaaaaacatattagactttaaaaggtgctaaaaagtattattggaaaataagtataaaatcaataattctattaaaaatgcaatagtcattagtaaactagtaaatttatttacttatagtgatgtatttaattactataataaacttgaaatatacttataaagtatctcttttgcctttagatatcatagaaatggttctggatctcactatcattacataaaatgacttatcggcagttagctattatcgtatattaagagatgatataatatacaggtcgccttaacttccataggcgaaattactatggaaggaggtggggcctgtggaaattctctttgttagtataattgcacctgtgatttcaggatgcattgttgcgattttcacgttttggctaaacaatcgtaacaaataataaggcgacatagctgcaccaaaaaatcccctcactatttccggtagtgaggggattggtgtacctatggaattctctttgttaaatatagtatatcatcatataggttaggaatgcaaagccatacttttaaaaatatcaagacctaacttatttttgattctgttataaagtttattttataatgtaatttaataaaaaagagcattctgtatgaattatttcagatataaacaatttaataaagacgtaatcactgtagccgttgtctactatgtaagatacgtactgagttatcatgatgtatctta

SEQ ID NO: 4376 - DNA, 2862 bp, Artificial Sequence
  Description of Artificial Sequence: synthetic nucleic acid sequence
atacttcatctatggacgaagtgtgggatttcccgtttattacacgtcaacttgatgaagttttaatacaatatcaaacatatgatgtgtttcttctaggttactctatgggtggccgggtagcactttattatgctatacatggtaatgaaacgctatcagggttgctcttagtgagtacttcagcaggtattcaaaatgagacggataaagtagaacgtgcccaagtggacttttcataggctaacctacgtgcataaccttcaaattttctatgattaaaactactttgatcaactatatttccatatgtaagttcgttatgagcgagttcctctgcaagtgtttcaagtttggaagtaataggcaagttacgattaattaaaatcatatctccaagccacaaaccagataaccttttaggtaagttatcacattcaatgacttcaatatagtcatgttcaattaacatatcttcatatttccccacataaaacaccctttattttcttttacttcttatgtattcagcgtaatcaagaatttcttgccattcttcgtcagttaaatcaccatcaagatgcgctgcacgatgttgtggttgttcctcaacttcttctatccaacccatcaagaaagcagggttaacatttaatgcagtagctatactttcaatagtatcatttttaagatttttaatattcccgctttcataacgttgtacagtagcttcagttttaccgatttttcttcctagttcagctaaagtcataccttgtttttctcttgattgtttcattctttttgaaaagcacatcgtaatacagctccttttactttataactatattataaggaaaactttcgtgatttgcaatattttttcttaaaaactttcgtaaaatgcttgacctattttattgattgaattttcatcagtaatgataagtctccaaacacgatctaagaatcttctagaaccatctaaacctttttcactccatgcgatcgcagcatctaaaggtcccataaacatttcatatagtcgtaatgtatcagcaccatgtgatgcaacaatatcatctggattaatcacattacctttagacttactcattttttcattgccttcgcctaaaatcattccctgattgtatagtttttggaatggttcttttgttggtacaacacctaagtcatataacactttatgccagaatcttgcatataataagtgaagtactgcatgttccacgcctccaatatataaatcaacaggtagccaatgctttaatttttcaggatctgctatcattttttcgttatgtggatcaatgtaacgtaaatagtaccagcaactgccagcccattgaggcattgtattggtttctcggcgccccttcatacctgtcttttcatcgataacgtttacgaacgcatctatatttgcaagtggagattcaccggtacctgatggcttaatttcatctgtttcaggaagtagtaaaggcaattcatcttcaggaactgtagtcattgatccatcttcccaatgtataataggaattggctctccccaataacgttgcctactaaataaccaatcacgtaatttataattgacttttttctcaccagcacctttagattcaagcaattctatcgctttacttattgccgcttcattttctagaccgtctaattctccagaattaatgtgttttccttcacctgtgtatgcatatttttgaacttcgccaccctctataacttcgataattggtaaattaaacttcgtagcaaattcatgatctcgctcatcatgtccaggcacagccattactgcaccagtaccgtaagttgataaaacataatctgctatccaaataggtaatttatcgccagagagcggattaattgcaaatgttccagtaaacacacctgttttttctttagctaagtccgtacgttctaaatcagatttttttgatgcttcattttgatacaatttgacttcttgttctttatcacttgtcgtaatttcattcacaagtgggtgttctgggcttaaaactaagaaagaagtaccatagattgtatctggtcgtgtcgtaaacacttcaatattttggtcagattgctcaattttaaatgttactttggcaccttctgaacgtccaatccagtttcgttgcatgtctttaattgattcaggccaatctaactcatctaaatcttctagtaatctatcagcatattctgtaattttgagtacccattgtttcataggcttacgataaacaggatgaccgccacgttctgataccccatcgacaacctcttcattcgacaaaacagtacctaatgcaggacaccaattgacagcaacttcatcaacataagctaaccctttattatacaactgaataaatatccactgcgtccatttataatattcaggatctgtagtattcacttctctatcccaatcataactaaatcctaattcttgaatttgtcttttgaaagtttgaatatttttctgtgtaaattcacgaggatcattaccagtatctaaagcatattgttctgccggcaaaccaaaagcatcccaccccataggatgtaatacattgtaaccttgcattcttttatatcgtgagatgatatccgttgccgtatatccttctggatgacctacgtgtaaaccagcaccagatggataaggaaacatgtctaatgcataaaatttcttttgtcctaaattatcattcgttttaaaggtcttattttcttcccagtaattctgccactttttttcaatttccttatgattataattcaacacatttcctcctaatt

SEQ ID NO: 4377 - DNA, 2680 bp, Artificial Sequence
  Description of Artificial Sequence: synthetic nucleic acid sequence
ccttaacgagagttcgctcgctcaccttagaattctcatcttgactacctgtgtcggtttgcggtacgggcacctgttatctatctagaggcttttctcggcagtgtgaaatcagcgactcgaggaaacaatttcctctccccatcacagctcagccttatgagtgccggatttgcctaacactcagccttactgcttggacgtgcactccaacagcacgcttcgcctatcctagtgcgtccccccatcgattaaaacgatactaggtggtacaggaatatcaacctgttatccatcgcctacgcctgtcggcctcagcttaggacccgactaacccagagcggacgagccttcctctggaaaccttagtcaatcggtggacgggattctcacccgtctttcgctactcacaccggcattctcacttctaagcgctccacatgtccttgcgatcatgtttcgacgcccttagaacgctctcctaccattgtccaaaggacaatccacagcttcggtaatatgtttagccccggtacattttcggcgcagtgtcactcgactagtgagctattacgcactctttaaatgatggctgcttctaagccaacatcctagttgtctgggcaacgccacatccttttccacttaacatatattttgggaccttagctggtggtctgggctgtttccctttcgaacacggaccttatcacccatgttctgactcccaagttaaattaattggcattcggagtttgtctgaattcggtaacccgagaggggcccctcgtccaaacagtgctctacctccaataatcatcacttgaggctagccctaaagctatttcggagagaaccagctatctccaagttcgattggaatttctccgctaccctcagttcatccgctcacttttcaacgtaagtcggttcggtcctccattcagtgttacctgaacttcaacctgaccaagggtagatcacctggtttcgggtctacgaccaaatactcaacgccctattcagactcgctttcgctgcggctccacatttgctgcttaaccttgcatcagatcgtaactcgccggttcattctacaaaaggcacgccatcacccattaacgggctctgactacttgtaagcacacggtttcaagttctctttcactccccttccggggtacttttcacctttccctcacggtactggttcactatcggtcactagagagtatttagccttaggagatggtcctcccagattccgacggaatttcacgtgctccgtcgtactcaggatccactcaagagagaatatgttttcgactacaggattattaccttctttgattcatctttccagatgattcgtctaacatgttcttttgtaactccgtatagagtgtcctacaaccccaacaagcaagcttgttggtttgggctcttcccgtttcgctcgccgctactcagggaatcgatttttctttctcttcctccgggtactaagatgtttcagttctccgggtctgccttctgacatgctatgaattcacatgtcgataacatgacataactcatgctgggttcccccattcggaaatctctggatcaacgcttacttacagctacccaaagcatatcgtcgttagtaacgtccttcatcggcttctagtgccaaggcatccaccgtgcgcccttaataacttaatctatgtttccaccatattttgaattgttattcaaaataaatagctaaaactagttattaatcttgtgagtgttctttcgaacactagcgattatttatgaattcaagcttatttaaaactctattcactcggttttgcttggtaaaatcttacttacttatctagttttcaatgtacaaagaatgttaataaacattcaaaactgaatacaatatgtcacgttattccctcatcttcgtagaagatgttccgaatatatccttagaaaggaggtgatccagccgcaccttccgatacggctaccttgttacgacttcaccccaatcatttgtcccaccttcgacggctagctccaaatggttactccaccggcttcgggtgttacaaactctcgtggtgtgacgggcggtgtgtacaagacccgggaacgtattcaccgtagcatgctgatctacgattactagcgattccagcttcatatagtcgagttgcagactacaatccgaactgagaacaactttatgggatttgcttgacctcgcggtttcgctgccctttgtattgtccattgtagcacgtgtgtagcccatgtaaaaaaattaaactaagaacaattgtccaaaaaggatttaatttcattaatgtatcagcatcacttaataccatgtgatcaattgcgtagatattaagtaagacaccaattaacccaagtgttgaacgtgagatgagtaggggttgactacttaattttccaaacataggttgcctatatttataaataaaaaataatggtataaacatggctacaaaatttctagctagagatttttgaaagactggtaaatcaccggccaatctaaaaaagactgacataaaactaaaacccacagctgaaatcaatatagcaataatacctttaacttttgaattcaatatcatcgcctcaatattatatgattaacgacattata

SEQ ID NO: 4378 - DNA, 2783 bp, Artificial Sequence
  Description of Artificial Sequence: synthetic nucleic acid sequence
gtgcatggttgtcgtcagctcgtgtcgtgagatgttgggttaagtcccgcaacgagcgcaacccttaagcttagttgccatcattaagttgggcactctaagttgactgccggtgacaaaccggaggaaggtggggatgacgtcaaatcatcatgccccttatgatttgggctacacacgtgctacaatggacaatacaaagggcagcgaaaccgcgaggtcaagcaaatcccataaagttgttctcagttcggattgtagtctgcaactcgactatatgaagctggaatcgctagtaatcgtagatcagcatgctacggtgaatacgttcccgggtcttgtacacaccgcccgtcacaccacgagagtttgtaacacccgaagccggtggagtaaccatttggagctagccgtcgaaggtgggacaaatgattggggtgaagtcgtaacaaggtagccgtatcggaaggtgcggctggatcacctcctttctaaggatatattcggaacatcttctacgaagatgagggaataacgtgacatattgtattcagttttgaatgtttattaacattctttgtacattgaaaactagataagtaagtaagattttaccaagcaaaaccgagtgaatagagttttaaataagcttgaattcataaataatcgctagtgttcgaaagaacactcacaagattaataactagttttagctatttattttgaataacaattcaaaatatggtggaaacatagattaagttattaagggcgcacggtggatgccttggcactagaagccgatgaaggacgttactaacgacgatatgctttgggtagctgtaagtaagcgttgatccagagatttccgaatgggggaacccagcatgagttatgtcatgttatcgacatgtgaattcatagcatgtcagaaggcagacccggagaactgaaacatcttagtacccggaggaagagaaagaaaaatcgattccctgagtagcggcgagcgaaacgggaagagcccaaaccaacaagcttgcttgttggggttgtaggacactctatacggagttacaaaagaacatgttagacgaatcatctggaaagatgaatcaaagaaggtaataatcctgtagtcgaaaacatattctctcttgagtggatcctgagtacgacggagcacgtgaaattccgtcggaatctgggaggaccatctcctaaggctaaatactctctagtgaccgatagtgaaccagtaccgtgagggaaaggtgaaaagtaccccggaaggggagtgaaagagaacttgaaaccgtgtgcttacaagtagtcagagcccgttaatgggtgatggcgtgccttttgtagaatgaaccggcgagttacgatctgatgcaaggttaagcagcaaatgtggagccgcagcgaaagcgagtctgaatagggcgttgagtatttggtcgtagacccgaaaccaggtgatctacccttggtcaggttgaagttcaggtaacactgaatggaggaccgaaccgacttacgttgaaaagtgagcggatgaactgagggtagcggagaaattccaatcgaacttggagatagctggttctctccgaaatagctttagggctagcctcaagtgatgattattggaggtagagcactgtttggacgaggggcccctctcgggttaccgaattcagacaaactccgaatgccaattaatttaacttgggagtcagaacatgggtgataaggtccgtgttcgaaagggaaacagcccagaccaccagctaaggtcccaaaatatatgttaagtggaaaaggatgtggcgttgcccagacaactaggatgttggcttagaagcagccatcatttaaagagtgcgtaatagctcactagtcgagtgacactgcgccgaaaatgtaccggggctaaacatattaccgaagctgtggattgtcctttggacaatggtaggagagcgttctaagggcgtcgaagcatgatcgcaaggacatgtggagcgcttagaagtgagaatgccggtgtgagtagcgaaagacgggtgagaatcccgtccaccgattgactaaggtttccagaggaaggctcgtccgctctgggttagtcgggtcctaagctgaggccgacaggcgtaggcgatggataacaggttgatattcctgtaccacctagtatcgttttaatcgatggggggacgcagtaggataggcgaagcgtgctgttggagtgcacgtccaagcagtaaggctgagtgttaggcaaatccggcactcataaggctgagctgtgatggggagaggaaattgtttcctcgagtcgctgatttcacactgccgagaaaagcctctagatagataacaggtgcccgtaccgcaaaccgacacaggtagtcaagatgagaattctaaggtgagcgagcgaactctcgttaaggaactcggcaaaatgaccccgtaacttcgggagaaggggtgctctttagggttcacgcccagaagagccgcagtgaataggcccaagcgactgtttatcaaaaacacaggtctctgctaaaccgtaaggtgatgtataggggctgacgcctgcccggtgctggaaggttaagaggagtggttagcttctgcgaagctacgaatcgaagccccagtaaacggcggccgtaactataacggtcctaaggtagcgaaattccttgtcgggtaagttccgacccgcacgaaaggcgtaacgatttgggcactgtctcaacgag

SEQ ID NO: 4379 - DNA, 2453 bp, Artificial Sequence
  Description of Artificial Sequence: synthetic nucleic acid sequence
ccaaatttgaagcataattaaatttataatcaatgatgtatgataattgatatttctttataatttttttaattagactgatatcatgctcattgattaccgaaacaatttcgatttgtccatttttagagataattgagccattaccaccaatcaaggtatcatccgcaaattcaggaatgactggaagcaagtctctaatgggacgtgctgaagcaaatattacattgtgattagcttgacgtagcttgaaaagtcgttgcttaatagatgaatcgatggaacatccatcaaaacaaatcgtaccatcaatatcaaaaataaaattcattattagtcactccaaaattttagaatgatttaattatagcatatgagcacgaactcaaatttaaatattttcatttaaattgtataaacttgaaacttggcattccaacttgttaatatatataaattaacaaatatagattgctataatgaactcaactaaaaaagtaaataagagaaaactctgtagataataaatataaatgccatgtagatttaactgtaaattgagtgaagggcttttatgattatatatacaacttcctataatatatattatgtaaactaaaataaagaattaagatacttagccatatagatgaacatatgcttcatttatgttgttacatatactatatattttttatttggaagtatatacacgtatcaaaagttatgtattgatcaagagttctttattcattaaagacttaaatatttaattctttgtatttacaagaacgttcctttaattagcatcagtaataattaattacgtattacataattgcattacgtatttatttatcatgtttaaatgctagtaagtagtatcatgataaatattatacgttacaacaacttagcaatgtaattgctattatcatgaatattcatttttatatttagataaatcatcaaaaatcttttgttacaacacccaaatacacaactacaaaatttaatataagagaattataagtattattattaaatcgcagtataaatatacctttagtttacataatgtttttataatcttctcaccgcactaaaagaattacatttaaagcattttagtattacaaaattataattcgtatataaaaaatatattggcgagcattattgtatagttttcataatatgctatgattaaatatgtagggagcaacatgaattttcatcctagactcaaacatcctacgccgagtgctttagagtacacaatccttctctaaagctaaacgagcagattggatatctcaatctgctcgtcatatacttgtatcatttatttttactttttcaatttattacgtatgcgatctaatgtattgaataaccaatatttcactttattgattggtttatagaaatcaccgattaattcctcaatcctaacattaaaacctctcttaaagcgataaacaccatagtcttcactgttttcagtaaaatcacctgataagccatagaaattatatctatcataaccgttatcaaaacaataattaatcatgtgccaatgcattgcatatggtcccatatattgattatatttttctgaagaccctccagagaaatagttcacttcatatgcattagcaaagtatactcctgaagctaaatttaaaatttcgccatctgtttgacgtaattcactagcttgaagcaattcttttttatcgtgatcaatttgtttatctaactcagctattttctttaactgtttatctgttttattttctttcgccatcatatcatcacgtcgattttctttatcatttagtgattcttgcaaatgttgtatatattcatttaaatctatgtaagctaaaggaactaatactttatcgccataatgctctataaagttatagaaataatcgtcagttttagaagcaaatccagttctagcttcagtctctcggtataagtctaagaataaatcaaattcatccttactaagaaatctaactttcacaccgtagtttatcgctttattaatatttcgttttctttgactatcaaactctttccttagagatgcaggggttttgccttctaaatctaatacccccatccatctaacttggctggaagaatcatattgggttgtaaatccgtgatgatcataaccatgtgatttaaatagatttactaaagcatcatttttttctgttaaaggattaatatctttatcataaacttgatacaaccagtaaggatctaattttacatataagcattgatgttgatgtaaatatttatcaagctcttttaaataaaaatccactaaacctaaatctgaatagtccattacagggcctctattggaataatacacataactgcccattgtagggattttagaaaacaggctagctgctatcactcta

SEQ ID NO: 4380 - DNA, 2530 bp, Artificial Sequence
  Description of Artificial Sequence: synthetic nucleic acid sequence
tcccccataaaatataagcacctaaagctaaaaatattccttttttatactccgaagacaccattaaccctccctcaatataaatgattaaaaaatgagactcattccaacccattgacagttatgtaatcaagtttactaataaaacagcaatatttacacatatctgtttgtgtacagcttttgattttataatcaatcttcattaaaataagcacgtttaatacttggtacatcaattgtttgagacatatctataaagtattgtttttgccactcttgtgtcttgtgagcgacacgatttaaatctttctcccatgtaggatacactcgaaaagccattttccctttagatgcatgatttcttaaaatacctttatgaaaaagtacatgttttggaaaaataaactgacctacttgagaatcatccatcacgtgtacaattaatttcccaggaaatgactcatagtcaaatgctcgatttttctttgttttatctttttcccaaagcgataaaaaatatccttttttctttgttgttttcttagctaacctacttttaaatacgtagccattaatattgaaattgtatgcctcataagattgattccactgttcatctcttataattaatgattgttgtaagttcattatctttatgatgtgattcaacaatcgaactgaagacttcatcttcatactcccctttacttttagtctcaaagttcaatacatcgacgcaaactctgaaatacttttataataaatatttaaaatgagcatatatttattccctttgctttatttttaatctacgatatcgattaagtgtcgcaataaactcctgctttctaggtagcgctaaatgaccaggatgcccctgatgatttgatataacatctaatccgtgtttctcaatccgttgatacaaactattggtcaattctacaatcgtacttttgtcatctagcaattcattttttacataacttaacatcatcgctaaaccttgtgtttgactgtcatcgacaagttgttctaagccagaaatatgaatagtttccttaccatacgttactacattcaatcctttagctttaaagcgatcacgtttccctttttgattaaaactcgctctcaacggaattcttgatagaatgtgaccgaactgatagtgagaagaaagccttctttgataaccatctgactgcgcaatgtctttagcatgttgcgtaacatctttcgacacatattcatccatcatcaatacttgatctgccacgtcaaaataatctcccgaacctccaacgattagaatagtcgacacgttatggtcgtcatataatgcttttaccttattagaaaagggtgtaatcggctctttttcgggagcaattaaacgttgcatacgaccatcacgaatcatgaaattcgttgcagatgtatcttcatcaatgagtaacaatgatgcttgtgattctaaagcttccatgacatttgcagcttgagacgtactaccactcgcattttcagttgaaaaatgtgtagtatctttttcacctggcaaatgatcaataaatggctggatattaacattttgaatacttcttccgtcttcagcacgaattttcattgcatcttgatttgtaatcacatattctctaccatcaccagcaatatgattatatacacctcgttctaacgcttcaagtaatgttgatttaccatgataaccgcctccaactattagtgtaatgcctttaggaatacccatacccttaataactttgccactcgatagtttcattaaaatctcatattgtttaggacttttaaattcaatagcgttattcatagggagatctgaaacaccactttttcttggtaaaatagcaccatttgctacaaatgcaacaaggtcacgttttactaactgttgtctaatctcctcttgatccatcattaattcaacttgttgttgcaattgtgaaccattaatgttgcgataacataaggcatgttctactatttgaggtaatacattaataagtgtatgtcttgctattctacctaatatggtacgtcctcgtgctggtaatccaacttcaatacgtgcttcaatttgatgattcttaattactattgcggtacgctctaagatttcttggccacaactatcaatttgaattttacttacttttttatcttgggctactattgattgaatctgcttatgaaacacgcgcgttaagtaatcactcacagcccgttgtttcagttcagaatttaataaagaatcaggaaattttgcttgttggcgatctataacaacactcatcttagatggtggcgcaaatggatcagcttggatatgattaatacgtagtttaaataaattaaattcgtataggtcttttatttgcttatacgcaccgtacttttgaccgtctaacgatgttaaagtctgctcaagtgcttgggcacttttcatattttcaacctccaacgttcatatatcattactattatt

SEQ ID NO: 4381 - DNA, 3187 bp, Artificial Sequence
  Description of Artificial Sequence: synthetic nucleic acid sequence
aagaatagagatagaaattgtacaatgtttcattgtctcgaaaagttctttgtggtataaacgctactttatgtttagaagaaacatgttttaatatatctaatatatcttccaataagaaacgttctgtcaacacttcgtttttatattcatcagattcaatatattcacagttattccatgtaaacattttagaacttaaatctgaaaaaatatgttgaggtttatatgacataccaacgttactcattttttgaagtacgctttctatagtacttcctgttaaaatagccgtaatgacattgtttttagtagttatattctgtaataaaccttccatttctcttaaataaggcatattcgcttgatgcgtatgatgtttgtagtaagtttcatcaaagtcgaataatattaagcgttttgtcatcttcattcctccagtatcattttttaaatgataaataataattacgctctaaaaaatgataaaaaaccacgaaaacaggataaaattacttgttttatttgtagaatttttgattgaaatcttctgtgttggtagtaggacttaaaacctccttatgtatgtctcaaggttatatatataatatcaataaaataactttgtcatctatctataaacaatttcatacatgctgacgttataacaactttattcaacaatgtttttcaaatcactatcactcatgacttatcataataaaaataaagcatccttcactttgcgatgagggatgctttatgaattttcacatacaaaatgaatctacagactattcttttttattcaattctttatcaagttttacaagtgttggtttcggaatatgaatgccttcttcactaaagtattgtatgacctctttacgaagtaaacgttgtcctggaaaatgcattccaggcttaacatgtgctaaaagtttaatcaccatttcattgccatcaacactatctaaaccaagtaaatctggtgcggatacaaatatgtcatatttattctttaatgtaggtaaaaatgttaataatttctcttctatcactttataattctcatttggagaaatcggtatcatcacaataggtgaaacatctgtagcagaataattaactatttcactaatcataccattaggtaatgtataaatttctccagtatctgattgtatacgcgttgatcttaaaccaatcgttttaaccgtaccttcagcaattgttaccccagatgcattaatttgaacataatcactcacatcaaactgtccttcaaatatgataaagaaaccagtaataatgtcttttacaattgtttgtgctccgaaaccaacggcaacaccaacaactccagctcctgctaaaattgctgatacactaataccgaaacgtgaaagtattgacgtaaggacaataaaccatacgacataacttattaaattttgaatcaatgtggatagtgtttcacttctcttaattttatgacggttctttttcttttcattaacgttgaaaaatttagtaactaactttcttgatatcgcaattacaatcatacccatcaagatataagcaagtataattaaaagattaaccaaaagattttgatagaactctattttcatcattggctcaaatagtttatataatgtgtccttaaactgactcataataacaacatgacctcctattgttaaaacaattaatattttcaatgtataaatctttatagataatgagcagtaagtcatttctaaatataacacttataaataaacatagcacccttcactttttgatgaaggatgctttatgaatttctatataaaaaatcatcttaagagtactgattttttagtcacttccaggtgtaatcataaaaccatccatcgaataacctttgacattttttcaaactattattattcgcattttcaatttcagaaatgattttggatactgcgctggtttattcatagtttctaattatattacctggttttattttatattcagtactgttcatgattcatcacgctcagtcggtttaaaattaatactatccgtaaaaaagatgttttctttcttattctctacaaaggtaaattctaggtctctatgacctacggatgatccttttaagtcgccatccccttttaacaatagtttaggtgcttttttagttgggatgtcatatctttttcttaattgttgtacgttatattcattattactcaattgatatttcgcagaataactaggaacattaggattgtataaaatatccccgtttttataatcctttaagtttttaaaatttccatattgcacaaaaaatttgaagttttcaatttctttttttaacttatcatcagatattggctttgttggaaagatcttattatggttcatttttacagggtatttcttttcattctctatcggtctaccattactatcatcttttatcttatctattaaaaaataccctttggctgttctagtgttgcgattgatatagagaaccatacctcttgaggtcataattttaccttttggctgttttgtcatttcagacctaataatccatgttcctttgtcatctttatcaaactcttcatcacgatagccctctttatcataaaagtcttctagatttttagttggatacacgtctaacattttattaaagttttgtttgatttccgtttctttgctatcttctttatttataaaaccacatcctccaataaaaatcgttaaaattaagaaacttacaaatactattattttgcttgaatgttgcatattttcacatctttctatttatcataaattggtaaacattatataaatcaacttcttaaacatctacatattaccaaacaatgaacatataatacatttaagatggaattcaaattttattttactttcataattaataaataaaacccgcctcacttacgatacgcttctgcgtatcagttaatgatgcggtttctttttctagtttttatttttaatactcaaatgattctgtatacgtcggtgcctactgaaatatattttttctaaagaaggtgatatcgtaaaatcacttcatgaaatagcacgtgatgtcacaaatattgttatagaatatatgaattgatagataagtagctcaaaatga

SEQ ID NO: 4382 - DNA, 3206 bp, Artificial Sequence
  Description of Artificial Sequence: synthetic nucleic acid sequence
cattactacgtgcttcagtctatgggaaattgaatattatgttcccaatggtagcaacaattaaagaattccgtgacgctaaatcaatgcttcttgaagagaaagaaaatcttcttcgcgaaggttacgaagtttcagatgatattgaattaggtattatggttgaaattccagctaccgcggcacttgctgatgtatttgctaaagaagtagatttctttagtataggaacgaatgacttaattcaatacacattagctgctgaccgtatgtctgaacgagtttcatacttatatcaaccatataatccttcaattttacgattagttaaacaagttattgaagcttctcataaagaaggtaaatggactggtatgtgtggtgaaatggctggagatcaaacagctgtgcctttattattaggtttaggtttagatgagttctcaatgagtgcgacttctatcctaaaagctagaagacaaatcaatggtttaagtaaaaatgaaatggctgaactcgctaatagagctgttgaatgctcaacgcaagaggaagtcgttgatttagttaaccaattagctaaataattgactttaaaaagaataatttaagagtctaggacataaagttcttagactagaaaaagacaatttctattgaaataatatagaaattgtctttttataattgtttaaattatattcgtttgttgaattgctatttttctacaaaatatgttctggaatatttttattttttgttaatatattatatttatttaataaatttttaaaagacgaggattttgtttagctagtctgaaaatttgaaattagacacgcataaaataataaatagaaattaaggtgtaatattcaattcatcattcaatttttccatatctacttgatacattggcatccctttaagcaaaataaaaggtgtagcaaaagcatcgtaatccatcatttcatttttatatttttggtttttgatatttttttctgtaaattttatatttttatttactaaataatttttaataaaagcacaaggtggacagtcatcttgtgtataaataatcactgtatcagtcatacattacatcctctcatgatttatcttaccacactatataaaaaatgagacgtcatttcaactttgtgaacgttgtgtgaaaagacataaaatcgtcacagtgatttaaagcaatttaatttagttcaatagtactaaggacttataattctaatcacttgtcactccaataactaaaaaaaatgaagggtgattaatagatggattcagtagaaatagctcgattgttgacgggtatgacacttgcagtgcatatcatatttgcaacaattggtgttggtatgccacttatgtttgcaatagcagagtttattggcataaagaaaaatgatgcgaattatatcacattggctaaaagatggtcgaaaggctacacgataaccgttgctgttggagtcgttacaggtactattattggtttacaactttcacttgtctggccaacatttatgaaaatgggcggtcatgttatcgcattaccactattcatggaaacttttgcattcttttttgaagcaatctttttaagtatttatttatacacttgggaaagatttaaaaataaatggacacattttttcatatctatacccgttattataggaggttcattctcagcattctttattacatcagtcaattcatttatgaataccccagctggttttgaaattaaaaatggtcgtatggtaaatgttcagccattagaagcaatgtttaattcatcgtttatggttcgtgctttacatgtagttgcaactgcaggtatgacgatggcgtttatattagcagccatcgcagcgtttaaattattacgtcataatcatacagaagatagaacataccatacaaaagctcttaatttaagcatgattgttggattcatcaataccgttctttcgatgattgcaggagatttatctgctaaatttttacacaaagttcaaccagataagcttgcagcatatgaatggcattatgatacgcaatctcatgcgaatttagttcttttcggtgtattaaatgaaaaaacacatgaagtttcaggagcactagagattcccggattacttagttttttagcagataatagctttaatacaaaagttaaaggtttaaatgaatttcctaaaaatgaattacctcctatgatagtgcattactttttcgatttgatggtatcaatgggaatattctgttttatcatttcaggactatatatgttatttttaattgttaaaaagttacgtaaatatgtaactagtaatatgatgttatacgctatcttgttaactggtcctgcatcaatgttagcgatagaatttggttggttcttaactgaaatgggtcgtcaaccgtggattatacgaggatatatgcgcgtatcagaagctgctacccaggcggggggaatcacattagtaacgacgctattcggtttactatatcttttattactagttacttcggcttatgtactaattagaatgtttaaaaatcaacctgcttataaagatgtagaaaaagtgattaaagagagaggtgaaacaaaatgatttacgcttatatcggtataacagtattatgggtatttttattttgttatattattatcgcctccattgattttggtgcaggatttttcgcattgcattctaaaatgacaggtaatgagaaaaaggttaatcatttaatccatagatacctcaatccagtttgggaagttacaaatgtctttttcgttttcttttttgtaggatttataggtttttttcctgattctgctaaatacttaggaacagttttattagtacccggatcaatagctttaattcttatttctatacgaagtagtttttatgcttttgaaaattatggtcaagatactaaactgccctggattgtattatatggtttaacagggctgttaattccagcttctctagcaactgctctaacaatttcagaaggtggttatatctatgagcatggcacacatattgatttagactggatacaattattattaagtccatttgcatggtctgtagtattcttagccattgtttcagttctttatatttcatcaggttttttaacatattatg

SEQ ID NO: 4383 - DNA, 2896 bp, Artificial Sequence
  Description of Artificial Sequence: synthetic nucleic acid sequence
tcaaaaatttctggtttaactggataaaattctccgtttacacccttaacgatataatcgccaacatcggctatcatttccccttctaaagtatttataagtaaataacctttagtatttttgtacttaaccttagacctcgcccataacaatatttctaatacactatctttgtctgtaaattgtataaactcaatttctacaggtttctttctagcttttttaacgctcattcccactcactccttacctagtactcttttaatctctgctactatatctttattctcctgtgcttccatatgcacctctgtcgctttcattttcaaaccaatcaacctgtttgggtgtaggatatacaactggcgctacaactaattgcgctaatctttctcctttttctactgtgatatcttcattacctatgttatctgtgatgatacctatttctttgtggtatgtttggtctattgttcctagtgctacacgcaatttagttttaagtgatttaccagatctaggtcttacttgcgcctcatacccataaggcagattaatcgctatatctgttttaactactttagttgcgtgtgcaggaatgttaatcgtttctgatacgtataagtccaatccactatctgtagaatttgctctcttcggcatagtcgcgttttctgataataatttaatttctaatgtatttgtcatttattgttcctccttaaaatcttctattgtttcttttatattatctatgaaatcgtctatactttttcttatatctttaccactgcaattgttaggatctttcatagtttcgtgtcgcaaatttaccaatctcactaaaaccataccaaacatttcgtttaaactatctattttacttgctgccttcgcgtctttattcacttctctatgaaacccaacatcttctaacaaatcttcgtcgtttatctctatctttaaatttaatttcaaaacattacactccaatattttttatagtcatttatttattactcccagtatttgattaaaatatgtgagtaatgatcgtcataaacttccgcccaattaacttgataaccaactacttcatattctttaatttcatttattcttacaaattcgtttaccacctcatgtatttttgttgatgaacgttcaaattctttaatcttccacatcactaccacgctccaaatcacttaataaattttgaaactcgtgtgttccgtcgagttcgtccatgcgtttaagaagttctcctaattgaaataatgaactttcatcttctttaccatcagccatttttgtcatatgaagtattatcggatattgaaaaagcatttcttctttcaactctagccatgcatgtttataatctttatccttcatggttggcctccttatatttatcgatgacttgagatatataaactgcaaaatcttctgccgaacaatcttcctctgttatctccaatatctcatcaaacgcctctgcctttcttttcgtttctgccatatcattgatgagttcatcacgttgtttcttgtaagcgtcacgttctttctttaattgttgaatatcatcagtccatttttgtacttgtgatccatgtacaacgaatttcggatcttctgccatttactcgtcctccagtaaattttcatcttcaaacacattacctacaacactacattctttaaaaaatattgttttttcagatgttggcaaatcataataatatttatattctttagcaatcgtactgtcctttaccataaagttttccaaaaaaatacctttaaccttatctataattacctgtgctctatttattgtttcaactatagcttcatcatcgaatggataacaaaaagattcatcctcaaattcgatgatgtccccctcgtatatctctacaccgttcttatcttttaagcctgttgattgcattaatacataatctctaactaaatcctttgtaattccgtatatcgaaccgtcattaactttaacccattcatcttcgatataaatcgtttctacgttccacattttattttctgttttatcccacgctctaaatttaatcaatgatttccccgtccttccaaattaaagtcattgtatttccttctcttatccaaaattcttcgctaagatcactttttacttttgaaataggtacatttttatgctttaaataattgtttaattttgtgtgttcataaaaacatttaattactgtatcctctgtgatctcttccagtgcgacttcttcttcaacttctaatgtgaacgcttcttctttttcattgtaagtaatataattttctgtttttaacttcggtttaagtaagttgttgtatccaccttctgtttctatataaagagtaaactctgtttcttcaagatctaatagatactttataaattctttaggttttaacgttactttcttttttatttttaccattcatcatgcactccttatttattggtttggtaatccataactcattaactcgttatataatatgtcatctcgtaattcatctattaaattacttacctctttatgtgtcatagcttttatttctttacgactataatcaataagtgaagtttgtttttgcagacccctaacatattccacttgtttatctgttgccattccttacacactccctgttctttttaatatcgttctcactaactttcatcgtcactctgttttctgctaccttaaccacaaagccgttgatacctaacttgcgtaattcctgttgtatctgggtaggtgtcttgcctcgtgtgttatatctgtatcgttggttgattgtgtcggatagtatcatgcatttaccttctcgtactcatcagcccaca

SEQ ID NO: 4384 - DNA, 1613 bp, Artificial Sequence
  Description of Artificial Sequence: synthetic nucleic acid sequence
actgaatgcttttcaatagattttacttcaccttcaattttacctttatgttctccacgagatttttgaatttccacgatgacagtatctccatctaatgctctattgattttagttggtggaataaaaatatcatccatctcgtcatcttcaggtcttaagaaagcaaagccttttttattttgacttaacgttcctttgattagttttgaatttgttttgttggattgtttacgttgatatctgtctgttcttgtacgttcaattaaaccagactgttctaattcaacgagtattttaattaaatctctaaatgagtcggcactgtttaaacctaacgcatcttgaaagtcagatactgacatgggttcatagtcaggttgttttatcatttcttcgatggattgctttaaattcattatgcccctcctttctctcctacatctttattttttactctgtccattccaatgattctaaaaattgatatacatcttcaaagactttctctttttctttatcaatggtaatcacatgacctgaatgttgataccatttgatttctttttcatcagaatcgacatgattatatatataatttgctgattgaggatcaatcattgtatcttgttctgcttgtacgacaagtattggatcaattacttcatcgacatgttctttaactccatttagagtgtcactcagttctctcagggtttcagttggatgaaattgttccatttcttgatcaatcgtttgttgatctttgccttcatattttttaaagttacgtgcatattcaagaaagccttcataaatcgaaccttctgttttattctccataggtgcacacatagttataatccccttcacatcacgatttaaacttagttttaatgcgaaggcgccacctaatgataaaccagctactgctatttcttcgtaaccttgatctactaaataatcataaccatctaaaacatctttaaaccaaacaaaagggctagattttaatatttcttctgggggcgctgcatgtccttcatattgtggagcataagatgtatagccctttttttgaagataacgcccaagttgtcttacatcagcagagttacctgtaaagccgtgaagaagtaacactgcacgtttcccttcttcaaaaaagaatggttttggtagtttaatttgcatgattaaaatccctctcccttatagtaagtactcaatttatcctaaataagttaagtatttcaatttatttcatatatttaaaaatctcttcattattatcaaattgacttgataaatcattattccctttaacatatgatttaaaaacatgattgtctcaattataaaataaaaaagtccgacaagtacatcgtcggactcaggctgataatacttaatagcaaatgtgattaatttgccctatcatttatcagtcttggttaagattcatttacttcattaaaacaaatataatattctctacatacctaagtaactaatacaaaacataagtacaaagaataaaatagctaaaattattgttaatctatgcaagaataaatcgacgccacgttgtttttgtttaccaaacaattgtt

SEQ ID NO: 4385 - DNA, 1488 bp, Artificial Sequence
  Description of Artificial Sequence: synthetic nucleic acid sequence
atgatggctgcttctaagccaacatcctagttgtctgggcaacgccacatccttttccacttaacatatattttgggaccttagctggtggtctgggctgtttccctttcgaacacggaccttatcacccatgttctgactcccaagttaaattaattggcattcggagtttgtctgaattcggtaacccgagaggggcccctcgtccaaacagtgctctacctccaataatcatcacttgaggctagccctaaagctatttcggagagaaccagctatctccaagttcgattggaatttctccgctaccctcagttcatccgctcacttttcaacgtaagtcggttcggtcctccattcagtgttacctgaacttcaacctgaccaagggtagatcacctggtttcgggtctacgaccaaatactcaacgccctattcagactcgctttcgctgcggctccacatttgctgcttaaccttgcatcagatcgtaactcgccggttcattctacaaaaggcacgccatcacccattaacgggctctgactacttgtaagcacacggtttcaagttctctttcactccccttccggggtacttttcacctttccctcacggtactggttcactatcggtcactagagagtatttagccttaggagatggtcctcccagattccgacggaatttcacgtgctccgtcgtactcaggatccactcaagagagaatatgttttcgactacaggattattaccttctttgattcatctttccagatgattcgtctaacatgttcttttgtaactccgtatagagtgtcctacaaccccaacaagcaagcttgttggtttgggctcttcccgtttcgctcgccgctactcagggaatcgatttttctttctcttcctccgggtactaagatgtttcagttctccgggtctgccttctgacatgctatgaattcacatgtcgataacatgacataactcatgctgggttcccccattcggaaatctctggatcaacgcttacttacagctacccaaagcatatcgtcgttagtaacgtccttcatcggcttctagtgccaaggcatccaccgtgcgcccttaataacttaatctatgtttccaccatattttatcacgaacagggagtgtaagagcatgacgcgacagagaatcgccattgatatggatgaagtgcttgctgatacattgggtgctgttgttaaagcggtcaatgaacgagcggatttaaatatcaaaatggaatcattaaacggtaaaaaattaaaacatatgatacccgagcatgaggggttagtcatggatattttaaaagaacctggattctttagaaatttagatgtaatgccgcatgctcaagaagttgtaaaacaactcaatgagcattacgacatatacatagccacagcagcgatggatgttccaacctcttttcatgacaaatatgaatggttatt

SEQ ID NO: 4386 - DNA, 1680 bp, Artificial Sequence
  Description of Artificial Sequence: synthetic nucleic acid sequence
ttgaagggaaatcaattatgtttactgcttctcataatgttaatgaacatagatttgaacgcgtaagtggttggagagatgtaaagaattattttaattcaattgaaaaatagagaagataaaagtcataggtcactttatttgatggcctatgacttttttattaaacatttttaaagttatctttcataatcatatgctgtttcgataatgcctttaagttcactaattagcggttcttttggattagcagttgtacattgatcttcaaatgctaattcagccattctgtctatagtagagtgaagaagctcttcagttacgccttgtgattttaaattcatatcaataccaactgaacatcctaaatcatacaccgcattagctagagcatccactaattcttcagttgtattacctttgagtcctaaaaattttgcaatgtcagcatagtcagtatctgctctaaagaaatcatatttaggaaacagtgcatgtttttgtggatctttggcattatagcgaatgacatgtggtaataaaatagcatttgttctgccgtggggaataccatattcaccaccaattttatgtgcgatagaatgagaaattcctaaaaaagcattggcaaatgccataccggccattgttgaagcattatgcattttttctcgtgagtgtttgtcattttcttgaactgatgattttagataatcaaaagttaactttattgcttgtaagcttaagcctcttgtataatctgaagccatgacagagacgtaagattcaatggcatgtgtcaaaacatccattcctgtatctgcggcaacatctttaggtacacttaatacgaattgtggatcgacgatagcaatatcgggagttaacgcataatctgctagtggatacttaacgtgtgtctcgctatcagtaattactgcaaaaggtgtcacttcagaaccagttcctgatgtcgttggtatacatataaattttgcgtttttaggtttggtaattttataagtacgtttacgaatatctaagaacttttgttttgccccaaaaaatgaagtttctggatgctcaaagaacatccatattgctttggctgcatccattgccgaaccgccaccgagtgcaataatagtattaggttggaaatttataaacatttctaaccccttatagactgtatgagttgatggattaggttcaacttcgttaaacactttgatttgtggttggttttctcggcgtctcagcacttgttcaactatatcagtataaccaatattaaccattcctggatcacaaactatcattacacgttcaacattatccatctctgtcaaatacataactgaattttcttcaaaataaactttaggtgggagtttaaaccattgcatattattacgacgttttgctattgttttaatatttaataagtctactgcgcttacattatgagaaatagaatttctaccatatgaaccacaacctaacgtgagtgaaggaatgagttcattatacatatttccaattcctccgacagcagaaggtgtatttaccaatacacggcaagctttcatttttagaccgaatttttgttgtaattgactatcctcggtgtgaattacagcagtgtgacctaaaccaccaaattttaatatgtcttca

SEQ ID NO: 4387 - DNA, 2675 bp, Artificial Sequence
  Description of Artificial Sequence: synthetic nucleic acid sequence
taattggactgtgactcaccatgcctcactaaataaatttccattctgtctcctcatttctgacttagctacttttacttaataataaattaatagataagccaattaaaacaaaccctacaatataatcaaatatagccttgaatctcggtctgctgaataataatttaatatattgaaagatgaatacacaaaataaaaaccataagcatataactacaacaactgaaaaagcaaataacgcaacttcagatttcatatgtatattaccgttagaaaggaactgcgggaatatactaacataaaataataaagccttagggttaagacttgtacttaaaaaaccttgtctaaaagaagtgatataactcacatttctgacatcagctaaagcttgtttactaaaatcaacagaactgtgcgcactcaaaatacttttgattccgagataaataagataacaagcacccaatatttttattgttaaaaaaacaaagtgtaaactcgtaagtatgtatataattccaaaaatagctaatgaagagtataaaatatgccccgtagtaataccaaatgcagccataaaaccattcattttacttgaattaatagtgtttttcattacaataatgaaatctggcccaggtactataataatcaataatgtgataatgataaatgtaattaaaccgtccataagaaacctcctcgatgtcgttttacaattcattattacatatcaccaatggcgaatgaaaccgaacagatgcctttaaatcaaagtaataattttctcaattttgttggaaattttaaaaatcaaaacctttaatgttgtcagataaatagcaatctgataatattaaattgtagttatttagtaactacaaagtcttttatattcatgaacataatactcctggatggcgtaacccagcgccatccttttttatgttttataacatgaaaaaagcacccacaccatttttattggtttggatgctttgataactataattaatgtaactcaaacgattagacatcatcaacatctatcattgagttacgtgcgtatagataaacacacatgctttaattgtgttaattgattactttcaaataatcaagcaacacattttctacctaaattaaacttaatctatacttattatttttttcttagtgcttttaaaattaatgaaataataaagattaaaataattgaacctaataatgctggaaagatgtgaattttacctaattgtggtccccattcacctaaaatcatagtaccaacccatgatcctacaataccagcaataatatttcctagaatacctcctggtacgtctttacctaaaattaaacctgcgatccatccaatgataccgccgacaataatcatacctattaatccaaacataattgattgtctcctttacttatatattttattcactagtatgagataccccatgtcaaaaatgattaaacgttttgtaggaatttttattttactgatacaagctattttgtttttattttttcaatatttattattatcaacctcaatcctattatgttaagctattaaagatgactaaaatgaactatttataaaaatatttaaagtaggtattttacatgcaacataaaaataaatttcaacgtattaaccaaattatacaagttataggtttcctttcatttttagcaattctcactatcattacacttaacttttttataaaaggacacttacaaggtcattttgaaataggttttaatattcaaagtaatcaagtctatgtagtaacgacactaatcatagttacaatcatctgtactatattatcagctattctaaacatgctttctaataaaaaacaaaattacaaacattaaatgttaatgatggtgctacaacttcaaagtataaccccataggtatactaattgataaaatgacatcttgatgtcaacgtagatactttcatcatgaatagaagatgtggcacataaatttacatattttatataacttaagaactaaaagacatatagagattgaagaattaactactcaacttaacaagaaaaatggcacgcataacaaacctcttcaaatttgggaatggtaaactattatcatcaatcaatatttaaagatgttatgcacctaaccatttttcaacgcataatcttaactcattttgggattcaatctcataacattactgaaatatcgtcgaaggatatgtatctaaaaatctagctttcaaattcactgctttttctgccctttttaaatattccaaaacacaaaaacaaccccgtaagcctatacttacggggttttacaataaataatatattattgttcttctttaacatatggtaataaagccatatgacgagcacgtttgatagctgtagtcaacatacgttgatatttcgctgaagtgcctgttacacgacgtggtaaaattttaccacgttctgagataaaacgttttaataattcagtgtctttatagtcgatgtgtgtaataccatttgctgtgaaatagcatacttttttacgacgacgtccgcctcttcttggtccacctgccatggttaactgcctcctttgactcattttattttattcgttcattattagaatggtaaat

SEQ ID NO: 4388 - DNA, 3333 bp, Artificial Sequence
  Description of Artificial Sequence: synthetic nucleic acid sequence
tgtctttaacgataatagattgtttagattttcctttaactgtaatcttatgatttaaatgaatatctattaatcctgttgatgattgtatattcgttattttagcttcatgacctttgagatgtgagttcatcattagtgatgttgtattagtagacatatcagaaccatttttactcttcatgacgtggtcgcttaatgtttttggattgattacttcataagtccgctgatgatattttaaatttccttgatctagtttatgtttaaattgcgcagctattttattctggcttatattaaaatcatctggagaggtcatttctaaagttgtattagtattagattgtgtaattgccgcgaagcaaagaatactaaccgtgaaagctgaaatgatagcaataactgtgagagacatcgcatttttcttcattctgtgcatgatagatgatgtaaagacaacatctgtgatatttacacgaccatgtttaatatgttttagtgttttaaaaataagtgatacagaacttctaaagaataagaaagcaccaacaatagttaagaaaagtatgctaaaaggtgtaatcaaagcagttgttaaggctttaaaaacaccaaacatttcagtagacatataatatccaaatactatcattataattcctaaaatgccgccgattgcttcaaacgtagttatccgtttttgggtagcttccggggtataattgtctttcatcaaagctaaaatgctgtgtttttttaagaaaatgtaattttgtatcattatcaataaaaaagcgacagctaacattacgatagtaataagtatagcttggggttcaaagccaatagagatatgtgtgtttaacttcattaatttagaagcgataacaagtaaaagttttgaaccaaaaataccaattaaagtgcctaaaattcctgttacaataaaaaatactagttgttctatattgagcattcttagaatatttccacgtgttaaacctatcagttggtataaggcaaactcttttgtacgccttttaataaataaatgatttgcatacattaagaaaacaacaataatgataaaaagaattgtggcaccaattgtggcaccatttttaataatagttgaagaatctgagttattaatactatgtgaatattttaaagttgagaaactaaaataaagtataatgctaatcaataatgaaaatagaaacattccataatgcttaatattttttcttaaatttttaaggataagttggttaaatgtcatgactgacaccacctaatgcggtttgaagtttcataatttcttggtaaaatgtttgttttgaatcgttaccctggtagatttctgagtgtatatcaccgtctttcaacataatgactctctcagcgtaactagcggctgaaggatcatgtgtcaccatcataatggttgaattaaattgtttattcatatcttctagacggtgtaacaaatcttgagcacttttagaatctaatgcgccagtaggttcatctgcgaaaataatcgttggtttatggacgaatgcccgggctgccgccgtacgttgttgctgaccgccagaaatttcacttggatatttatttcccaggttataaatacctaatgcctcagccacttctttataattttgttccatttcatatttatggaatttttgtactgagagtggtagcataatattttcttttactgttaatgtgggtaaaacgctataatcttgaaaaataaaaccgagatgttgttttcgaaaatttgccacttctttgtggctcagtttattaatttctttgccttcaacttccacagttccttctgaaatagtatctattgaacttaacacattgagtaaagtcgttttacctgatccagaaggacccatgacagctacaaattcccctttttcaactgaaaaacttatattatttaaagctcgatatttttgtttgtgaccatatacttttgataattgatttgctgttaaaatagccatcctctcactcctttagttatctatatttaaattgtaggatggttgggatatccttgcctttatctaaacttacatttatagacatgaaacttacatgtttgaaagatacttgttttataatttatcaaaatacatataagtgaatgcttttggtttaatttttcggattatccatggcgcttaatttaaactgaatttttaaaaataaggttttagttaatcattaataataatttaaaaattgtttgttataatttattatgaatttatgaatggagaaaaggagtattaatatgaaaaaagtatttatgatcataagtatacttaccataactgttactttaagtgcatgtggaggttctggaaaacaaaaagagccatctaaggaaagtcaaaaatctgataaatatgattatgtttattatgaaatattaaatgatggagattctgaaacgccaaatgttgagattaaatataaagataaaaaaggtaaatcacatatagaaaaagctgatttagatcacgtgtatgaacatatactaggtgatggtaataaaaaaccatatattgtaaaggatgggaagaaaattcatgtatatcgaccaccatatatgatttatggtgatgatgatgttgaaggcaaagccgtttcgaaagatgaagttacgaagtaaaagaaaggtgacaaaatgaaacagctattatttaaaacaagttgcgtaataatggtacttctcacgtcttctttaagtattgtcagtacatattctcatgcaacaacgtcaggaggaacgagtagttccagttcggcaagttctagttcaagtagcagtgcagcttctgcatctagaggttcaacttcttcaagtacaagtatgagtcgttctagtgcaataaatgcgtctcgcaatgcacaacaatctagtcagcgtgctgcccaacaagcaacaaaatcaagtcgtgtaacagcaaccaaaaataaaggacaacaaagtgtatcaagacaaaaagcacaatctcgttctttgatgccgtctcaaagaccttatgattcaagtgcaccatactcatctcaatatattgctacaacttattataataattggttattctattatatttttgcacattcgtttttaaatcaacatgaaaagaaaaacagtgtagatgctcagtttaatatgttgaaacaacaaatgaagcctcatgagaaactttatactgttactgtaaagactaaacaaggaaagcgtgtcgttgttgtacctaaaaaacaatatgacaaaattgaaaaaggaaa

SEQ ID NO: 4389 - DNA, 3373 bp, Artificial Sequence
  Description of Artificial Sequence: synthetic nucleic acid sequence
atttatagaatatgtgtgaagtcgttcaattattttctataaaataatttcatccgtgtgattaactgatgaagcaacaacgtataataattataaccaaaacatctaatctataatgataaataaagtacactgttaaagttttaacaggcaattaaaaatggtcatttccttgttgcttttaaggaaatgaccatttttatttatttttatattgtttgcgtatcaaaacaattatttttgttggtaattcaacgccgcttctacaaatgatttaaatataggctgtggacgattaggtcttgataagaattcaggatggaattgacatgcaataaagaaatcatttttaggtatttcaataatttctactaaacgaccatctggacttgtacctgaaaataccataccgttactttctaattgttccctaaactcgttattgaattcatatctatgacgatgacgttcttcaatatcgtttttattataaattttctctgccaatgtaccttctttaatgtggcaaggataaagaccaagtcttaaggttccacctaaatcttcaatatctttttgttctggtaataaatctataattggatatggtgtacttggatctaattctgctgaatgcgcaccttcatagcctaaaacatgacgcgcaaattcaacagttgccaattgcattcctagacaaatgccaaagaatggtatgttattctcacgggcataacgaatagctgcaattttaccttcacttgctctgaatccaaatccaccaggaactaaaataccatcaacgtcggataaataagcctcaacattatcatcattgacctcacttgaatcaatccattttaccacaacgtcttttttaaatggataaccagcatgcttaagtgattcaacaactgatagataagcatcttgtaagctcacatatttaccaactaaaccgattgtaattttaccatctaaattattaacggtatttaatagatgtttccactcatccaattgcgtttcatacttggcatttaattgtaaacgttgaataacaatgtcgtccatattttgcttactaagttgtaacggaatttcataaagagaatctgcatctctacattctataacactttcctttttgatatcacaaaatagggcgattttgtctttcaaatcttgtgtcatttcgtattctgtacgtactactattaaatcaggttgaatacctagacctcgtaattctttaacactgtgctgtgtaggttttgttttcatttccccagcagctttaatatatggtagcaaagtacaatgtacatacattacattttcacgacctaagtcgcttctaatttgacgaatggcttccaagaaaggtaaagactctatatcacctgttgttccaccaatttcagtaattacaacatccgcattagtactctcaccagctaatagcaatctttctttaatttcgtttgtaatatggggaataacttgtacagtaccacccaagtaatcaccacggcgttcttttttcaacacatgtgaatatacttttccggcagtaacatttgaatatttatttaaattaatatctataaaacgttcataatgtcctaagtctaaatcagtctcagcaccatcgtctgtaacgaacacttcaccatgttgatacggactcattgtgcctgggtctacatttaaatatggatcgaatttttgtattgtaactttaagtcctctatctttaagtaatcttcctagagaagcggctgttattccttttcctaatgatgacacaaccccgcctgttacaaaaataaactttgtcattgtctgacctcctgtaaaatttagtaaactatttaatgattgataaaatctattaaaaactgtgagtaacctatgtatttaacaataataatgaaataaatttggtatattactcaacaatttgattcacttttacatttcattatgaatattaaaaataaaaaaatcgctccctctcacagcaattgtaaggggagcgtatctatttaatacacgtgtcctaattaaaggagcccaaataaaatactaccaccttttaaataaaaataaaagtcccactttaatgtttctgttataaagcgagacatatttttaaattaaaatatagttacttgattaatcattaaagtcttcggcgtcttcaaaggcttcttcttcaccttcagcaatatcttcgtcttcgtcttcatcaataacgatatctgcttcattcatttcaacatcatcttcatcattatctgactcgtctaatgtttcttgatcatctgtttgagcaggaatatcgtcatcttcatcagcgtcgtcatcacctaataatttaaggttttgatcttcttcatcttcgtcatctagaatatcgaatttttgaattgttggtgcgattttttcctcaatatcatctacagagtaccaatcacgtagaccccaaagattttctcctacatttaaaaaacgaccatcagtgtttaaatcggtatagaattgtacgattcgattttcaatatcttcatactcatatccgcctaaagatttaaattcatcaataatatcatataaattcatcgttgtttgtttatcatttaataaagtataggccatatcgatgaatgatttctcatcaaccatttcttttgtgtaatcttgaattttcatataaaaatacttcctttcaaaggattttctttaaattaacgtcaaataatcatttgttaatagtaacaaaaataaattataaatgacaagttgtgatttagcaatcactgttaataattaatatatttttcaaaacgtgtataatcctcagtttcctctattgctacaaaattactattcaagcacaatggttttaattcattacgttcgccatataaagtaattgataaaacttcaatgtcttcaaactgtttacgtatatacgttggtaattggcgtaaagcactttctgcaattccctcattcctatttttcttattaacttcgattgcagaaatattcattttattatcattttgttctagtgcaataaagcctacctttacatcatctttaagcaaattaatcacgtgaatatcatcattatatgtgacttccccctcttttagccttaaagaagatacatgttttgaatctaaatctaaataataaagtctttctttcccaataggtccttcttcttttgtagctgtatgcataaaacctgcacgttcataaacgttccaagcactttggttttcagcgtctactactaagtataaatgtgtaaaatcaggaaataatgcttgaacatactctggtaaaaacatcatcattt

SEQ ID NO: 4390 - DNA, 3110 bp, Artificial Sequence
  Description of Artificial Sequence: synthetic nucleic acid sequence
aatcatgacaccattcactaacatgaaacctgtaatcagccactgcgatgtattctcattaatatttaactcacgcataatgtgtggcaaggctgtattaagtaatgtttgatttaaaatggccacgaaagcgctaattaacattacagatacaattaaatttcgcttagtcttagacaattcataactggccataaacatatactcctttttattcaaatgataattccatattcaaccaaattttaattacagatacaaacttaatgctcagaataatatagagatttcttattattttggatgccattatagtgtaattatttaaactttgaactgcttggtaaagcatgacacaactgcaatttttattagcattatcaatcattaccattaaataattaaattattttctatcgttaagttcaattattccatattaaattctcttttttacagaagccttactttttattattcaaatttttactttcaggataaaaaacttctttacatacaaataaaaatcctataataatcataattacccaaaaatgtatattaacatgtacatagtgtatgtgaactataaaataaaacataattgtagtaacaatataggagatgagatgaaagttaataccttgaaagtatggattttttggaagattctttttaaaataatccattaaatgctcaattgaaaataaagtaaaatagcctaaaacgatataactaccgtagtatattaaattatcataaaagcctttattgtaactaaaatcgcctaagtgtaaataaataaggatgcgactcaaaccgtacaaaccaaagcctaaaaatgttaaaaaaattgctccggaaataacaaatatagtgagaacaataagtgttactaataaatgatatgatttattttttaaaaatttcatcacttttgtcctcccctacacttcgtatacatatatattatcatgtaaataagagcatataaaattttaagttatacaacatttctgcttctcatctcaacttatttcattttattttcacaaaaaagcaagtagatatggtatatgcatttctacttgctcataattaaaaaatcattctgcattttttctaagattgaatagtattgcttttatataatgtcatccacattacaattaaacatactgcaattattaagactaatcctaatacattgtgtaaattagaaccaaataaaccaacatttagtgcatacatatagcccataatcgtagatccgactgacgaacctaaattttttgtcaatgcataaaatgacatcatctttttcatattttttggagaagtttcctcttggacaataacactatcttttgtataaatataaccaaaacttaaacctgcaaaaacaaccgcaaaagcaataagcaatgggagttttaagccaaacattatcatcagactactaactaataaaacaaaaaatgagcaaatatataatgtttttctagtaaaatgcgcttctattttagctaaattgaaattaagcgtaatccaagcaacagacaacgggaatattacaaatccactttgtaaaggtgataaactaagtttttcttgtaaatatactggtatatataaattatatcccatcagtgttatcgcaataagtaaatccgttataaaaactagaactattgatatgttaaattcttttgttggaagaaatggttgttcgatactattttctattttaaatagtagccataaaacagctaaagctaaaataattgagaatatgttaaaaataatatgatgttggttgagtaaaccaaacattaataaagctataaagatataaaagataatcaatccttttatatcaaaacgactctgttgtacttgtgtctcatcaggaaaatgaaaagtcataagtacaagtattattgccactatagcaataggaatattgatatagaatagccaatgccatgaagcaaactctaaaatcgcaccacctaataatgggccaataatactcgaaattccccaaacacttccaactatacccataattttatatctcaaaggaatttcaaaagccaacttaggaactatttgtgagagtgacatcataactcctgctccaaaaccttgtactgttcgagagataattaaaaaagtaaacgtctgacttaatcccgacattaaactacctaaggcaaacaataatacccctacaacagcaatgtaaataattttaaatctagacataagttcaccaacgatagggttagctatgactaaagcaataaaatatacggtaaatactaatgaaactagattaccggcattcaaactattttttattgttggtaatgctaatgaaataatagatgtttctatagctgccataaacattattagtatgagtgccattacagtaatgatagacttaagattcataaaaaaactccctttttattggatttagctattgaaacgtaaaattgactttttaatatgatgatactcatacaccttttgttttcaataaaaaagagtgagatcagtacatctcacccctttataaagtctataaagttaaaatttcaacgcaatcatgtgtttatttgaagtataatgatatttctaaaaataatacttatttttctctctaacttataatgacagaatgttgcaatcacataaaataaaaaatgcctatcatatgtaagaaagaagcaagaacaataaatatatgccaaatcatatgaaaataaggtttatttttttgggcataaaaccatgctccgatagtataagataacccaccaagaaatataaagaaaataaaccaccatgatgttcgcataataataataggtaaaaatatgatacctacccatcccatcaccaaataaacaatgagacttaatctatgattgactttagttgctattgatttatacaaaatcccccataatgtcgttccccataataatattgtcacgagccaacctaaccaaccgccgacaacacttaacaaaacaggtgtgtatgttcctgaaatagccacataaatcatactatggtcaataatccttaatatatat

SEQ ID NO: 4391 - DNA, 3736 bp, Artificial Sequence
  Description of Artificial Sequence: synthetic nucleic acid sequence
aaatattaataatggcacacatgttcagcaagcaattcttcaaaaacatcttttgaaatatctcttcttaattttccatcaaaagtgactgatatatcaccagtttcttctgatacaacaacagtaaaagcatcagaaacttctgaaattccaactgccgctctatgtctagttcctaaactttttgatattttaacactatctgataatggtaaataacttgcagcaacggcaatcttacttccttgaattatcattgcaccatcgtgtaatggcgtattagggataaatacattagttagtagctcttgagatatgtctgaattcatcggtattccagtttctatataatcctgcaaacctgtctctttttcaaaaacaataagcgcaccaatgcgtcgcttagccatatattgaacagctttagacacagattgaatcaacttttcttcatcgcgactataagtattcgtatatcgttttaaaaaacttcctctacctaattgttctaaggctcttcttatttcaggttgaaatatcacaatgagtgctaaaacaccccattgaattacaatatcaaacaatttagatgttgctgttaagttaagaattttactgatttgctggccgataacaatgacaactattccctttaataattgaattgctttagtacctttaaaaactgtaatgagaagatacaacacataccaaacaatcagtaaatcgagtaaactagtaataatttttatagtactcagattttgaaaaaaattggaaaaatccataacatctcctccgggtaatacttttccatattgattattataccaatcattattgacactgtcatacgacaaaataacattttagaaaaattcttaaataagaaataaaagtaaaaaataccaacaaataaaaaaaagacaccttcgattgaagatgtctagaaagtgagccatagaggattcgaacctctgaccctctgattaaaagtcagatgctctaccaactgagctaatggctctaatggctgggctagctggattcgaaccagcgcatgacggagtcaaagtccgttgccttaccgcttggctatagcccaagaatggtggaggggggcagattcgaactgctggttaattaccggatttatgcttgttaacggtattatgattccactcactgcttttttaatggataaatattcgacacgccatttatatattttctcaatggctatttttcttctaggatctattgtagcggcattttcacctactttttctattttaatgatatctcggattatccaagcgattggtgccggcatccttttaccattgatgcagtttacagtatttacgttatttcctgctgaacaacgtgggtttgcgatgggattagcaggtgtggttgtacaaagtgcacctgctattggtccaacgttaactggattattcgtagatttatttagttggagaatgcctttttatcttgtttcagcaattgctgcggtagcttttattttaggtttcttcttcgtagaaaataatacaaaaacaaaagacattgttcttgataaaatttctgtagtttattctactttcggctttggtttaatattattcgcatttagtagcgtgagtacgtttggtatcacctctctacctgtcattgtgacatttgtactcggtatagccattatcataatttttacaacgcgtcagcttaaattaaaacatccattgttaaatatgcgtgtgtttaaaaataaagtgttcacactttcagctgtttcttcaatgcttgtatatattacgatggtaagtcctgcgttactcatacctatctacattcaaacaggtttaggtcaatcagcattactatcaggtgttgttgtacttccaggcgcggtcattaatggattaacgatggtttatacaggaaaaatttttgataagcatggtattaaagtgcttgtgatacctggttttatcttactcattagtatgacattcttatattcattccttactacaggaacgccatattggtttgttattcttgtttacactataagaatgattgcgttaggattattagttatgcctcttaatacagttggactgaatgcacttgagtcagatgatgtctcacatggtacagcaattatgaattccttacgcatcattgcaggtgctatgggtacagcggttagtgtgacgattctatcaatagtggcaaaacagtatacagcttcacactcgacaatgtcaaaaatgaaactaacacaagaagcaactgtacatggtatagatgttgcatttatttttactacagtattaatcattattggatttatcttagcgttattcataaaagaagaaaaaaatcattaattattcaaaaaaactgtataagagagaccgaattatgggatgaacctgggacacaaatcgatgttccaggttttttataatgtaaaaacagtgatgaacttctgggcattaacagagtgtatttcaatagacaaagcaatttggctatcgactatcaaagagtggcacaatgaaggcattatgaatatatgtcttatacttcagctttttagtagaaaatcaaatggactaatggtggttaaataaaaaatgaattccatcataatttctaaattcaagcctctccatccagcacttaaataaactgatgaaatatttttatttaaaatgaaatcgattatcgagaaattgaaagaactttttaatcaattcatttaatatgaaacttgcatttaaatataaaaaagattatatatagtatgtgatgcaaaattgaattgcgtttaatttatatgaggttaatcactttctttaaagatttaaaaagtattatatgttttaacagagaaagaaggatgaatgtgaagcaattaagtacaactttaaaagtccgattaatatgcgatttttttcaaaatattatagtcacggcatttttaccatttattgcgttgtatttaacagatatggtcaatcaacatttttcagggctttttttatttgggcttgtaatgataaattttccaatttctttgatttcaggtcatattattgaacgtttacctaaaaagacgttaacacttagttatcaatttatattaagtttaatgctcgtaattatggcgatttcaatatcacaacatacttttaagatcattttattttgtatcgcttacacaatatttagtatcacaataggcatgcagcaacctataatggacacgattattatggatgcgattacgcctgaagttgagcaatatatttataagataagttattggctgacgaatattgctgtcgcctttggtgcgctcataggtggattgatgtatggggcacataaatctatgttgtttttcatcgcttttgtcatttacattatggtttttatagcacttatcgtatggttgcctaaagatttaaatattgttactcagtcgcacacacatcatgctaatgagaaacaattctccatgggtcaaatattaaaaagttataaaccagcatttaaagatacaacatatctacttctaattataggatttagtattttaacaatgggtgagttatctgcatcatcgtacatttcagtgcgtttaaaacaagagtttgatccgatgatattgttttcgttacatatcaatggcgttaaaatgtattcacttctatta

SEQ ID NO: 4392 - DNA, 3625 bp, Artificial Sequence
  Description of Artificial Sequence: synthetic nucleic acid sequence
tacacggtttcaagaacccaacatactacaaacgaatttcaaaaggcgagagtaaagctgacttgttttttatacggatttaaaatccaagagtctggacagtctacttctctctataactataaaaaatagctatgaaaaaatctatcgtcatagatttcttcatagctaatcttagtatgtttttattttcataattaattgttatgttgctaattttggatggttttcaatctaatcagcttcgttagtcacataatattgaatgaactaggttcaaactaaaagtagttgagtgttatcaaaagaaaaatgtaactaagctattaactgtttaggtagtaataaagtactgagtaaaaggcagaatacaccaccaataatgccggcaataatatctgtagggtaatgaacgcctagatacactctagaagttgatattaataaaatgaaaagtgcgcataaaccgattaacacgcctttagagatacccgaatcatgacggtttattacatatatagcgcttccaaagaatgaagttgagcccatagcatgaccgcttggaaaactaaagcctgaaatgtcaattaaacgcaataatgttggacgttccctatcaaagatattctttaatagtggattgagtgtactagataagctcattactattacaaagaataatgtctcaatcttgaagcgttttagcataaggtaagcaactaataataaggatagcgcaaccattgcccaaacttcaccaatttttgttacacctaacataatagatgtggtaatgaaactttcagatgaataaataaattcatatacttcgttatctatccattttccaagccttgattcatgaaaaaaagctattataccaaaaataagtgtaaaaacaataagcaatgaaatgcgtttccatcgattcattataggtgccccctacttgtttaatgcatcatgaataattttatcaaataaatcttctttcgtgtaactctcttgatatgtttccatttgtttaataatagattcacgatgtaattcaatatcatttaattcttgcaataagttaacttctgtaagttgatcttcaggaatatgacgaccataacccttagattcaaagtttttagcattatcaatttgatctcctcttgattgatcaagtcctaaggggatgagtaacatcggtatacgtagcgttaaaaattcataaattgcgttagaacctgcacgacttacaacagtatcagtgattgctaataaatcagttaagtcgtctttaacaaattcaaattgaacataaccttttttattgattgagtcatcaacaagtccttttccagttaagtgtataatttgataatcgtggagaagtgcctcaatattttgacgaatgatattattaagttttttactacctaaacttcctcccatgactaataacacttttttatttttatcaaaatcagtgagttgatatcctctttctttattcccttgttttaagtcctcacgtacagtagccccaacaaaatcagctttatcttttggaagatatgtaagtgtatcttcaaaggttgtgtatattttcttagcaaattttaaagaaattttattagctaatccaggagttaaatctgattcgtgtatgatagttggaatttttaaagaacgtgcggctataactaccggaacactaacaaaaccaccttttgaaaaaagtaagtctggtttttgttttttaagtattttacgtgcatctaaaattcctttcaaaactttaaagacatcttttgcattttcaaaagatagataacgacgtaatttaccgcttgatattggataatattgaatatcagggagttgtgactctatcatttccctttcaataccatgttttgaaccaatataaaatgcttcgtgtcctttttcaatcgaagtaggaattaaacttaaattcactgaaacgtgtcctactgttcctccacctgtatatgcaatttttgtcataattacaacctctattcttatatgtttttataatatgcataaaaaggtgcccctctatcaaaaggatgataatctatctctatctcatcaactttagtaaaaccaaacttttcaaataatccttgagcaggtttattgagggcaaatgtatctgttaaaatgacatgaatatcatgttcatttgctaagtcaatggcaaattggaaaagttcagtcgcagcacctttatattgttttgatccagctaatctgtgaataacgtatgccccatttcgattaacaggccaatcaatgtcatcataccactccgattgattttggtcgataacaataaaaccataaattgtatgatcaacgtctaaaacatatagtgttttattttcgatgtcttcttcaaaatgctctttcgcgggatattcatcatcccattggttgttgttgaattcttccataatctgtttagcctctttgactaattgagtaatactaagtaaatcatctttagttgctaatctaatcatcttactaaaacacctcttttttagaattttaacgagtggtaacaataaatataaatcatgttgatacttttaagactcaatcaattaacgaaaatctgaaaaagttaagaaatgattgggattataccttaataggaataactttttattaaagttgtattttcaacaaatcagaattatcagatatgattaagagcctgtacatatactatatgtctcaggctcttaattcaaacgtgaatggttattaaatttaaggaatccaaccctttaagtatgaaattacacttaaagggttgaatacattatttttgtttaatgatttactcgcaagtttattttagtttgtttagtaaatcgtttaaaacagtatcttttttattcgctttttcaactagtttttcagtaaatttatcatttgtttttttatcaaaattgccattaacttttaaattattgtcttgttgaaatgttttaatagcagattctaattgttcgtcaaatatgtttgtttcgttatcaattggataacctaaagcttttagacctattttcatcgttttaacatttttatctttttcaccttgatgataagttttgttatctggaatgacattgagtgattggtattttggtgttgagatactaacatctggtctaattcctttaccatgaatataatggccatcaggcgttagccatttcatctctgtatatttaattaatgaaccatcactaaattcacgagtggtctgaacgatacctttaccaaatgttttagaaccgtaaactttagctttatgatagtctttcatagcacctgtaaacacttctgaagcactagctgatccctcattaactaagatggatactttcatatcttttgcttgttttagtgcttgattagaagtttttaattcttccttatccttacctttttctaattgaacgacagtatttcccttatcaataaagatgttagccatcttgactgcctcatctaataacccccccggattatttctcaaatctaaaatgatatgacggatgccttgcttatgcgctttgatgattgcagatttgag

SEQ ID NO: 4393 - DNA, 3398 bp, Artificial Sequence
  Description of Artificial Sequence: synthetic nucleic acid sequence
acaacggaattattgatgtagacatgtatatcatcgtgagctatggtgtgaaaatttctgaagtagcaagcaatcttcaatcaactgttaaatatactttatgacgaacttgatataaacttttctgacggtctaacagttatgagtggtgaaactggctcaggaaaatctatcattattgatgccattggacagttaatcggtatgagagcttcttctgattacgtcagacatggtgaaaagaaagcaattatcgaaggtatctttgatatagacgagagtaaagacgcaattaatatactagaatcattagctatagatgttgatgaagattttttattagttaaaagagaaattttcagttctggtaagagtatttgtcgtattaataaccaaactgtcactctacaggacttaagaaaagtgatgcaagaactgcttgatattcatggtcaacatgaaacgcaatctttacttaagcaaaaatatcatcttcaactattagatgattatgcagacaatcagtattcagatttacttaatcaatatcaactttcttataaccaatataaaaataaacgtaaagaattagaggaattagaatccgcggaccaggctttattacaacgattagacttaatgaaatttcaattagaggaactaaccgaagcttcactgaaagaaggcgaagtggaccaacttgaatccgatattaaaagaattcaaaactccgaaaaattaaatctagctttaaacaatgcacatcaagttctaactgatgaaagtgcaatacccgataggttgtacgaattaagcaactacttgcaaacgattaatgatatcgttccagaaaaattcgtaagattaaaagaggacattgatcaattttactatatgctagaagatgcaaagcatgaaatttacgacgaaatggctaacactgaattcgatgagcaagttttaaatgagtatgaatccagaatgaatttacttaataatttaaaacgtaaatatggtaaggatattactgaacttattgcttatcagagtaaacttgcaaatgaaattgataaaatagaaaactatgaacaaagtacatcacaattaagggaagaaattaaaacgctttataacgaagtgatagatataggaaaaaaactttctcaagaacgtaggcgtgtagcgagagagttaagggaccatattgtttctgaaatacaaaatttacaaatgaaagatgctaaccttgaaatttcgtttaaaccattagatgaacctacaattgaaggtattgaatttgtggaatttttaattagtccaaatcgtggtgaaccacttaaaagtcttaataaaatcgcttcaggtggtgaactttcaagaattatgcttgctctaaaaagtatatttgttaaatcacgcggccaaaccgcgattctttttgatgaagttgactcgggtgtatctggtcaagcagcacaaaaaatggctgaaaaaatgcgagatattgctcaatatatacaagttatttgtatttcacacttacctcaggtagcttcaatgagtgaccatcatcttctaataagcaaggcatccaatgccgatagaactacaactcaagtcaaagaattgaaagatgaaaacaaaatagatgaaatagcacgtatgatttcaggagcaagtgtgactgagctcacgagagaaaatgcaaaagaaatgattaagcaaaatcacaatatttaattatgattaccaaattcaaacataatgattttggttttgattaaatttacaaatgatgtaaaatagttaagtattattttaaattgaagaaaacaagattgtaattagaaatatcaataatgttggtacaactatttccatttcttgtttattctttttatctaatgaaaagcgtgaacattaaataaaccattagaggactaaaatacagaatttatatttgtatttttagtcttctataaatttaaggagttagaccatgtcagaaaaacaatacgatttagtcgtgttaggtggtggtacggcaggatatgtagccgccatcagagcttctcaattaggaaaaaaagtagcgatagtagaaaaatcactcttaggtggtacgtgtttacataaaggatgtatacctactaaagcacttttaaaatcggctgaagtcaatcatactattaaaaacgcgcatacatttggaattgatgtcaatcattttaaaattaatttccctaaaattttagaacgtaaagatgctattgttaagcaattgcatgaaggcgtcaatcaactgatgaaacatcatcatatagatatttataacggtattggacgaattatgggaacatctatattttctcctcaaagcggtacaatttctgtggaatatgaagacggcgaatcagatatactccctaataaaaatgtgcttatagctactgggtcatcaccacagtctcttccgttcattaaatttgaccataaacaaatactatcgagtgatgatatcctaaggttaaatacactaccacaaagattagcaatcataggtggaggtgttattggtttagaatttgcatctctgatgaatgatttaggtgctgatgtagtagtaatcgaagcgaatgacagagttcttcctaccgagagcacacaagttgcgtcattgctaaaagaagaattaactaatcgaggcgttacattctacgaaaatattcaattgaccaaagatcattttaaccaaactgataagggtgtaactattaatatttcagatgagcccgtccaattcgataaagtacttgttgcaattggtagaaagcctaatacaaatgatattggtttaaataacactcaaattaagacttctgatgctggtcatattataacaaatggttatcagcaaactgaagataaacatatatacgcagcaggagattgtatagggcaattacaattggcacacgtcggttcaaaagaagctatagttgcagttgaacatatgtttgattgttctcctatacctatcaattatgacctgataccaaaatgtgtttatacaaacccagaaattgcttcaattggtaaaaatttagaacaagcaaaaaaagcaggcatcaaagcaaaaagtatcaaagttccttttaaagctataggaaaggcaataattgaggatgtaacccaatcaaaaggattttgcgagatggtagttaacaaagatgacgatgaaatcataggtcttaatatgatagggccacatgttacagaattaataaatgaaatttcattgttacaatttatgaatggctcatctttagaacttggtttaacaacacatgcacatccttcattatccgaggtagtcatggaattaggtttaaaagcta

SEQ ID NO: 4394 - DNA, 1353 bp, Artificial Sequence
  Description of Artificial Sequence: synthetic nucleic acid sequence
gtgtaatgattaactatatcaaattggtccttattaaatttacctgctaaatgactttctgctaacgccatccctacagacatggcaaaaccttgacctaatggaccagtagtaacttctacgccatcagtatgtctatattctggatgtccaggcgtcttcgaaccccattgtctaaattgtttaagttcttcaagttctaaactaccagagacatgtaataagctatacaataaagccgaaccatgacctgctgatagaataaatctatctctattaaaaaaatctttagattgagggttaaaattaaggtggcgcgtccataaagtatacgccataggtgctgctcccataggtaatccagggtgtcctgaatttgctttttcgattgcatcaatgcttaaagcacgtatcgtatctatagctaattgatctttttcattaaacatcgttgtgtcttcccttctacaattaatatctatttttaattataacttattttattttaaaatgataaagaaaaatcagataaattagatctaaggatataactggattcaaactatatacgtagtttaactccctaaaagttaattaaaaataaattatttctaagtaaatcatcaatgactacgaaaattttcaacttatatatcaatgatgggtcgagctctattgttttatttattgtgtttctcttcttgtatcttttttaacttttcaggtgtcacatcatttccttcagggtcaatgaccttagtattttctatctgttgcttaaacccttttctaaattcttctaaatactgtcttcttaatttagtctgttctttagcctcttcattggttaagccatgttctttcttttttctggctaattcatttattctatcaatatttaaattttctttactcatttgaaacctctttcttaatgcattaaattttattattgctatcataataattaacaaatattctgttagttttaataatacttattacttgagtagaatatatcaaaaaaataagcataaccaaattgttacgctcattttacagtagataatatgaaagttaattaactaatgcgaacacagactgatcattctgttcgctattttgtttgtctttatagttttgagtagttccttgttgattatgttgatgaatcttgtggtcagtcatttcgtacgtttgttctgattgagcaccttggttaacgcttaaaaagaaagttgaaaaaataatacaagatactattactattgtcatatatgttaaaaatttatatttgtattttaaaatcatccaatatcactcctagaacatttgtttgtataagtaatttat

SEQ ID NO: 4395 - DNA, 1830 bp, Artificial Sequence
  Description of Artificial Sequence: synthetic nucleic acid sequence
tataataatctcaaacaacaataaggagtgcctatttatgagagaactcactaagcgacaaagtgaaatatatgattatattaagaaaattgttcaaacaaaaggttatccaccaagtgttcgagaaattggcgaagctgtcggtttagcttcaagttctacagtacatggacatttatctagattagaagaaaaaggatatataagaagagatcctactaaacctagagctatcgagatagttagtgaacaattagatgaggtaaatgtagaggaaacaatacatgttccggttatcggtaaagttacagccggcgttccaattacagctgtagaaaatatagaagaatattttccactaccagagcacttaacttcaacacataacagcgatatatttattttaaatgtagttggggaaagtatgattgaagctggaatattagatggcgacaaagtaattgtacgaagtcaaactattgctgaaaatggtgatattatagtagctatgactgaagatgaagaagctactgttaaacgcttctataaagaaaaaaatcgttatagactacacctgaaaatagtactatggagcctatttacttagataatgtcattgtagtaggtaaagtaataggattatatagagaaatgtaataaatttataatcaatatcttatttttaagtgtaggcctccttatattttttatatggtttaaaaaacaaataccctaggacagcaactgatgtcctagggttatttaatatattaatttcgatgccagtgttagtgttaagataacgcttttatcaattttttcactctaaaccacacctgttgcgagagaaaaattcaatacaacttctgaccaaccgattttgttttttttttcttatctaatatttctttcactttttcaagtatatcagtttgttttttattttggaattcatcaataacataccaaaaaatgggccaatagcggttcccaacaccaaacttaatgagaataaactgataccttcacttttgcgtgtaggtggtgtaatatatgctgctattgttcctgtagcagttgtagcaaccgctgttgctaagccgttcattaaacgcaccatcattaagaaccaaacagaaccaggtataaaataaagtagctgtgttactactaaacatattaaaccaaaaatgagaattttttttggaccaaatcgattgacgtatttacctgttacaaatcgacctattaatgatcctactataaaaagtccgactacgagtccagcaacagaatcagaagcatggtattctgatttactatagctcgcgataacgacaattaataaatacatacatagataaacaaaaaagttaatagcaaagttaatattaaaactcttcgtaaagatggggtctttaattattgtagactgattcattactgttcctcctttatcattgcttcatgaatttgagacatcgcatttgtaatatcaaatacttgctcatcagttaatccagttttttttataatatcttgttgaatgacagtgatctttttattaatagtttcaaaaagtctttggcctttgtcagttaaactcaataatttctctctcttatcaactcctgtttttgtcatgacccaaccattgtctaacaacactttaatcaactttcgtgttgtaggcttttctattgaacgacgatgagaaatttttacaagggtagtaggttgataattggcaatatctcttagcacaagccattggccagtatgaatctgatgctgatctaatataggttgtgtaagtttaatatagggtct

SEQ ID NO: 4396 - DNA, 2986 bp, Artificial Sequence
  Description of Artificial Sequence: synthetic nucleic acid sequence
acaattaggtggcgccctcgtaactaaaacgggatcagaagatggttgtggctcgtcttggcctttatgtaatggcgctttacttccagaaaatttaccaatacaaacaattatagaactgagtcatcgcgcagtatcagccatttcacttatagttgtattatggcttgtaattacagcttggaaaaacattggatatattaaagaaatcaaaccactctctattattagtgttggttttttattagttcaagcacttgtaggtgctgctgctgtgatatggcaacaaaatccttatgtattagcgctacattttggtatttcacttatcagtttctcttctgttttcttaatgacattaattattttctcaattgacaaaaaatatgaagctgacattttatttattcacaaacctttacgtatcttaacttggttaatggctatcatcgtatacttaactatttatacaggtgctttagttagacatactaaatcaagtcttgcttatggtgcttggcctattccatttgatgatatcgttcctcataatgcgcatgattgggtacaattttcgcacagaggtatggcgctcatcacttttatctggattatgattacatttatacacgctattaagaattattcagataatcgaactgtacgttatggttatactgcatcatttatacttgttatccttcaagttattacaggtgctttatcagtcataactaatgtcaatttaattattgcgttattccatgctttgtttatcacttacttattcggaatgattgcttattttattttactaatgttaagaacgacgagaagtcaaaaataatttatttttctataaatttataacaattaaaaagaaacacgccactcaaaataccataacggtaagataagtggcgtgtttcaatatatttaagtataaatagaccatctaaatatcatatcaatctagatggtcattttaattatgattacttttcaatttccactaataaatctcctgtggcaatggcatctccattagcaacattgatttgtttaataattccatcaaatggtgcctgaatcgtcgtttccatcttcattgcttcagtgattaataatggctgattagcttgaacttcatcgcctacagacactttgacttcagttacagaaccaggcatttgagcaccaatatgatttggatttgatttatccgccttaggtttaacattagcattcgttttaacattttcatcttgaatataaatacgtcttgcttgaccattcatagcgtaataaattgtacgtttaccattctcatctggttcactgattgtttctaatttaataattagacgtttaccagtatcaatttcaatttcaactgtttcaccattacgcatgccaaataagaatgtcggtgtatccagtaaagatacattaccaaattgctctttcgtttgaatatattgtttatataccttcggataaagtacataactaattatatcttgttctgttacctcgtcttgttgtatgtcgcttaattcttgacggattgcttcaaaatcgaccggctccaagtattcacctggtctttcagtaattggttgctgtccttttaaaataacatcttgcaatttcttgttgaatccgttgacaggttgtccaatgtcacctttaaagaatgacacaacagattctgggaaatctaatttataaccatcattgatgaccgtatcttcatcaagatcattttgcaccatatatagtgccatatctccaactacctttgaagatggtgttacttttacaagatctccaaacaggaagttgacacgacgatacatctctttgacttcatcaaaacgttcgcccaatcctaaacttttagcttgttgacttaagtttgaatattggccacctggcatttcatgttgataaatttctgtatttggtgatttgatatcactctcaaagtctgcatagtaaggtctgactacagaccagtaatgactcaactcttctaacccatcaatatcagttcttaaattacgtggaaatccatttagtgcataatataatgaatttgcacttggttgactcgttaaaccactcatagatgcaacagcagtatctataatatctacgccagcatcaattgcttgtttatatgtcaacaatccatttccactagtatcatgtgtatgtaaatgaattggaagatgtgttgcctcacgtaattcaccaattaattcgtaagctgctttcggtttcaataaaccagccatatctttaattgctaatatatggaatccttctctttccagttctttagccattttaacgtaataatctaaagtataaatattggaacgttcagcatttaaaatatcacctgtatagcaaattgtaccctcagataccattccagcttcttgaacagcttcattcgctactttcatttgatcaacccagttcaatgagtcgaatatacggaaaacatctacaccagcttttgcactttcatgaacgaatttcttaattacattatcaggatagtttttataacctactgcgttcgaagctcgtaataacatttggaataacacattcggaatggctttgcgcaatctttctaaacgttcccatggattctctttcaagaaattataggcgacatcaaatgttgcaccaccccacatttctaatgaaaaactatctttaaaaacttcagcagttttagatgcaatgttcatcatatcttttgttcttacacgtgttgcaagtaaagattggtgtgcatctctaaatgtagtatcggtaattaaaacatcttcttgttctctaacccaatttgtaacacctgttggtccatgttgctcaagaatttgttttgttccaaataactgattgattttcttttgagaaatttttgggattttggtagattcatattctggttttggacgctttt

SEQ ID NO: 4397 - DNA, 1623 bp, Artificial Sequence
  Description of Artificial Sequence: synthetic nucleic acid sequence
taaaaggtaacaacataattaacgttacaattgttctaataaactgaggtttgtaagtttttttaaatgtaaaagcctttagaccttcctttcttaatggcgtttcaacatatctaaatgataattcggctaataatacagtaattacgatatccataatataaacataagttggtaattgaccatcaataaaataactatgaataaagctaattacaggaaaatgccataagtataaactgtatgaacgctttccaatgtagacaaataaaggatttcctaataacttagctaaaattgtcgttggatgaacaacacttgcaataattagcaaagtcattgttgaaataagataaaatccaccgttataaatccaatcactttcatcactaacagtaaagaataatagaattaaaaatgtaagtcctatgatacccgcactattaatcacagtttttaatcctttaggtggattgggatttaatttaaaaggtggccagataaatgctagaagtacacctaaaagcagtgtctgcaatcttgtatcagttccaaaatatactctagaatggttcaagtgaggttgagaaataacaaccatcattaataatgaaaccagggatatgatccaaaacatcagtatgacatttttctttttcttaactattgccataaataataagagtactgctgggaaaaaaaggtaaaactgctcttcaatggctagtgaccataggtgctttaaaggcataaaagaaaattgctcgaaataattgacatctttagcaatataccaccaattagatacgtaaaatattgctgctatcatatcatgtttaactcttacaatatgctcggggtgcaataataaagttgcaattccaactactactattaatgcaaataccgctggtaataaccttttaatacgacgaatccaaaaatttttaagatttattgttccagtatcttcatactctttaagtaataagctcgtaatcaaataacctgaaataacaaaaaaagtatctacgcctaaaaaaccacctgttaaccattgtttattcaagtgataaataataataccaatgactgcaattgctcgcaaaccatctaatccaggcatatatcgtatttttttagcagagcgatattcattatttaatttttttctcattgttacattcttccctattaataataaatttcgttagacaagtaacttttttactaatcaatttcataagacgaacgctattgcttctaatcaacttattcaaacaaattttatctcattcaaattaacaaggtcattctcttatgttatagctatccctatcatatagcgcacgtttccattgagttaattatcatacttcgtaagatatacctcattaaaaggttataagtcttaagtattgtaatacatttgtaatattaattcaattttattataggcctaatttataaaaatattaaatgaacatacgataattcttattgaattttctttaataattaaaaaggatagctacatcattattccaaacaatgagtagctatcctttatattatccgatgcctaaagctattttggcatatcgtgacatcatatctttattc

SEQ ID NO: 4398 - DNA, 2436 bp, Artificial Sequence
  Description of Artificial Sequence: synthetic nucleic acid sequence
tatcgaaaatgaaaatgatgcttatttaacacaatttcctgggataggaaagaaaactgcaagacaaattgtgttagatttaaaagggaaggttacaattactgaagaaaatagtgacgatttattacaaactcaagttaatggtaatgaacaaaaccaaataatatctgaagcactattagctttacaagcactgggctattctaaacgagaattaaccaaagtagaaaaatccttaaacaaacataatgtgaatagtgtggatgaagccgttaaaataggactacaaacactagtttcttaatggaggaagtcaaatggataaaagaatggtcgatcaagaatttcataatgaagatactgacttggaattatcactaagaccaacacaattaaagcagtatataggtcaatcctctataaaaagtaatttagaagtctttatcaaggctgccaaacttagacaagagccactcgatcatgtcttgttatttggtcctccaggactaggtaaaacgacgctatcaaatatcattgctaatgagatggaggtaaatattcgtaccatctcaggaccatctttagaaagaccaggtgacttagcagcgatattatctgggttacagccaggtgatgtgttatttatcgatgaaattcatagattaagtagtgttgttgaagaagttctgtatcctgctatggaagattttttcttagacatcatcatcggtaaaggcgatgaagcaagaagtattcgaatagatttgccgccatttacattagttggagcaacgacaagagccggtagtttaacggggccattaagagatcgttttggtgtgcatcttagattagagtattataatgaaaatgatttaaaggaaataatcacgcgaactgcagaggtcttaggaacggacatcgataaggaaagcgccttagaattagctcgtcgttctagaggtacacctaggatagcgaataggttactaaaacgtgtaagagacttccaacaagtaaatgaagacgatcagatatatattgaaacgactaaacgagcattacaattactgcaggtcgaccaacacggtttagattacattgaccataaaatgatgaattgtattattaatcagtacaatggtggtcctgttggattagatacaattgcagtttcaataggtgaagaacgagtgactatagaagatgtatatgaacctttcttaatccaaagaggtttcttggaaaggactccacgtgggagaaaagcaactgctttagcctatgaacactttaatactactaacgaaaagagggaataatttgaatatcgaagatttcgattatcatttgccagagtctctcattgcacaaacaccactaaaaaacagagaccaaagtagattgttagttcttagcaaagatactggtgagctgacacacttacattttagagatgtcatccattattttgagcctggtgatacattggttcttaatgatacacgtgttatgcctgctagattatttggcctaaaagaagaaactggtgctaaagttgaaatgctaatgctcacccaaattgaaggtaatgattgggaagttttacttaaacctgcaaagagaattaaaaaaggtcatcgtctaaattttggagatggtaaaatcgttgctgagtgtattgaggaacttgaacagggcgggcgtattatgcgtctacattatgagggtatactccaagaacgcttagatgaattaggcgagatgccattacctccatatattaaagaaagattagatgatcctgataggtatcaaacggtttatgctaaagagagtggatcagcagctgcaccaacagcgggtttacattttactgatgatttgctaaataaaattaaacaaaaaggggtacatatcgcttttattacattgcatgttggattaggaacctttagacccgtaagtgttgaaaatatcgatgatcacgaaatgcatagtgagtattatcaaatgacacaagaaacggctgatttattaaataaaacaaaagaaagtgggaagcgtgtgatatcagttggaacaacatcaacgcgtacattagaaacgatacgtcgtgatcatcctcaatttgttgccacaagtggatggactgatatctttatttatcctggctttgagtttaaagcgatagatgggttaattactaatttccacttacctaaatcaacgttagtcatgctagtatcagcatttagcaataaaaaatatattttaaacgcttatcataaagctgttgaaatggagtatcgattctttagttttggagatgcaatgttaattatataaaagaatgtgaggtttaacatatgcctgcagtgacatatgagcatataaaaacatgtaaacaatccggtgccagattaggaattgtac

SEQ ID NO: 4399 - DNA, 3077 bp, Artificial Sequence
  Description of Artificial Sequence: synthetic nucleic acid sequence
aagtaaacctcatcgtttgcaccaagtatcgaaaagttacgtttcagcgaaaagtcaagctaagactttagagtatttgttagatattgactggtttacagaggaagagctaagtgttttaaaacgaggacgtaacgctaaaagttatacaaaagctaaaaatactgacattcaaacttatcgtaaaagttcagcgttagaagctgttatcggatttttatatttagaccatcaatcagaacgattagaaaacttattagaaacaattgttaggatagtggatgaaaggtagtgtgaatgtggaagatatagtgatagtaggtagacacgcagttaaagaagcaattatatcaggtcacgccataaataagattttgattcaagacggtataaaaaagcaacaaattaacgacattttaaaaaatgcaaaatcacaaaaattaattgtacaaacggtaccaaaatctaaattagattttttagcaaatgcacctcaccagggtgtggctgctttagtagccccatatgaatatgcaaacttcgatgaatttttacaaaaacaaaagaaaaaagcccgttattcaactgttatcattttagatggtttagaagacccgcataatcttggctctatattaagaacagcagatgcttctggtgttgatgcggttattatacctaaaagacgatcagttgcgctaacacagaccgttgcaaaagcttctacaggagcgattcagcatgttccggttataagggttactaatctttcgaaaactatcgacgaattaaaagacaacggcttttggattgcggggacagaagctaataatgcaacggattatagactaagaagaatatcactgttgatacaactattattgtatatttaaataattcttccttagttggccaactcgtcttttccatttctgacttaacgcctttaaagaaactttcttttttagccatcataagacctccacactctataactttctaatgaaagtcatactcaattaattgatatcatcttatttcgattctttatgaactgtatgcgcgttacatcttggacagtatttttttaaagtaagtctcgttgctgagccttcctttttaggaacattgtaattccgattgccacaattctcacaattcaaaggtactttcttcacaattattcacctttactcattataataccaatatactatacataagtattgtattaaatgtcaaacttatgcgccacgctataatttcctcaccatacagtatactatttgcatattattttcttattcaaaacttcttttaagtttacatttactacgttgaatcgcattataaacaactttggattccaaatttaaaaccatagcaatctcctttggcttgtaatcattaagtagtaatcgaatgatacgtctttccattcgactgagtttgacttcgcttcttttaaaagctaatgttaattcttttctaattatcgatctttctatatcgtttaatgccaaagtagcgttatattcaacaatgtattcattaacaagtagaggttgacgtttataattcgcttttacttttctaagatagtcatatttaaccgaacgaattaaaaaataaatatagtgttctattggtacaccttgttgatagtcgaatttttgcaaggcacggtagaatttaataacaatctcttgatacatgtcttcaatgtcatacttattatgggagatataccttattttattgtaaatcagtggctttagctcttctattaaagactcaaatagttcttcagaagatttattttctgtttgcgatagacacagtgctgtatattcatgttgctgtttattcagattcatatatctaacctttcgagtaagttgaaattagtttatatgaaatctatctaaaatcacaacagagcaaaattagtcttttttctgattgccacgtctaatcttttcaaattcttcaagtatctcattagataacggaattctaattcttggtttcttttcgctaaaatcatcaagtgacttgttaacaacaacctcattttcttttaattcacgccacatttctcttgaagaaatacgatatgcacctgaaccaaaaatagcatgttgttcactcatatcacttgttacaacggtaatgtgtgtcgtgtgtttattatataattcatacacgtagcgttctataaaactatctgcagtttctttttctttagtaaagattgttttgacaccatgatagaagtattccctttctatccctgactgttcataggcatcaaatacacagacaatttcatctgctattaatgcattgtagttggcaattgtgtctaataattgctctctagcttcttctaaattctctttagcaacagtgctaagtgttgaggattggccaatcatattgtaaccatctataattaagtatcttttcttcatgacttttcctctaactgatgacgtttacgatatacttcatacatcattaaacttgcagccacagacgcgttcaagctattgacatgtccaaccattggaatcttaatatgaaaatcacacttatcactcactaaacgactcataccttgcccctcactacctattacaatacctagtgacatatctgcttgtaaatctctataatccgttgcattattagcttctgtccccgcaatccaaaagccgttgtcttttaattcgtcgatagttttcgaaagattagtaacccttataaccggaacatgctgaatcgctcctgtagaagcttttgcaacggtctgtgttagcgcaactgatcgtcttttaggtataataaccgcatcaacaccagaagcatctgctgttcttaatatagagccaagattatgcgggtcttctaaaccatctaaaatgataacagttgaataacgggcttttttcttttgtttttgtaaaaattcatcgaagtttgcatattcatatggggctactaaagcagccacaccctggtgaggtgcatttgctaaaaaatctaatttagattttggtaccgtttgtacaatt

SEQ ID NO: 4400 - DNA, 3422 bp, Artificial Sequence
  Description of Artificial Sequence: synthetic nucleic acid sequence
aaaattgctaaatcattatctgaagtcgaaacgtacgcaaatgaactgctaggtaaacaattggtcacacatcaaactgggccagagggcaaagaggtcaaacgtttatatatcgaagaaggatgcgatatccaaaaagaatattatgttggttttgttattgatcgtgctactgataaagtgactttgatggcatcagaagaaggtggaactgaaattgaagaggttgcagctcaaacacctgaaaagattttcaaagaaacaattgatccagtagtaggattatcaccttaccaagcgcgacgtatcgcttttaatattaacattccaaaagaatcagttggaaaagcaactaaatttttattagcactatataatgtctttatcgaaaaagattgttctattgttgaaattaacccacttgttacaactggagacggtcaggtattggctttagatgctaaattaaactttgatgataatgcattatttagacataaagatattttagaattacgagatttagaagaagaagatcctaaggaaatagaagcttctaaatatgatttatcatacatcgctttagatggagatattggttgtatggttaatggcgcaggtttagccatggcaactatggatacaattaatcattttggtggaaatccagccaacttcttagatgtaggtggcggtgctacaaaagaaaaggtaactgaagcatttaaaattattttaggtgatgacaatgttaaaggtatctttgtaaatatttttggtggaattatgaaatgtgatgttattgccgaaggtattgtagcagcggttaaagaagttgaactaacattaccattagttgttcgtttagaaggaactaatgtcgaacgtggtaaagcaatattaaacgaatcaggtttagctattgagccagcagcaactatggctgaaggtgctcaaaaaattgtgaaacttgttaaagaagcataaggaaaggatgggagcactaagatgagtgtatttattgataaaaatacgaaagtaatggtacaaggtatcacagggtctactgcccttttccatacaaaacaaatgcttgattatgggactcaaattgttgcaggggtaacacctggtaaaggtggacaagttgtagaaggtgttccagtatataacactgttgaagaagctaaaaatgaaacaggagctaatgtatctgttgtatacgtaccagcaccattcgctgctgattcaattattgaagcagctgatgccgatttagacatggttatttgtattactgaacatatacctgttgttgatatggttaaagtaaaaagatatttacaaggtcgtaaaacacgtttagtaggaccaaactgtcctggtgtgataactgccgacgagtgtaaaatcggtattatgccgggatatatccataaaaaaggccatgtcggtgtcgtgtctcgttctggtacattaacgtatgaggcagtgcatcaattaactgaagaaggtatcggtcaaacaactgctgtaggtatcggcggtgatccagtaaatgggactaactttatttgtctaatcatagacaaaagtgctcatctctcattctagttattctaaattagcatgattctcttgcattgttttttcactaatgtgaaatgcatccattaaaggtaatacaacactatctaagaatataagtgaagcctgttcaaataaactaccaagtggttgtttcgaaccctcaacatcatgtttagtacctgcaggcaattcaacaaccgtctctgcaagattaccgattggcgattccgcatttgtagttaataagacaatttttgcaccctcagattgtgctttttcagctaataatcttaaatgttctgtagaacctgaacctgaaataataataaacaaatcatgttctttaattgaaggtgttgttgactcactacaacgtaggcatttttacctaattgatttaagcgcattgcaaaactattaggaacaaaacctgaacgacctttaccagctgtaaatatgcgatctgcacctataacatcattagcaaaacgttcatactctgtattatctacttgagataaagtagaatctaactcttcaagaataagacgataattattaaattcactcatcttatttaccttcaatagctgctctacattgttttgctgcttctacaggatcgtcagcattcgcaataccgccaccaacaataactaaatctggatcttcagcaacaatatctttgatagtatctggtttaataccacctgctactgcaaccttagagtttttgataacagatttaactgtacgcaagctgtctaatggagattttccttcagcttgtaagtcgtaacctgtatgaactgcgatatagtctgcacccatctcatctagttctttagcacgttgttctaagttttgcactgctatcatatcaacaagcaatgcttttccatgtttatgcgcttcttcaactgctgctttaattgaagcatcttcagagaatttaaattgatctctgaccgtacgtaagctatcaacaacagcatctactgagtcgccaggaataccatataaatgatcaatattccaggtttgtaatgccttaactaatgcttcatttgctttaatttgtgccatttttacaaatagcctccctttctattaatatgagtaaatctttttccctttagtaaaacaataaaatcagtactggtatgagaacagaactaatgactgctgttaaaatcataccaattgaactgaacgctcctgattcaatatcaagctctaatgcttttgcggtaccaaatgcgtgagaagcattcccataagttagtcctcgcgcaatggaagatttaaaacctcccatacgtaaaagcattgaacctaaaatactgccgattaaacctgtagttatgataaagagcacagtaattgtatctgttcctcccaattcttgagaaacctctatacctactgctgctgtaattgatctaggtaacagggtaacaattgtgtctttagaataaccaaagattttcaacgttgtaaatactaacacaaaattgagaactacaccagtcaacacgcttgtgaaaataattgttaaatatttttttattttctttttattttgataaagtgggtatgcaagacatacaactgtagcgtttaaaacatggttaatccaggtaccacctttcatataccccttatagcttactccgcaaaccaataaaacaataattattgcaattgatgcaataagagctggatttaatagtggattattgtatttatcttgaatctttttggaaacatagtacagaacaatagttaacaaaatcattagaactgcttgtaagtattcattcatgagtgat

SEQ ID NO: 4401 - DNA, 3646 bp, Artificial Sequence
  Description of Artificial Sequence: synthetic nucleic acid sequence
tataccgttggcatgctagctttatctgttcgggcaatacgatgcccattgtacttgttgactggtctgatattcgtgagcaaaaacgacttatggtattgcgagcttcagtcgcactacacggtcgttctgttactctttatgagaaagcgttcccgctttcagagcaatgttcaaagaaagctcatgaccaatttctagccgaccttgcgagcattctaccgagtaacaccacaccgctcattgtcagtgatgctggctttaaagtgccatggtataaatccgttgagaagctgggttggtactggttaagtcgagtaagaggaaaagtacaatatgcagacctaggagcggaaaactggaaacctatcagcaacttacatgatatgtcatctagtcactcaaagactttaggctataagaggctgactaaaagcaatccaatctcatgccaaattctattgtataaatctcgctctaaaggccgaaaaaatcagcgctcgacacggactcattgtcaccacccgtcacctaaaatctactcagcgtcggcaaaggagccatgggttctagcaactaacttacctgttgaaattcgaacacccaaacaacttgttaatatctattcgaagcgaatgcagattgaagaaaccttccgagacttgaaaagtcctgcctacggactaggcctacgccatagccgaacgagcagctcagagcgttttgatatcatgctgctaatcgccctgatgcttcaactaacatgttggcttgcgggcgttcatgctcagaaacaaggttgggacaagcacttccaggctaacacagtcagaaatcgaaacgtactctcaacagttcgcttaggcatggaagttttgcggcattctggctacacaataacaagggaagacttactcgtggctgcaaccctactagctcaaaatttattcacacatggttacgctttggggaaattatgaggggatctctcagtacaaagcagaaggtttacatggtgatattacccaagcaaaacgtttagaagtattgaagaaatttaagaacgatcaaatagatattttagttgctacagatgtggctgcacgtggtcttgatatttctggtgtgagtcatgtttataattttgatatccctcaagatacagaaagttatactcaccgtattggacgtactggtcgagcaggaaaagaaggtattgcagttacttttgtaaatccaattgagatggattatattcgacaaattgaagatgtcaataatcgtcgaatgaaagcattaagacctccacatcgtaaagaggtgcttaaagcgcgtgaagatgatattaaagatagagttcaaaactggatgtcaagagaaaatgagccgcgtttacaaagaatatcaagtgaattacttaaagaatatgatagtacagaattagtagcctctttacttcaagaacttgtagaagctaatgatgaagtggaagtacaattaacttttgaaaaaccattagcacgtaaaaatcgcagtagtaaaggcggttctagaagaagtaatcataaacgtggtaatggtaagtttgataataaaaatagacgatcaaaagggtctaaaggtcaatcaagcaaaaagaaaaaccaaaagaaatttgaccgtagagataagcaacaaaaaagtggtaatcaatcactaaaaggtcgcacatttgcagatcatcaaaaataaataaattaactagcctgagataattttttgtctcaggcattttttatttatacgaattaaaaagtacatatgtattgagcataaaacttattatatagtaggtgtgacgcgtcgatatgaattttttcatttttgcatgtgaataaattttttaataaataatacattgaaaatataggtcgctgttattttttagactttattatcactatgctataatgtgggtaaatcttgaaaaggagtatatttatgaaaaatgatagtacgtttcatagaagcccaatccaagcgctaaagtactattacataactaattgcataggtttatttattttgcttgttatacttagtttacttttgtattttagctatttaaatcattggtggccttttacatcctacatctttcttgggctaggtttgttatctattttaaacacttgtatatctccactaattaaatatagatatcattattataaaattcacgaagattttgtcatattaaaaagattatttatttttaagaaagaagaattaagtaaaatagagagaatacaatttatcgatattggaactaatccattatcaaaaaaattaaatcttaattccataactttatttactgcaggtcatacaatctcatttccaataatatctgagaaagaagcacaaaatattcaacaacaaatactattgagattgagaggtgcaaatgacgatgtatagtccgcaaaagctacatccaatttcttatattgatggcttgattagtgtgattaaatcaaatttcattgtaattatcatctttttatttaatataaaagattttaaatatgatgatttttcgtcttatattattccaggtataatgactttgatattttctatcggtttcattcataatattattaaggtttataatacacgatattggattgaagaggatcattttatattaactactggtgtttttaataaggaacgaaaagaactaaatattagtcgcatacaatctgcagatacgtctcaaggattgattaatcagattgttggcggcgttgaactcattattaaaacaccaagtgatggcatagaattagggacaatttcaaaaaagcaaagtgaagttattgaacaagaattgcgatctattcaagaacgcatgaataaccaggtaaatcaagaagctaaagagttaaatgatgagaatcatactcagacatatcaacaacatgccaaaccccaatatgcaatatttaaaatgccttttaaacaactattatttatgtctatgacaagtggagctatagcacttgcttttgtgacactatctcctattattggcagtctctcaagtgttattccatgggataaatttggtgaagaaatatcttctgtatttaaaacgatatatttcattgtcatttttattgtcatactagtgttattattaagttatataatcggaactatcatgtacttaataaagttttatggatatcaagttattcaagataatcatcaacttaaaattcaatatggattatttacgaagaaaaatatcactgtaccaactgaccgactgcaaggtgtacttgaacatcaatcttttatacgaaaattatttggttatacatctatacatttctatattacaagtgatatagatactactgaaggggaacccactgataatgatggaagaattatgattttaccgtttattccaagaaaagaggcatataaagtgattagacctttggttcctgagatgacatttaatcatgctaaaattggcatgcctttaaaaggatttcatcgtcactttctaattccttccatatgtattattggtataggcattattggatggtatatgtggtctttatggtctttaatcatagctttatta

SEQ ID NO: 4402 - DNA, 2869 bp, Artificial Sequence
  Description of Artificial Sequence: synthetic nucleic acid sequence
gtggtgttctaccactgaactacttccgcgaatgcgggtgaagggagtcgaacccccacgccgtaaaggcgctagatcctaagtctagtgcgtctgccaattccgccacacccgctatttaaatggtgagccatagaggattcgaacctctgaccctctgattaaaagtcagatgctctaccaactgagctaatggctcaaaagatggtgccggccagaggacttgaacccccaacctactgattacaagtcagttgctctaccagttgagctaggccggctataaatggtggagaatgacgggttcgaaccgccgaccctctgcttgtaaggcagatgctctcccaactgagctaattctccaagatattttgcctggcaacgtcctactctagcggaacgtcagtccgactaccatcggcgctaaggagcttaacttctgtgttcggcatgggaacaggtgtgacctccttgccattgtcaccagacaaatgaatgattatacattcaaaactagatagtaagtaagattttgcgtcgcaaaacgttttttaaaaattgattaagtcttcgatcgattagtattcgtcagctccacgtgtcaccacgcttccacctcgaacctattaacctcgtcatcttcgagggatcttataaccgaagttgggaaatctcatcttgaggggggcttcatgcttagatgctttcagcacttatcccgtccatacatagctacccagctatgccgttggcacgacaactggtacaccagaggtatgtccatcccggtcctctcgtactaaggacagctcctctcaaatttcctacgcccacgacggatagggaccgaactgtctcacgacgttctgaacccagctcgcgtaccgctttaatgggcgaacagcccaacccttgggaccgactacagccccaggatgcgatgagccgacatcgaggtgccaaacctccccgtcgatgtgaactcttgggggagataagcctgttatccccggggtagcttttatccgttgagcgatggcccttccatgcggaaccaccggatcactaagtccgtctttcgaccctgctcgacttgtaggtctcgcagtcaagctcccttatgcctttacactctatgaatgatttccaaccattctgagggaacctttgagcgcctccgttaccttttaggaggcgaccgccccagtcaaactgcccgcctgacactgtctcccaccacgataagtggtgcgggttagaaagccaacacagctagggtagtatcccaccaacgcctccacgtaagctagcgctcacgtttcaaaggctcctacctatcctgtacaagctgtgccgaatttcaatatcaggctacagtaaagctccacggggtctttccgtcctgtcgcgggtaacctgcatcttcacaggtactatgatttcaccgagtctctcgttgagacagtgcccaaatcgttacgcctttcgtgcgggtcggaacttacccgacaaggaatttcgctaccttaggaccgttatagttacggccgccgtttactggggcttcgattcgtagcttcgcagaagctaaccactcctcttaaccttccagcaccgggcaggcgtcagcccctatacatcaccttacggtttagcagagacctgtgtttttgataaacagtcgcttgggcctattcactgcggctcttctgggcgtgaaccctaaagagcaccccttctcccgaagttacggggtcattttgccgagttccttaacgagagttcgctcgctcaccttagaattctcatcttgactacctgtgtcggtttgcggtacgggcacctgttatctatctagaggcttttctcggcagtgtgaaatcagcgactcgaggaaacaatttcctctccccatcacagctcagccttatgagtgccggatttgcctaacactcagccttactgcttggacgtgcactccaacagcacgcttcgcctatcctactgcgtccccccatcgattaaaacgatactaggtggtacaggaatatcaacctgttatccatcgcctacgcctgtcggcctcagcttaggacccgactaacccagagcggacgagccttcctctggaaaccttagtcaatcggtggacgggattctcacccgtctttcgctactcacaccggcattctcacttctaagcgctccacatgtccttgcgatcatgcttcgacgcccttagaacgctctcctaccattgtccaaaggacaatccacagcttcggtaatatgtttagccccggtacattttcggcgcagtgtcactcgactagtgagctattacgcactctttaaatgatggctgcttctaagccaacatcctagttgtctgggcaacgccacatccttttccacttaacatatattttgggaccttagctggtggtctgggctgtttccctttcgaacacggaccttatcacccatgttctgactcccaagttaaattaattggcattcggagtttgtctgaattcggtaacccgagaggggcccctcgtccaaacagtgctctacctccaataatcatcacttgaggctagccctaaagctatttcggagagaaccagctatctccaagttcgattggaatttctccgctaccctcagttcatccgctcacttttcaacgtaagtcggttcggtcctccattcagtgttacctgaacttcaacctgaccaagggtagatcacctggtttcgggtctacgaccaaatactcaacgccctattcagactcgctttcgctgcggctccacatttgctgcttaaccttgcatcagatcgtaactcgccggttcattctaca

SEQ ID NO: 4403 - DNA, 1846 bp, Artificial Sequence
  Description of Artificial Sequence: synthetic nucleic acid sequence
taatttattgacgatttgtattgatgtaacaccaccgaatccaacagctgcgtacaaatcttcatcattagcaaaatgatatttttcattaacgacttctaaatttttctcagttagaatatcttcaacacggaatccttgttctttaatctccgcttctaccataaatttacctttttcaatattagaagaacgatcttgttttttaaagaaacttttgattttacttttggcactagaagattttacaattttcaaccagtctctacttggaccgtaagaatgtttacttgtacgaatctctataatatcaccagtttgtagaacataatctataggtacgattttaccattaaccttagcaccaatcattttatttcctacttcactgtgtattgcataagcaaaatcaattggtactgcaccataaggtaactctataacatcactagctggagtaaatgcatataccttatcgctctgtaaatcatattttaaggattccataaattcttgcgcatctgcagaagtatggtcggtttcagcaagttcttttaaccaattaagcttattttgaaaatcctgtgttttttgattaactgtcttaccttctttataagcccaatgtgcagcaacaccatgttcagcgatttcatgcatttcgtgcgttctaatttgtatttctaaaggatcgccattgggtccaactacagtggtatgtagtgattgatacatattttgcttaggcatagctatataatctttaaaacgtccaggcatcggtttccataatgtatgaactaaaccaagtgtcgcataacaatcatttatcgaattaactataatacgtatagcaagcaaatcaaatatttgatcgaattgctttttttgttttatcattttgcggtatatactgtaaatatgttttggtctaccgttaatttcgcccgaaagattcattttagtcatttcgtttttaattttattgattgcatttgtaatgtaagcttcgcgttcactacgttttttcttcataagattaacgatgcggaaatattgcacactgtcaatatatctcagcgctgtatcttcaagttcccactttatcgtgttgattccgagacgatgtgctaaaggagcatagatttctaaggtttccttagagattcttacctgcttctctcttggcattgcctttaaagttctcatattatgaagccgatctgctaacttcactaaaattacgcgtacatctttagcaatagcaataaatagtttacgatgattttctgcttgttgttcttccttagagcgatacttaacctttttaagtttagttactccgtctactattcgtgcaatttcttcattaaacatatctttaacatcttcaaatgtataagaagtatcttcaatcacatcatgtagaaacccagcgacaatagtgggtccgtctaaacgcatctctgttaaaatccctgcaacttgaataggatgcataatataaggtaagccattttttctaaattgacccttatgtgcctcataagctatatgataacttttgagaacatattcatattcacttgttgataaatatgatttagctttataaagcacctcatccgcgctatatggatactcgttattcactttaatgacaccccactcaattcattactttcgtttagtactcatgttgcaaagatgtttaacataccacatgaaagtacttattcattgttttgtattcattttaccataaatcatttatagcttaagaaagtagaaaggttctacatatatcaaattatcatgttcaactatataattgaaactcatttat

SEQ ID NO: 4404 - DNA, 2425 bp, Artificial Sequence
  Description of Artificial Sequence: synthetic nucleic acid sequence
taattatggacagccacctggtacaacaacagctggtgcagttcaatttaaaaatcaagttagttttgataaagatttcgactttaacattagagtagcaaacaatcgtcaaagtaatacaactggtgcagatggttggggctttatgttcagcaagaaagatggggatgatttcctaaaaaacggtggtatcttacgtgaaaaaggtacacctagtgcagctggtttcagaattgatacaggatattataataacgatccattagataaaatacagaaacaagctggtcaaggctatagagggtatgggacatttgttaaaaatgactcccaaggtaatacttctaaagtaggatcaggtactccatcaacagattttcttaactacgcagataatactactaatgatttagatggtaaattccatggtcaaaaattaaataatgttaatttgaaatataatgcttcaaatcaaacttttacagctacttatgctggtaaaacttggacggctacgttatctgaattaggattgagtccaactgatagttacaattttttagttacatcaagtcaatatggaaatggtaatagtggtacatacgcaagtggcgttatgagagctgatttagatggtgcaacattgacatacactcctaaagcagtcgatggagatccaattatatcaactaaggaaataccatttaataagaaacgtgaatttgatccaaacttagccccaggtacagaaaaagtagtccaaaaaggtgaaccaggaattgaaacaacaacaacaccaacttatgtcaatcctaatacaggagaaaaagttggcgaaggtgaaccaacagaaaaaataacaaaacaaccagtggatgaaatcgttcattatggtggcgaagaaatcaagccaggccataaggatgaatttgatccaaatgcaccgaaaggtagtcaaacaacgcaaccaggtaagccggggggttaaaaatcctgatacaggcgaagtagttactccacctgtggatgatgtgacaaaatatggtccagttgatggagatccgatcacgtcaacggaagaaattccattcgacaagaaacgtgaattcaatcctgatttaaaaccaggtgaagagcgtgttaaacaaaaaggtgaaccaggaacaaaaacaattacaacaccaacaactaagaacccattaacaggggaaaaagttggcgaaggtgaaccaacagaaaaaataacaaaacaaccagtagatgaaatcacagaatatggtggcgaagaaatcaagccaggccataaggatgaatttgatccaaatgcaccgaaaggtagccaagaggacgttccaggtaaaccaggagttaaaaaccctgatacaggcgaagtagtcacaccaccagtggatgatgtgacaaaatatggtccagttgatggagatccgatcacgtcaacggaagaaattccattcgacaagaaacgtgaattcaatcctgatttaaaaccaggtaaagagcgcgttaaacagaaaggtgaaccaggaacaaaaacaattacaacaccaacaactaagaacccattaacaggggaaaaagttggcgaaggtgaaccaacagaaaaagtaacaaaacaaccagtagatgaaatcacagaatatggtggcgaagaaatcaagccaggccataaggatgaatttgatccaaatgcaccgaaaggtagccaagaggacgttccaggtaaaccaggagttaaaaatcctgatacaggcgaagtagttactccaccagtggatgatgtgacaaaatatggtccagttgatggagatccgattacgtcaacggaagaaattccgtttgataaaaaacgcgaatttgatccaaacttagcgccaggtacagagaaagtcgttcaaaaaggtgaaccaggaacaaaaacaattacaacaccaacaactaagaacccattaacaggggaaaaagttggcgaaggtgaaccaacagaaaaagtaacaaaacaaccagtggatgaaatcgttcattatggtggcgaagaaatcaagccaggccataaggatgaatttgatccaaatgcaccgaaaggtagccaagaggacgttccaggtaaaccaggagttaaaaaccctgatacaggcgaagtagttactccaccagtggatgatgtgacaaaatatggtccagttgatggagatccgattacgtcaacggaagaaattccgtttgataaaaaacgcgaatttgatccaaacttagcgccaggtacagagaaagtcgttcaaaaaggtgaaccaggaacaaaaacaattacaacaccaacaactaagaacccattaacaggggaaaaagttggcgaaggtgaaccaacagaaaaagtaacaaaacaaccagtggatgaaatcgttca

SEQ ID NO: 4405 - DNA, 2410 bp, Artificial Sequence
  Description of Artificial Sequence: synthetic nucleic acid sequence
aacaccccacaaagatagattttagtccaacttctggaatgcacatcataataaatgagttctttttccttcatttacgtttaatggtgttttctcgtctttgcttaatcaacaagtagacagcatttgctattcctaacaaagtccaaattattgataaataaatattatcaaaactatagattttaggcatgagtattaaaaacataatatttaatattaatgatatacgatgaagcttaccaaaatgattcatttgaataacttatcccctcttcatttattactttattaaaaattttgctttattccaattgtatcattggcattgaactttaaaagtcataaaactaaaaatctttgctcaatccatatgtgtttgaatattttccagaccatccatcaagcaaaattgaagtgcttagaaaataaaaattgaaaaatacaaagaagaattaatgttaagtatataaaaaacaacgctagcttttaatatgctaacgttgtcaatttcctgggaaatcaattttctttttctaaatttttaatttcgacagttgaatatacttttactctatttcttccccgttttcatcgtattttgtaacttcaccatcagatgtcacaatataagaaccttcgaggttgccttccttatctaaaatagaaaagccccaatctccgtcttcgttctgttcgggttctttaaatgtatatgtatcagtatctaatgggtgaccttcatacgcttcaactttatctatcacattactacgtgtaactttatcatcattagatgtatcactatcactgttagacgtcccttcatctgacgtgttagattcacttgaatttgatgattgactttgtgtaaacgcaatttgatttgctatatctttataatttgaacttttaccgtatttatttaatagttcatgtaaatctaattctcttgctgcttccgaatgcgcatattgttgatatgttcctgaactttgtgtgcctgcaattaataccttttcattaccaataccgataagcgtcacaaatgatcctttagatggttttgcagtatagaatttcatatcactaggtgcaccttctacttttgttggtaatgcttccaactgatacgtatgaatacttttacgttggcccccaccgttatagtttgcataaaatgaatgatttcttaattcacttgcgttaacggcatattgagaaactgagggatcattgatagctaatgctactttttgcgattgagttaaatcctcgactctatctctagacttattgttattacttgaatgaccattattagaatttgaatttttattatttgaagcttgctcggtttgagtgttactattttctgattgcttatcagtctgatgctgtcctaccaaatctccaaaatcgcatcctgcaagtaatgttgttactgtaattgctccgattgctaacacatgttttttcatttcgtttctctcctttaaatctagaaattgtcactgctgtgattatatgtgtcgttcatacttcaaccagttttacacgattactaaatccataatttaataacgtaaatttgtaaaaacattattgttcccttgattgttaattcccgttattaaatttattttaatttataataattataattgctactaatcacctaaataatttgcacaatatttaaaaatttatagatttaaaagtaactaaacttaaaataacttataacatatgcttttatacttcttaaactaatatttatataccttaaattaacagtagaaatgtgtttaaaaataaattaatataacaatataaataaaatataaaagagttggaggacagttaattgaaaaggttttttacaggactgattctagtttttctcattataatgctaggatttgcagggggattgggatacagtcattataaagattcaaaatcgaacactgatgtagcttcaaaagagactcagacttccaataaaaacactcatgaagatacaacttcacaaggtaaaatgcaaaatcaagttaatagccaaacaaacgaagtatcaaatgggacatcaactaaaacacttagtgaaaaagcaaagcagttaagagaagcttttaacgtcaatgatgaggaagctcaaattttagcagatgaaatcgatagagcagatgtaaataaagatggcacgattacaacggatgaaatgacgcctactttagatcgttttacaaaagaagggaaattccaaccatctgctggtggtacaactagcgaaacacctcaccctaaatatacagcagaagatgctagacatatgtctgatgatgaatttctagacgcgtatacagaaggcatgtcagatgatgaagctgctactattcacgaaagt

SEQ ID NO: 4406 - DNA, 1004 bp, Artificial Sequence
  Description of Artificial Sequence: synthetic nucleic acid sequence
taaccataatacctgctaaaattggcattggaatttgaacaacaagtcctccaagaacaataatcatgaatattaagacaacaccagcagaaaaagtagataatctactgtttgcacctgatttgacattgattacagattgtccaatcatggcacaacctcccataccaccgaataatcctgtaatcatattagcaatgccttggccacgagattctctgtttttactactataagtgtctgttgcatcatctacaattttagcagtaagtaaactttctactagacctacaatagccatagatagcgagtatggaaaaatgatttgaagtgtttctaaattaaagggaacattaggaattaaaaagtgcggtaaagcttgcttaatatttcctaaatcaccaacagttctcacgtcagaacctgtatacatataaagagcagtcaatacgatgatagctattaatggtgcaggtattgctttgaaaaatttagggattatatatacaatgagtaatgttacaattacatatatataagttgagattgaaataccgaagatatgttctatttgggacatgaaaatcataatacctaatgcatttacaaaacctatcatgacggaatgaggtataaatttcattaaacgccccactttgagaaggcctaaaactaattgaattactcccattaatatcgtggcagctaaaagatattctacaccataatctttcacaagtggtgtaactaataaggcaacagcccctgttgcacctgatatcattgcaggtctaccaccaacaatagcagtaacaacagcgatgataaatgaagcatacaaaccaaccattggatctacgccagcaataattgaaaatgcgatagcttcagggattaaagctaaggcaaccacgataccggcaagtatatttttacctggctggttaaaccattcatgttttaatttttcaaccataacttactctcctttttatttaattata

SEQ ID NO: 4407 - DNA, 1550 bp, Artificial Sequence
  Description of Artificial Sequence: synthetic nucleic acid sequence
tatagtgaactacaagatatgctgagttaacgaaaaagaaatgtaaaaaaattcctctatgtcaaatacattaaattcaacttttattgattatgtataagatatacattttaactacctataatcttttcttatgtcaacagtttcataatatatattgatatacactactgataataggttttaattaatattaagcgcatactttttatggatagaatattagtattacatattttttggggttcaagaatatgccccgattttatatcaaatttggaagaaaaagcataaaaaagcttagtacaaatggcgtattgatgagacatacatcaaaataaaaggaaaatggaggttctgttgcaaagttgaatttatagtataattttaacaaaaaggagtcttctgtatgaactatttcagatataaacaatttaacaaggatgttatcactgtagcggttggctactatctaagatatgcattgagttatcgtgatatatctgaaatattaagggaacgtggtgtaaacgttcatcattcaacggtctaccgttgggttcaagaatatgccccaattttatatcaaatttggaagaaaaagcataaaaaagcttattacaaatggcgtattgatgagacgtacatcaaaataaaaggaaaatggagttatttatatcgtgccattgatgcagagggacatacattagatatttggttgcgtaagcaacgagataatcattcagcatatgcgtttatcaaacgtctcattaaacaatttggtaaacctcaaaaggtaattacagatcaggcaccttcaacgaaggtagcaatggctaaagtaattaaaggttttaaacttaaacctgactgtcattgtacatcgaaatatctgaataacctcattgagcaagatcaccgtcatattaaagtaagaaagacaaggtatcaaagtatcaatacagcaaagaatactttaaaaggtattgaatgtatttacgctctatataaaaagaaccgcaggtctcttcagatctacggattttcgccatgccacgaaattagcatcatgctagcaagttaagcgaacactgacatgataaattagtggttagctatatttttttactttgcaacagaacccaaatcatcgttatcgtgtttaattctataaacagtttgtcttgtaatattcacttctttcgcaattttactaatcgctttgccttcctctaacatttctacaacacgatgatagataacacgtttttgaggatctttcgcattgggagaatataataaaggtcgtcctttatatacgcctttctctttcgcaacttgaatcccttgagcttgtcgacgtttactttcatttctttcttgttctgaaaccattgctaatatctgtataattaaatctttcataaatttatctaataatggattaccaatgacttcattcatcattggtagactggtaatcatcaattgtacttctttctctttaagataattaacggtattaatgacttcatcataattacgaccta

SEQ ID NO: 4408 - DNA, 2389 bp, Artificial Sequence
  Description of Artificial Sequence: synthetic nucleic acid sequence
tgtgctacagcaatgttagcgtcaggcattaacctttgaagttgttctcttttttcataaatggactgcactttgttatacaaataaaatacttgtccatcgcgagataattcacgctctaatgcctctttaataaagttcgtattctgttctaagacataagtttgtacaggaaaacgattttcaggtggtgtttcaatcactgataagtcacgtacacctaacatactcatatgcaatgttcttggtattggtgttgcagtaagcgtcagtacatcaacgttttttttcaaagttttaatgcgttctttatgtcgcactccaaaacgttgttcttcatcaacaataagcaatcccaaatctttatattgaatatctttacctaataatttatgtgtacctacgacaatgtcaacatatcctgatttgagcccttctttagtttcccttatttctttagctgtgcggaatcgacttaccaattgaatttcgaccggaaaatcttgcatacgttcaagtagtgtttcgtagtgttgttgtgcaagaatcgttgttggtactaaaaacgcaacttgcttaccatccatgacagctttaaacgctgcacggacagccacttcagttttaccatatcccacatcaccacaaagaagacggtccataggtcttgctctttccatgtcacctttaatttcatcgattgacttactttgatcgggtgttaattcatatggaaaatcatgctcaaatgctgattgctctgcagtatcttggccgtattgataacctacagacatttcacgttctttatacaaatcaattaattcatcagctatatcttcaacactttgttgaactttcgcctttgtttttttccattctgtcccgcctaatttatttaatctaggcgacttatcttcagaagccacatacttttgaacttgatccatttgatcaactggaacgaataattgatcagttcctttatattgcaatttaatatagtcgcgatgtgtatctccaacttctagtgtttcaacacctaagtatcgtccgacaccatgatgcacatgcactatataatcgcccacatttaggtcttgatatgattttattttttcagcattagaaatcgtttttgtacgtttacgttgtttcttttgtcttgttttaaataattctctttctgtgatgactaccaactgcatataaggtaattcaaagccttcagaaagactaccttccgtcactacaacttgaccaccatcaatatcttcgtgaatatttgatactgttggaatatgcatttcattaagcattgattgaatacgttcaacttttgtttcagtttcaacaagaactacgacagtgtaatcttgatgcacgtatctttgaaattccgagcgcataatgtcatattgaccataaaattgttgaactggtttacaagagaacttaataatatgttgtaatggtacttgcatcgaagatgtaaataatgtgaaatatgcaacggcatgttgctctaataatgcgtcaaaactttcatacttcataaatccttgtccgataaatccatttccactctcaattaagttactcataaaatcttcaacttctgttgtaagtgtttcttctgtttccttaatacgattaaactcatcaactacaataatcgcgtttttttgaaaatagtcaataagggttgatggtttttcatacataaatgaaacaagacgtcgtaacaattgatgatcgaaaaaggtagattcaaacaacttaaaactttcatatgtctcttttaaatcattacgtacggacttttcaattttagggcgtgtatattcatatgcttttttaagttcattttgtaagtgttgtatcacttcatcagtaataatgtagtcactagctgttgtgatttcaacttgatttatattatcgttagaacgttgtgtttctacatcaaagtctctgatggaatcaacttcagtatcaaatagctctattctcagatactgatcaaattagggattcaaaagatcaacatgtcacagatgaaaaacaagatatacaagcaattacacgttcactacaaggtagtgataagattgaaaaagcacttgctaaggtacaatctgacaatcaatcactagattctaattatataaataataaattaatgaatttaagatcactagatacaaaagtagaggataataacactttatctgatgataagaaacaagcgcttaaacaagaaattgataagactaagcaaagtattgaccgacaaagaaatattattatagatcaactcaatggtgctagtaataaaaaacaagcaaccgaagatatcttaaatagtgttttcagcaaaaatgaagta

SEQ ID NO: 4409 - DNA, 1167 bp, Artificial Sequence
  Description of Artificial Sequence: synthetic nucleic acid sequence
gctgtgtctgtcacatagtcttttaaacgttgacctgcagcatagtattcgtcaaagatttcatcgaatgttggacaagtttcgttaaacatgcctttaaagtatgcatttttatattcaatattttctttaagtcggcgttcgaatgtttccttttctaataaatctgccatgcgaataccgatacgttgtgctttatctacgtatgctgggccaataccttttttcgttgtaccgattttattatcgccacgacgacgttcttcatattcgtcttgagctaggtgataaggtaaaatgacttgtgcgcgatttgagatgcgtaggttgtcagttgaaatgccacgttcatttaacccatctaattcttttaataatgcgactggatctacaactacaccgttaccgattactgctaatttatctttataaaagatacctgatggtactaagtgtaatttgtaagtttctccaccaaattgaatcgtatgtcccgcattgttaccaccagaaaatctagcaattacgtctgcttgctctgctaaaaagtctgttattttacctttaccttcgtctccccattgtgtcccaactactacgattgatgacatatgagcacctccaagtttttctcgtttaaccactaggtattttaccaatatgattttgaatttgcaaataaaaatcgaacattaatcagcgttcgataacgcatcatctttcagtaagttttctgtgtaaaatcacttccaaacgcttctatgacagttgttcaaaggatgtctaagtaaaatacatacacatacttcccacattttaaaaagagaaaaacaaaataaaaaccgtacaataaatagattataacaattattgtacggaaaaatattttttatgacatatctgcatgagcataatcaatatctgtaaatttattgtattgtttcataaagtgaagtttcacagtacctgttggaccattacgctgcttggcgatgatgatttcaatttcaccgttatcatcatttgtctgtggttcaaaaccagcatcgtcagcatcgtcatcatcttcatcaccttcaccacgattataataatcatcacgatacaagaaagcgacgatgtcggcatcttgttctatagacccagattcacgaatatcactcatca

SEQ ID NO: 4410 - DNA, 2354 bp, Artificial Sequence
  Description of Artificial Sequence: synthetic nucleic acid sequence
ttgttctagaaccatcaccaaatagatgcgatttaatgattctataatcatcgagtgaaatatacgtaaattgcaatccacctttaacgtcacctgcagcgtatatgtgtttcactgtactttgcaaatgtttatttacaatcacttcaccttgttttccaatttttacatctgtattttcaagacctaagtgatttgtatttggcttacgacctgtggctaagagcacagtatcagctgatatttctccatgatttgtgtgtatgatagtttgatctttattgtttgaaaatgcaatagtgctagtattagtgtttatagtcacacctttatcttgtaaatctttgacaataagatttgcaatgtcttgatcttcatttgtcatgatagcatcaccacgctcaagaattgttacatgtgttccaaaatttgcaaacattgaagcgaattcgagagcgatataaccgccaccaataataacaagttcttgaggttgatagtcaatatttagtaatcctgtagaatcatatatattttgagctgtatctatccctttgatatctgggatattcgcacgtgaaccagtgttgattaatatcttatctgcggtaattgtttcttgaattgttccattactatcctgtagttctattatctcgttagaaataaatttggcgttataatttagaacatctatattgttctttgaatttaagccttgatagttcttgttattcaatgcttgtacgacttctttttttctagtaatagactctttgaatgaattaccttcaataccatcatgaattaatgttttagtaggtatacatccgatattaatgcatgtaccaccatacatctttgttgattgttctaccactgcaaccttttgtccatgaccagcagcatgtgccgctaatgttttacctgcttttccaaaaccaataataatcaaatcataatttttcatggttttatccctcctgtaaaatatctgccaaaacatctgtaatatttttatttttgtaaaaatctaaaattatttgatgttcttgagaataataatgtgacattgtatgagcaattttcttagaaatttgacaatgactgtcagaatcgccagtaaatcgtctttggctattatttttatctaaaacaaagtgttgatataacttggctaaatctacttgagcagtatgttgattggcttgatagcctcctgctttaccacgttgaactttgatatagttgtgttcagttaaatatgctagaacgcgcctaagttgtacagggttcagacatgttaatttagctaattctttactattgaattgttcttgatcgtgttgagcaagaaaacataatacatgtactgcaatattgaattctaaattcatttttacccaccttaatgtaacttcattagttacattaaagcgtataatgattttaaggtcaagataattgttcctaataggtatttaacatgaatgaataagttacaattggggtagaatatatttaagtatattaaataaaggagatgactttaatggtaaatcaagtacaattaggtaaatctagtgtcaacgtttttcctatcgcattaggtacaaatgcagtaggtggccataatttatatcctaatttggatgaagagcaaggcaaagaagttgttcgtcaagctattgataatggtataacattattagatacagcatatatttacgggcccgaacgttccgaagaattagttggacaagttgtaaaagaatatccacgcgagaaagtgcaaattgcaacaaaaggttcacatgttattaaagaaaatggagaagttgttcaaaataacgatccagaatttttaaaacagcaagttgaaaatagtttggaacgtcttcaagtggattatattgatttgtattatattcattttcctgatgacgatacaccaaaagataaagcggtagccgctctcaaagagcttaaagatgaaggtaaaattaaagcaataggtgtatctaatttctctttagaacaattaaaagaagcgaataaagatggatatgttgatgttgttcaattagaatacaatttattacatcgtgaaaatgaagaagtaatggcatatgctgctgaaaataatattacatttgttccttacttcccacttgcttcaggtatactagctggcaagtacgatgaaaatcaaacatttgaggatcatcgtgcagaacgtcctgattttcagccagacgtattcaaagataatgttcgtcgtgtaaaagcattaactgatattgcagaagcacatgatacaacgattgccaatgtcgtattagcattttatctta

SEQ ID NO: 4411 - DNA, 2239 bp, Artificial Sequence
  Description of Artificial Sequence: synthetic nucleic acid sequence
aagttatcccagtcttataggtaggttatccacgtgttactcacccgtccgccgctaacgtcagaggagcaagctcctcgtctgttcgctcgacttgcatgtattaggcacgccgccagcgttcatcctgagccaggatcaaactctccataaaaaattatgatgtttgattagctcataaatactaaatagtttgtaacgtttcgttactgtttattggaattaacgttgacatattgtcattcagttttcaatgttcatttagtaaaatcaatcttttttattgtactatattgttttaagaaaagtcaataactaattgatattacttaattaattttaaaagcttttcgttaactttgcaagggttatttttacaccaactcaacaaaattatcaatcgctttacatccgcttttcagcgacttttatataatatcaattttatgttttgaagtcaacaattaaattgaattattcctaataattatattactgggtggagactatagtagtataaatgaaggcatatttggctataatgtagttttatctgcgattgcgctaggtgtcacttttgagacagcaatccatagttatctcgcaatgattttaggaatagtactcactgcattcatacatttaggtttgagcacattgctcgcaccattaggtttaccaactttaacatggccatttatttttgctacatggattatgttgtttgcaggaattaaaaatcaatctgtataaataatgcataaaaaatgaaaatattaaaatttaaaaattgagttaaccttaattgatacattgtgattatttttaaatttatagtcgcaactgttttagatcagatttttaattcaatgagttttatgtccaaaattttagcattactctataaagtttaaacgtatttgaaaatcaaaattctactaaaaagcatctgtctacattatgaatgtggcgatgctttttatatttaaaatttataaaagaaataaaattgactatctagatacattcatagattaagttatgtatatattaattgttaacttttcaatatcagagggaaatgcgtatgaagtacaattagtaaattttgaaaaaataaagtcgagtgttaaactatgaataattaaatttaaaataaaacgagtcatagggggcgtaaatgtgatggagtcttttttaattcacactgacattcaaaaaaagtggattcgtaaatttaaaaagattgaaagtgaattcaaagcacgcgcagctgaaaatgatattcaatctagatttccatatgaaaatattgagtggctgataaaggaaggatatactaaactaactttgcctgtagagtatgggggtgaaggtgctactattgaagatatggtgattttacaaagttatttgggtactattgatggagcaactgctttatctatagggtggcatttaagtgtaattggtcaattgtacgagcaacatatgtggtcactatcaatgttagattcctttgctaaagaagttgttcatggtgcactgatcaatagagcagtcagtgaagcggaaactggtagtcctactagaggtggtcgcccatctacacatgctgttaaagctgaaaatggttatgttataaacggtgttaaaacctttacatctatgagtaaggcgttgacacattatattgttggtgcgtatgttgaagaaactaaatcaatgggattctttttaattcctcagtcaactaaaggtgtaagtattgctgacaactgggatatggttggtatgagagcgactgagagccatgatttaattcttgatgatgtttatgttcctaatgaaaattttgtagaatcaaaacgtgaatcaagacctaatggttggcttcttcatataccgagctgttatctaggtattgcacaagcagctcgtgactatgcagtagattttgcaaaaaattatcgtcctaatagtattacaggtacgattgatagtttacctacagtgcaacaaaatttagggaaaatggaaagtttattactttctgcaagacattttctatggagtacagctagagggtatcaatcatatacagaggatgcacaaatatggaatgaaacctcagcaagtaaagtggtggtaatgaaccaaggtatagaaatcgttgatttagctatgagaatagttggagctaagagtctagaaatgagcagacctcttcaacggtact

SEQ ID NO: 4412 - DNA, 3523 bp, Artificial Sequence
  Description of Artificial Sequence: synthetic nucleic acid sequence
ggagttatttttatgactggaaatcaaatgttttgtagagaaaatgaacttgatgaaagttttaaacaattagcatcttatatcaatattcctgtaggcgtattactgccatttaaaagtcaatgttttgtgagacattacaacaaaggacaaattgtctactattcgtctgatgaaaccacgcatatttacctactcttaaaaggtaatattatgagagaaaattttaatttgaatggtgatgtatatcgatatctgaatagagaaaaagtgctctttcctttaaataacttatttcaagataaagttcctaatgaaatgtgtacagccctaacagattgcgaaatgattggaataccaagagatttaatagaatatttatgcaaaaatcatgaagagatttttgtgaaattattctccttattaagcgaaacacagtgtcaacatattgaatacaatatggctttaacgagtaaattagctaaagaacgcgtgactaagattttacgttacctatgtcaaacagtaggttatgatcatgacgagttttatgaaattaagcattttatgacaatacagttattgagtgatatggcaggaatatctagagaaacgacgagtcatatcataaatgaacttagagaagagaaaatactatttaaaaacagtaaaaattggttggttagtaaagacttataatgagtgcgtatcactcatacataattaaaaacaagcgatggtcgaatagatttttatgaaatcattcactatcgttttttttatttcatgatttattgttttagaaatacatcatatttaaaggttagacaatcgatactaaatcaacttgtttaatatagagaataaaattttagttcctcattggaaagtatagaaatttatataatctatagtcaaagttgcgttttttctataaattaataaaaagaataagtaaaataatagataatacagtagaggagtgacatatatggctttaataacaatgaattacaattcaccaacgataggaatgcatcaaaatttaacgattattttaccggaggatgtaacattctttgatagttcaacaacagcgaaacatttgaaatcaatgttgttattacatggattgtctagcgatgaaacaacttacataagatatacaagtatcgagcgttatgcaaatgaacatcaacttgcgattataatgcctaacgtcgatcatagtggctatgcaaatatggtatatggacatagttactatgattacatattagaaatttacgaatatgtacatcaaattttaccactatctagaaaaagagaagataattttattgcaggacattcaatgggcggttatggaacgattaaatttgcgctaactcaaagtgataaatttgctaaagctgcaccactttcagcagttttcgaagcacaacgtttcattgacttggattggactgatttttcccctcaatctatcacaggcaacaatactcaaattaaaggtacagaactcgatacgtactacttacttgatcaagccatcgatgctaatgtagatattcctgaattgtttatcatgtgtggtaaagaagactttttatatcatgataaccttcaatttattgagacattaaataaaaaaggggtttcttataagtttgaagatggtccgggaaatcatgattatgcctattgggatagagctattaaacgtgcgattgagtggtttgttcagtaatgatacaaaggattgaatttggatatataggcggacatcttattaaacgaatatgaaaatgattgttactcgtcttagtattttcacttattgattttgtgcggtgttactgttaatccagatgaaaggtaagtcaactatagttatttattaaaatcgacatgttcacatatcgtatattgtttattaaagtgtatagcgatatgatgaaaataaatacaaaggtttatagaaggagagaaagtattagaaaatgaaaacagtatctaaatattttgtatatatgatgatattagttacgtttttcatagttgttagtgggtgttcgattaatcaatcttttagcgataaacaaaatacaaataaaacaatacgtgtggttgctgtaggtgataatttaattcacccagttgtatataaagatgcacaaattacggggaatagttttgattttaaacctatgtatcaaccagtaaaaaaagacattcaaaacgcagatatttcttttgttaatcaagaatcaccattaggtggggatgataggccttattcaggatttaaaaactttaatacaccgagtagtattgctcaggatttagtagatactggctttaattttgtaaatggtgcaaacaatcatgccttagatcaaggagagcaaggtgtaagaaatcatattcatacttggaacaaatttaaagatcaagttttgttcacgggtgtatatgaatcagaacaagcacaccgtcaaattcctattaaaacaattaaaggtgtgaaagttgctttattaagttacacatttggtacaaacgatcatcaaccaactcatgattatacggtagatacgtttgatgaaaataaaattaagcaagatgttaagaaagccaaacaacaaagtgatgtagtacttgtttcagcacattggggtaatgaaggtaagcatcagcctaacgccactcaaaaaaaatatgcacaaattttcgctgatgcaggtgttgatgtagttttaggtacacatcctcatgtgattcaaccagtaaaatgggttgacggtagagaagggaatcgtacacttgtagcatattcattagggaatttcttgaactctatagaatcccattataacttgattcgagttactttgacctacaggaatttgagatttattacggtatcgccagggattgaccatgccaatagtttcctttataaccgtattctcaaaagggccttttctatgaaaaagattaactacttgttctcttttcatatccaattgcgctctatatgtcatatgttgtaattgacaaccaccacactttgcataataaatacaaggtggtgtcactctatcatcactttcacttatgacctctatcaattttcctatagcaaaattctttttcactttaattaatttaaatttaatttcttcatcaattaaagcattaggaataaaaattggatatcgatcaactttaacaactccgtgtccctcatgagttaaatcaataacctttcccgttttaacttcgtttttcttaattgtttccaattttttccctcccacatacaaaaaggttaggaatataatgtgtggcattcctaaccttaaatttgatgtcgtaataattttattgcttacttgtaggggcttctgaaaattgtgtttgtgtatcattatctgaattagctttgatagttggaacattcggtgcttctgcattgcctccttcttctgtcttcgttggctcagattgaggtgcttct

SEQ ID NO: 4413 - DNA, 1595 bp, Artificial Sequence
  Description of Artificial Sequence: synthetic nucleic acid sequence
tatctagtactgtaccttctaattcaattacatcttgtttagccattgattaacttccccctttttgcaatagtaaggtaatcgtcaatagacaacttaacgatacgaatctattcgtgatggtttaatataagttcaacaaaaatacgggaattaaatatcgttatttgtcactcattctgttaaatttactctaatactcactgaaacatagatcgtatagtgttgatctattataaatgatctaagatatcaatgacatcgttggttacttcgtcaatatcttttgaaccatcaatgtttttcaagacacctttgttgttgtaatattctaaaataggcttagattgtttaacattaacgctcaaacgattagatactgtttctggattgtcatcttcacgttgatataactttccaccatcgatatcacatataccatcaacctttggaggattaaatacaagatgatatgttgtaccacatttctcacagatacgacgacctgtaagacgattcattaattcttcctcaggaacttcgatattaatgacagcatcaatttctctatcaagctcagacataatttgacttaatgactcagcttgatctatagttcttgggaatccatctaacaagaatcctttttttgcatcgtcttcagaaattctttctttaacgatacctacagtaacttcatcaggaactaattctccacgatccatatatgatttagcttcttttcctaaatctgtttcatctttaatcgcttttctgaacatgtcaccagtagaaatatgtggtattgggaatttcttaacaatttcactcgcctgagtccctttacctgcaccaggtaagcccattaaaatgatattcataaatgccctcctacaaattatctaccaccaaagcctttatattctttttgagtgacttgtgcttctaaagttttcatagtttcaatagctacaccaataacgatcaaaagactcgtaccaccaatttgaattgattgtggtaagcccataaatttagtcgcaattataggtaaaatagctatagctgctaagaaaattgaaccaacaaaagtcaatctataaagtactttagtaatatatttttttgtttgttcaccaggtctaattcctgggacataactaccttgctttttaaggttatctgccattttttcaggattaacttgtacaaaagcataaaaatatgcaaatgcaataattaaaactacataaataatcattccaatattacttgatgggttggcagtatcagcaatattctgtgcccattctgctttcgggaagaataaagtcaatgttcttggtaacaagaaaaacgccatcgcaaagataactggaataacaccggcagagttaactttcaaaggtagataagttgcttgtgaacctaatcgttgagcagattgtttctttgcatattgaataggtattttacgtttagcttcaagaacaaatattgcgcctactgttagtaaaatcaaggctacaatcaatcctagtattttcagccaagcaagtgaagtatcgtcttgacctacaaacactgattgtgca

SEQ ID NO: 4414 - DNA, 2112 bp, Artificial Sequence
  Description of Artificial Sequence: synthetic nucleic acid sequence
aataagttgtcctttgagatagttattaaattggaaagccatacctatagattggataaaagctaaaattatagcaaaataacgagttacgttattaatttttcttctacccatttcaccttgttttgcccactctgtaaatttaggaacaatatccatttgcagtaattgcatgacgatggatgcagtgatataaggcatgattcccatcgcaaatattgagaaacgtttcaaggcaccgccaccaaaagtatttaataactcagtggcaccttgagatccctgtggatgattaaaggcttcaggattaactcctggagcaggaatatacgttcctattttaaaaataactaacattgctagagtgaagaaaatcttgtttcgtacttctttagttgtaaagaaacgtacaaacgtttgaaacattagatcacctcgtgtgctccaccttttgcatcaatagcttctgctgctgaagctgagaatttatgagctttcactgttaatttcttgtctagtgaaccgttacctagtactttgataccagatttttcattcttaacaacaccagattctactaataaagctggagtaacttcagtaccatcttcaaatttattgagttggtctaagttaacaatagcatattctttacggttaatgttagtgaaaccacgtttaggcaaacgacggaataaaggtaattgtccaccttcaaatcctggtcttagtttaccacctgaacgtgctttttgacctttttgaccacggccacttgttttaccgttaccagttgcagcaccacgacctacacggttacgtacacgacgtgatccttcagctgcttttaactcatgtaatttcatttcggcacctccttaattatttttcttcttcaattgttaataaatgcttaactttgttgatttgcccacgaattgcagggttatcttcaacaactactgaactattagtctttttaagacctaaagcttcaacagttttacgttgtgtttcaggacgaccaataacactacgagtgagggtaatttgtaatttagccataacttattttccctccttaattgtataattcttctacagatttgccacgtaatttagcaacatcttctgcattttttaagttttgtaaaccgttgatagtcgcacgaaccatattaataggattatttgatcctaaagatttacttaagatatcagtaattcctgctaactctaatacggcacgaactggtccaccagcgataactcctgtaccaggtgcagctggtttcataaatacgctacctgacccatattgaccagttatagtatgaggagtcgtaccttctacacgtggaacaactactaaatcttttttagctgcttcaacagcttttttgatagcttctggtacctcttgcgctttaccagtaccgaaacctacacgaccatttttatctccaacaaccactaatgcagtgaaacggaaacgacgaccaccttttacaactttagcaacacggttaatcgtaacaacgcgttcttcaaattctttagtttcttcttctctacgagccatgaatgtgtccctcctttaattaaaattctaatccattttctcttgcagcatcagctaaagctttaacacgtccgtggtataaatatcctccgcgatcgaagacgatttctttaatacctttatcgttagcttttttagcaatttcttgaccaacagtagttgctaagtcaacttttgaagctgatgtgtttgcaatatctttatcttgtgatgatgcttgagcaagtgttacgcctttaacgtcatcaataatttgtgcatagatgtgtttgtttgaacgatacacatttaaacgtggcttttcagctgtacctgataatttagtacgaacacgagcatgtcttttcaaacgtactttgtttttatcaattttactgatcatttcaatactcctttctttagagtgttatctattatttaccagttttaccttctttacggcgtacatattcaccttggtagcgaatacctttacctttataaggttctggaggtcttacagaacgaatgttagaagcaatcgcaccaac

SEQ ID NO: 4415 - DNA, 3069 bp, Artificial Sequence
  Description of Artificial Sequence: synthetic nucleic acid sequence
ctatattatttcaatagaaattgtctttatttacttatcttggaactttttgtcccagcctttttcctacgattagtcaagtacttataattaaaataagcattacttaactaaaccgttcattttaatttttttgaataaggtgttaaactatatttgattgtacgtttggctaatgtggtgacatttgataatcgtacaatttatgattcattacaagataatgaattgtttttaataatcgatttatacaagcaatgatggcagtcttatgaggtttctcattaggctgctttcttagtttgtagtaataatcgacgacatgattgtcataatgatgctgccctcttattatattcataatcacccaaaataaaagttttctcgcttttttattaccacgcttgttgatggtatctctacagtgtgtatgacctgattgatatcgtttgatatcaatgccaacaaaagcattgagttgtttatttgatttaaatcgcttaatatcaccaatctccccaataatcatagctgtgcttagcttaccaataccaggtatcgaatgaatattttcaaaataatcgagttgttgtgctaattgaatcatggcatcatctaattgtttgagatgatgaatagattgttttaattgttgaataagtaagcgtaatttttcgactagaaaggaatgtctatcgacactaggatagctttcttgagcaatcacccttaattgaagtgcatattttgtagctttatccattgacattcccttatctgtagaattgaatatatgtgtaatcagtacctccttgtcgatatcaagaaccatgtctggatgagtaaagatttctgcgatgttgagtgcaatgattgaatatcgactactaaacaatctttctaaaccagggaatgtttgatggagtaattcaaggatctgaaatttaagtcgattttgttcattctcgatttctagatgaaaacggacgcgttctcttaattcaaagaatattaactcatgtataggtaagctgtctgtttgtttaagcgtcggtcctaaacaagcaagcttatgagcatctgcctgatcagttttccatgatcttagagcgctcgttttaaatttggcttctaacggattcatttgaatatagttaatttgatttacacaacaaaatcgttccatacctcttgaatagatacctgtagattcaaaaatgagttgtgggtggtctaagtcattcaaatacttgagtaaataattgtaaccatttttattattctggatgaaaaactctttttggaattttccatttttataatgtgcaactacactacttcttttactaatatcaacacctaagtaatcgataaaaaaacctcctttgaataattgagaagctaaaaactttacttaacctttctcatttcattttcctatacacggtttcaagaacccaacatactacaaacgaatttcaaaaggcgagagtaaagctgacttgttttttatacggatttaaaatccaagagtctggacagtctacttctctctataactataaaaaatagctatgaaaaaatctatcgtcatagatttcttcatagctaatcttagtatgtttttaataatttaattgtcagtgtctaagttgaaaatgaacctgacaaatagtatttataaatagagttagaattgaattcaatgatatgatgactcactttcctatgttaattcatgattctctttatattcgttatattttcttagtagtgtttcaaagaaaatgtgatagctaataaaactggaataatcagtaccatcgtttaaatagaaggtattgcttgaaacatagacattgtaatcagcttgttgtgccaatgtattgtctttcattgttgttacggaaataaaatatttttgtctcagttgaagcaattgtgtgacttctttaagttgatgtgtttcgccagaaagtgaaatgatgaaaaacaaatcttctggaattgtcttgtttaacaccatctttagttcatgaacatcatgtaacaatataatatttttatgcatagtcaacagtatacgttgtgcttcttcagcgacattcatctgtgcacgtccagtaccatataagtatattgttgtagcatgatgcattttgtgagttaataaacgataatcaatacgttctaaatagttgaatgtattttcaatttcttgtttaaattgctccatagaatcagaaggaagttgatgattcttactatcttcaaattttaaaaaggatttaaagtcactataaccatcaaaacctagtttacgagtgaagcgatgaatcgtagcatttgaagcatgtgtctgtgaggctaaatcttgtattttcatatttttgcaaacatctatatgtgtattaacataatgtgcaatttgtatatcattatcatttaattgatcgaaattagagtttacacgttcatctaaaatcatcttaacacctcatcactgaaaatattttctttatatgaaaatataatctaattatacaaaaatgtttcaaagtgcgtcaacgtcattgtcattatgtaagcgtttactatatattggtaataacttattaaataaagagcaataaagataaacatatattagttatcataattaagggaagtgggaggtattcaaaaatgaatgcaattaaacgatttggtagtgcaatgatagtacctgttttaatgtttgcttttttcggtattgttttgggattcgctacattatttaaaaatccaaccattatgggaggattagctgatcagcaaacattttggtttaaattttggtctgttattgaatcaggtggttgggtaatatttacacatatggaaattgtctttgtagttggcttaccattatctcttgctaaaaaagcaccaggacatgcagctttagcagctctaatgggatatttaatgtttaatacttttatcaatgcaattttaactcaatggccacatacttttggcgctaatttaaaaaaaggtgtagaaaacacaacaggattaaaatcgatt

SEQ ID NO: 4416 - DNA, 3183 bp, Artificial Sequence
  Description of Artificial Sequence: synthetic nucleic acid sequence
tggaaaaatttaggcatcccttatcaactcgaaaatgttgaaccatctgacgatgaagcggttaaagaagcttatcgctatgttaactttaatggcaaaatacccgtaacattatagaaagataaatatagtaatagcctgagacatcaatcgttgtctcaggcttctttacgtttaatcagtcgataaactgagtataaaatatatctcaattaactttatttaataaaaatatgattcataagtttaaatagtttatttttctagatatgctttaaatacatctttataaacatcgatgtaacttaaatacatatcttttctaataaattcatcaacttgatgcgccataatagattcaccaggtccaaagacagcaaaatccacgttattttcatttgttcctaggaaactagatgcatcagttgtaccaatcaatgcactcacaacaatgtcttcatgtacataattcggtgcaatacgtgtaatattttgaataagaggattatcacgatcacttgccactggatcgtgactgctaggtatatctacagttaaataatcttcgcccacatgacgaatgactttttcaaataaatccttcacgaaagtactgtcatattctggaacagttcttacattatatttagctgtcgctttatgaggaacagaattaacttgtttaccaccattgaatacagagtttaacattacaaatccagagtagatatgtgattcttcttcaccaatttttctgtggagatgtttctcaatcattggaacagcgtctaactcgtgtactttatcatgttctttaatatttttatattcttgtttcatttcatttacaaaatcaactaaaatatcaacagcatttgtacctaggtgtggcatggaactatgtgcagccttacctttcgctgtgactacacagctcatagaacctttatgagcatagtaagcgatattactagttggttcgccaataattaaaccactcacatcatctaagtaaccttcatcagctagtaattgtgcaccatattgttccgtctcttctcctgtagtagctaataaacgtatcgtaccttgctttaatgcgtttgattgttttaattcaatcatcgcgatgaccatcgccataagaccacctttcatgtcagtggtacctctgccgaataacttgccatctttatctgtgagttcaaatggaggaaaagtccaatcatcatggtcaccagcatctacaacatccatgtgtccactgattgctaagactggagcgccactaccaatttcagcaactaaattagcgcgtgaatcattaactttaacaatcttagaatcaatatcatattgacttaacaggtcttttaagtactcacatactttaatttcatgatcattctcagtttgaatcttgacgatatcagctaataatcttattttgtcttgctcactcaatacagtcatttcacagtcctcctcatttttagtaatgattttcactttttaataaaaaataaaaatccttgtacacttaatattatcaaaaacttttattaattaaaaattatatgctaaaataaatggatttttaataaaaaataaatattaacttaacatttcttataaaaaacaacaatgtatagaaatattaaaaatttttcattatttatagtttgaatcgtgttataaaatgaaaagctatgagattaagatgtaataatacacacatatataaatataacttcgtgccacgcagacggttaaaatcatgtataatagctaataatacatattaggagatacataattaatgatgaaaaataaattaacattaaaagagaatctatttatcggctcaatgctgtttggtcttttttttggtgctggaaatctcatttttccaattcacttaggtcaaactgcgggggcaaatgtatggaccgccaatttaggatttcttatcacggctatcggactaccttttttaggaattatagcgataggtgtatctaaaacaaacggggtctttgaaatttcctcaaggataagtaaaatatatggttatttgttcacaattggcttgtatcttgttataggtccgttttttgcgttgccaagacttgcgacgacgtcatttgaaatagcattttcaccatttatttcatctggtacggcccaagcgttgttgcctatttttagtattttattcttcggagtagcgtggttattttcgcgtaaaccttctaaaatattagactatattggaaaattcttaaatccggtctttctcatcttgcttggaattgttgttgtgcttgcatttatccgtcctatgggtggaattagtcatgcgccagtaagtgctgattatagcaatagcgtgttactcaaagggtttatcgatggatataatacattagacgctttggcatcattagcatttggtattatcattgttactacaattaaaaagttggggattactaatccgaatacaatcgctaaagaaactttaaaatcaggtacgattagtattatagctatgggcgttatttatactttattagctttaatgggtacgatgagtttaggtcgttttaaagtaagtgaaaatggtggtattgcgcttgctcagattgcacaacattatttaggggattacggaattattattttgtcactaatcatcattgtggcatgtctgaaaacagcaataggattgatcacagccttttcggaaacatttacagagttattccctaaatctaactatctttggttagctactggggtgagtatattagcttgtatatttgctaatgtaggtttaacaaaaattattatgtattcaacaccagtgttgatgttcatttatcctttagcgattactttaattttattagcattacttagtccattatttaaacattctaaaattgtctatcgatttacaacattatttacaatggtggcggcatttgtagatggtgtgaaagcaagtccagagttctttgttaatacaaaatttgcacaaacaatcattggatttggtgaaaattatctcccattctttaacattggtatgggatggattgttccagcacttattggtttcattattggtattattgtatactttatgactgctaaaaaatcgtcccacgtacaataagg

SEQ ID NO: 4417 - DNA, 3078 bp, Artificial Sequence
  Description of Artificial Sequence: synthetic nucleic acid sequence
gatggcaacaacatctttcattttagcctttccgatggcaattatttggccaacgattcaaaacggtttaaatgcatttagtgaggggttattagattcaaatacaggtttagctgtatttttatttggatttattaagcgattattaataccatttggtttacatcacattttccatgcaccattctggtttgaatttggttcttggaaaaatgctgctggagagataattagaggcgaccaacgtatttttattgaacaaatccgtgaaggtgctcatttaacttctggtaaattcatgcaaggggaattcccagtcatgatgtttggattaccagctgcagcattggctatttatcaaacagcaaaacctgagaataagaaagtagttgcaggtttaatgatttctgctgcattaacatcatttttaactggtattactgaaccattagaattctcattcttatttgtagcaccattcttattcgtaattcatgcagtattagatggtttatcattcttgacactatacttgttaaatgtacatttaggatatactttctctggaggatttatagattatgttttattaggtattctacctaataaaacagcatggtggcttgtcatcccagtaggtattatttatgcagtgatttactactttgtatttagattccttattgttaaatttaactataaaacaccaggtcgtgaagataaaaaatcatctgtaacaactacatcggctagtcaactgccattcgatgttttgaaagcaatgggtggtaaagaaaatattaaacatctagatgcttgtattactagactaagagtagaagtaaatgaaaaatcaaaagttgatgttgccggccttaaatcattaggtgcttcaggagtacttgaagtcggtaacaatatgcaagctattttcggtcctaaatctgatcaaatcaaacatgatatggctaagataataagtggagaaattacaaaaccaagtgaaacaacaattgatgaagaagtgtcagatgatcctgtacatgtggaagatattgtagaaacagaaatttacgcacctggacatggtgagataataccgttatctgaagtacctgataaagttttctctgaaaagatgatgggtgatggtatcggatttgtaccagattcaggagaaattgtagcaccatttgatggtacagttaaaacaattttccctacaaaacatgcgataggattggagtctgatagtggtgttgaagtgttaattcacattggtatcgatacagttaaattaaatggtgaaggttttgaaagtttggtaaatactgatgaaccagtaacacaaggtcaaccattaatgaagattgatttagaatacttaaaggaacatgctccaagtattattacaccagtaatcataacaaaccaagaagacaaaacattaacaattgaagatgtaaaacaagtcgatcctggtaaagcgattatgacaattaaataaagcctataagaataacttaatggctaaaacaaataagtctgggacaaggatatattatgtcccagactttctttatgtatatacagattcttatgagatgagtccaacacagagaatttccgaagaaattccacggacaaagcaagttggggttggggagaagacaggggacaatgaattctatcctagtttagcgttcattttaataaggggaattttacaaagttgacaagcgtgataattataggcaatgttgatattggacatatcattttaaagagaaaggaaagatggtaatcatggatgacttgaaacaaaatcaatcttctaacgaaaaacctaaaggtaataaaataattaatattttgatattcatcggaatgattttattaattcaaatacctattggcgtgtcactaatagctttacctttttcagtgaaattcagtaagttaacatccatcgcattaagtatgctaataactggtacagcactattaatcatatggttagttaggaattattatttgagtcatacatatgaaagacaatatcaatcaatgaggggaaaagatatctttattaatattggttttctggtattatcaatggtttttagtattctaagtagtgtattaatggtcatatttactggcaacgatactacagcgaatgagaaagaaatcaatgaaagtttagatttacttttacaaaaagaccatttaccacatatttcaattgttgcaactgttgttttaatgatatgtattataggtccgtatttagaggaattactcttccgaggaatttttaaagaaacattatttatgaaatatcgattttggctaccattcattatatcttctattatttttagttcacaacatttatcaacaaatatattttcatatgcaatttattttctaatgggttgtgtattataccttgcctataacagaagacgtaatatcaaagatagtatgatggttcacatgttgaataattctgtttcaacattaccggtatttgttggttatttatggctatattttagatagtaaacataacaataaagacctgattaaaagtagatttatcttttaatcaggtcaattttatatgttaaattgtgatatcattctctatgattaatttaatcgctttatgatctgttgcatttctaaataaatcataggcactttcgatttcactcagtttactataatgtgtcacgagttgttctggttgtattattttgctttttaacgcttcaagtaattcttcagttgtatttcctgaaactaaaccagtagttacgttaatatttttaatccataatttatctatatcaagttgtacaggtaacccatgcacaccaacattagcaatcgtaccatcgacaccaattaaattttgacataaatcaaaggtttgtggaattccgacagcttcaatagcaacatcaacaccacgtggatttaacgattttacctttttaattgcggtttcagtctctttagagttaattaaatgcgtagcacctagttctttagcggtttctaatctattat

SEQ ID NO: 4418 - DNA, 3015 bp, Artificial Sequence
  Description of Artificial Sequence: synthetic nucleic acid sequence
attaattgaaggataaatctaaaattaattcaaaaataaagagtagccatttaggctactctaaattataaacattttactctactgtaaccgatttggctaagttacgaggtttgtcaacatctaaatctcgttgtaacgcagcataatatgagattaattgcattgtcactacagatactaaaggagttaataattcatgtacttgtggaatcacgtatgtgtctccttctttattcaaaccttccattgaaatcatacaaggatatgcaccacgtgctactacttctttcatatttccacgaattgatagattaacgttttcttgtgtagctaaacctataacaggtgtgccatcttcaatcaaagcgattgttccgtgctttaattccccacctgcaaatccttcagcttgaatataagaaatttcttttaattttaatgcaccttctaaactaacattataatcaattgttcgtccaatgaagaatgcattacgagtagtttttaagaaatccgttgcaatttgctccatcttaggtgcatcgtcaacaattgtttcaatagctgtagtaaccttagctagttctcttaataaatcaacatcggtttcacgaccatgatttttagcaacaatttgagataagatagataaaacagcaatttgcgctgtatatgcttttgtagatgcgactgcaatctcaggtccagcatgtaaaagtaatgtatgatccgcttcacgtgataatgttgaaccagcaacattagtaattgttaatgatttgtgacctaacttatttgtttcaactaatacagcacgactatcagctgtttcaccagattgtgaaatataaataaatagtggtttttcagaaagaagtggcatattatatacaaattcagaagctacatgaacctcagtaggtacacctgcccatttttcaataaattctttaccaaccaatccagcatgataactagtaccagctgcaacgatgtaaatacgatcagcatctgctacatcattaataatctctgaatcgatttttaaattacctttttcatcttgatattcttgaataatgcgacgcatcactgcaggctgttcatgaatttcttttaacatgtaatgatcatatacgcctttttctgcatcagcagcatctatttctgccgtatacgtatcacgttgttgaatgtgcccctcaagatctttaatttctactgtgtctcgcttaacaataactatttcatggtcatgtatctctttgtattggtttgtagtttgtaacattgctagagcatcagaagcaataacattgaaaccttcacctacacctactaaaagcggagacttgtttttagccacataaatagtatctttatcattatcatctaataatcctaaagcatatgaaccatgtaataatttaactacttttgtaaatgcatcttctgtagctaatccttgtctagaaaaataatctactaattgtacaataacttccgtatcagtttctgatgaaaaagtgacatcagataaatattcagcttttaattcttcataattttcaattacaccattatgaactaatgtaaaacgtccagatgttgactggtgtggatgtgaattttcataatttggaacaccatgtgtcgcccaacgtgtatgaccaattcctaacgtaccatcctcatcactattatctgcaactttacgtaattcagcaattcttcctttttctttaaaaagttttgtaccatcatcattaactacagcaatacctgctgagtcataaccacgatattctaatttttctaacccttttaatagtaattctttggcattatcgtagccaatataaccaacaattccacacatataatatcctccaacaaatgggataacacggctattatgattaattatcactgcttaaatttgataatcccctatcataatcattatcaacgaatacatcatgaaataagcgtgctattatatgaattttatacacgctatccgtagtttcccaaaataatttatttagtttggcgatcttattaactttgtccactaagtcaccttaatgatttacttaataagctaacgaatgtgccacatccgggatagcatccgccgatctgattcgatcactatcctcctcgtctacaaaatccaaatcgttatctataaaagttctactattttaacttttaatacttgataactatttaggtattttgcacaggcgctttaattattaataacctagactctcctcctttccattaatattcattgtacactgtcaacgaattaatttgcaaacgatttaacagtatttttcacaaatagtaatagttctgaatagatacatcgatgaattattctcaaaataaaaaaatatatttttcaaatctttttaaaagataaaattctgttaaaaaaaacagatttatgtctgtaacatcataaatctgttttatatatgaatttaaacatgaaagtattatttatctaagcccattttgtcttcaacaacgtcagcgatactttgagcatatctttcagcatccgcgtcagttgcagcctcaaccattacacgtactaaaggttcagttccagaaggacgaacaagaattcttccttcaccattcatctctgtttcaactttcgtcattatctcttgaacatgaatattctcttcaacacgatatttgtcagtcactctcacattaattaaagattgtgggtactttttcatttgagaagctaactcgcttagagttttaccactcattttaataacggaagccaactgaacacccgttaataatccatcaccagtagtattgtaatccattaatacgatatgaccggattgttcaccaccaagattataatttcctcttctcatttcctcgacaacatagcgatctccaactttagttttgtttgactgaataccttctttttctagagctttgtagaaaccaaggttactcattact

SEQ ID NO: 4419 - DNA, 1609 bp, Artificial Sequence
  Description of Artificial Sequence: synthetic nucleic acid sequence
ctttataatccgtgcctttatatgaaaatctcagtatcaaattgaaaggaccgaaattcatcggtccttgtaaaacgccatcgctaccattaacttcaatctgattggacttcctatctaaatcctcttcttcaaattctagaaacttaagatgaggaatatccgttagtgtttcttcgaaatgatcgttaaatatttttacttttttattttccaatttataaacctccctggctataagcagcgagtcttaaccttgaaccttgtgcctgacttacatcgcgttctgaaaaacctttcggttgtttttcaatagttttattacttcgtgctatttccattaacacgtttatttgtttctgttgattttctatcatttgtagtagtaattctgcattatcaactgtattactagtaacattaggtgtacgtaattggttaggtcgtttatttctgttatttccactaattttacttgcagcaagatgtaacaatttcatcgcatctgattgtctgcttggatctgtagggattactatctcagggtatccatcttctgccaaattatataatccagcagtgttaataaccccgcctgtagcataagcataatctccagcacgtttaaatgcacttctccaactccccataataggaacccacttacctacaatgtaacgcatagcagatatagcttcgtcagttggatttaagatgtttccgtgtcctggtttagcatatgctctaaaagatggttcaatcatttggaacatacctttagaaggcgttcctttttgtgcgttgatgtcccagttattaaccgcatctgattggaagttagactcacgtttggcaactctcatcatttgttcggtaatataagacgatttataacgtccacctaaaatagattgtgctctttgaattgctctacgtgcgtttacagaaccactaccaccaacttttccaccaccgtgacctttgagccatttagcagggtttactgtccctctgtttgtgatgtcatcatggcgacctctttcaacttggaagtgtacgtgtggaccagtagtccattgacctgaattacctgttttagccattggttctccagctttgattttaccttgttttaatattttagataagtgcataaagaacaatgtgaactgacctgttaaaagtcgtgcaacaagtcctccacctaagttgtggatagcttttacatttccatcattggtagcattgatagttgtaccatatggagcgccatagtcaataccaaagtgagcaccaccattaaaactataaccaggagcaccaccattaggataataccccgtagtaattgggaatttagtgaacgaagaaccatctccaccgcctgcagagtctaaaccttcattaaagaagtctttaataccatttttaagtttcttaatcatagctgtcattaaatcaaatggtaatggtgcatttttcataaagtctaggttaaaaccaactttctcaaagactttatttaccaatttcataggatgacctacataatcaaaaacatctccaatacccttgataacagtgctagacacatctttagctttatcaa

SEQ ID NO: 4420 - DNA, 2653 bp, Artificial Sequence
  Description of Artificial Sequence: synthetic nucleic acid sequence
cactacaactaaaacactaagtaaacctttacgataaataggtagtggtctaaattgtacttgttctccgtcagcatcaccaaaatacattataaacatcactctaaaaagactatacatagcaattaaacttgtcacaatcataagtgctaaaccaatataattaccatttgtaatagccccttggaatattaagactttacccggaaagccactaaaaggaggtacgccacctatagcaaaaattaccacgacaaatgcaacaccaaagaatggttctctttttgccagtccacttaaatactgataatttcgatagcctgacatataaacaagactaccaattacaaaaaacaataatgtcttaacgataatatcattcgctaaatagaagatagcaccatttacacctgatatagtatgagaacctaaacctaaaataatgaatccaatagacaaaataacttgataagccgcaattttcttaatatctttgtaagcgatgacaccaaatgcaccgataatcattgtgatacaagccataaacacgagcaatgtatgcgtgacgcttggatgatggtcgaatagtaaagtaaaaaaacgaataagcgcataagctccaacttttgtcatcaatgctgcaaataacgcggcaagttccgtattaagcactgcatatgctttaggtaaccacatgaaaatcactagtgctgcctttgaactaaaagcaactagaaatactaaagatatcatcgttattgtttggttattttccatatgattcaatcgcatcgctaaatgtgagaaattaagtgttccgactgtcttatataacatgccaattcctaataaaagcaaccacgaacctaaaatattcagaacaacatatactatcgctgcacgtaattgttcaacagattgtcctaatgtaacaagtacaaacgaagcaagaagcataatttcaaacatcacgtataggttaaataaatcagaagttaaaaacgaaccaataacacctactgttaataaaagaataaatgtaggaaggtgaaatcgattgactcgcttctcccctctaccaaagccgtatgccattattagcgtaacaacaaaagatgatactgacaccataagcagactcagtgaatcacctagaaattgaatgccgaaaggtgctttccatcccccaaaatcaagtgttatcggtttatgattaacgacataaataagtaaagcaattgaaatcattgtattaacaatcatagttgtaatggataggattttcgaaatacgatttttatttttagtgaagactaaaattaaagcacatacaaaaggcaacaacataggcaatattattaaattactcatcatcttcatcacctttcaatgcacttatttcatcctctttagttactctgtaagttctatatattaacaccaataaaaacgcagtcataccaaatccaatcacaatagctgttaaaacgatagcttgtaataaaggatcaacaaagttttgagcatgaccttgaattagcggttcagacatatgaggtccatatttccccatactcataataattaaattaccggcgtgtgtataaatagaaataccaataacaatacgaattaaattaatagataaaatcatataagttccaataaacactaaaaatcctatcacaaggagtaatattaaattcatgatctacccccacttatagatagcataactgtaacaatcacacctactactgttaataagatgccaagctcaaataaagtcacagtagtaacatgaacatgtcctagtaatggaaatgttacatttgcttcagtttgatataaaaatggcttcccaaaaaacataggcactgatgcagttgcaacagatatgagtgaacctataatcattaattttttaaaatcaataggcaagcttttcaacacttcatttacatcaaaggcaagaaacattaagataaatgccgagctaaaaatcaagccaccaataaagccaccacctggattattatggccagcaaaaaatacataaaatccaaatgttaacaaaataaacactacaatttttgtaactgatttaagtactacatcattctctttcatcttgccccctcctatctttgtaattaagtaacgtataaatacctaatccagctatgattaacactagtccttcaaacatagtatctaaagctctgaagtcacctagtatagcattgacaatattttttccacctgtaagttcatatgcatcttcataaaatttagcaattgaaggcataccatctgcttgttgagcaacaaaaataagtgataccaccgtcaatgccataacaagtgacacaatgattttgaaggtctctttttttaaatttgccttaactcgagggatgttaggtagtctcgaaaaactaacaataaataagattgtcgtaatagtttcaacaactaactgtgttaaagctaaatctggagctttcattgcaataaaatataatgtaactgcgaatccaatcattccattcaataccaccatcgttagtcgttgacgaataaagattaatgaaatgccgataatcaatgttacaactgataagataacttccaacggtccgaaagaactaat

SEQ ID NO: 4421 - DNA, 2751 bp, Artificial Sequence
  Description of Artificial Sequence: synthetic nucleic acid sequence
tgttctccatcaccatataaaatcataaataatgatgacatcaaggcaaagagggttgtaactaaaataaatattgcagttattttaaattctgtaccgttaaataaaagtaagaacataaacattaatatgacgatataaatcataaagtcgaagttatggataaatataatgaaaaagaataatgcgatacctaaaagtaacttagtaataatatttacatcatcaacgaaggtgtggcgttttttccatctttcaaacaatgtgttcaccttccatttctttaagacatccatcttccacgcgtaatcgtcttgttggatatcgtttaataatttctggatcatgtgtcaccatgataattgtttgaccttgattaacgcgttcttgaaataacttaataagttgaaatgtattatgactatctaggccgaatgttggttcatctagtaaaataatctctgcctttgaacttaatgctgttgcaacacttaaacgacgcttttgacctgttgatatttcaaaaggatgatgatccttaacttgatctaaatgtaataattttaacagatccatggtttcatcattcgcatgcttaggatctaagtgattataatgaatatacacttcaaaacaccatttttctaaaaaagtagttaaattttctaaaggagttcattcaggaaacaaattagtatctgctgctagtaaacttagtaaaaatggttatgttaaagcatcctcggctatttataaagcctttgattttggattgaaaaatgaattaaaaggtagctatttttacacagcagctaaaaaggtacaggcgtaacaatttcttatgatatgtatactgcaacaacaggtccgaaccatactatagctaagaattttaaacatagttataattaaataaatgtgaggggaaagattaatctttcccctcacatttattttcaagcttttttgaacggttgaattttagaccataatttatgaattcatagatattagataatatttcagctattattcttaaaatattttccattatcatcactactttcaattttattcagtatatttaatttttctctcgaatttttttatatccccatttttatatttaacttcataaagaatactttctcctaataaatcttttacattatcgtatttgtttgctacacctttccaaatcaatgtatctttagtatcttttttaataccgtcgttagtaatttcttttgcattgttatttttatatcgatacactttcccaattttttcaggtttgttattttcttttttatttactgtaatattaacagctttacttgtaggattaatttctaatgcactttttttaattggtttttctttagaactattactacatccagtagcagttagaactaaaataagagaaataataatactaaatattgcttttttcattctgatcatccttttttgcttattcaagattaccatattcttcatttaaatattttgatattaaattttcaatttgtttagatatattaataccatattttgtttggttctgttgcaaagttgaatttatagtataattttaacaaaaaggagccttctgtatgaactatttcagatataaacaatttaacaaggatgttatcactgtagccgttgggttcaagaatatgccccaattttatatcaaatttggaagaaaaagcatcaaaaagcttattacaaatggcgtattgatgagacgtacatcaaaataaaaggaaaatggagctatttatatcgtgccattgatgcagagggacatacattagatatttggttgcgtaagcaacgagataatcattcagcatatgcgtttatcaaacgtctcattaaacaatttggtaaacctcaaaaggtaattacagatcaggcaccttcaacgaaggtagcaatggctaaagtaattaaagcttttaaacttaaacctgactgtcattgtacatcgaaatatctgaataacctcattgagcaagatcaccgtcatattaaagtaagaaagacaaggtatcaaagtatcaatacagcaaagaatactttaaaaggtattgaatgtatttacgctctatataaaaagaaccgcaggtctcttcagatctacggattttcgccatgccacgaaattagcatcatgctagcaagttaagcgaacactgacatgataaattagtggttagctatatttttcactttacaacagaaccgacgcatttttctttaaaaacaccaaaatagtttgaatttatggaagactatttgaattattcattaaaaatattatacctaggcatattttgacgacgcatattcaacgcatgtaattcttctagttctgttttaatcgattgcattaaataaccttgcatagcttcaactgtttcattcttttgtaacaacatcgctttaaaacgttttaaaacactagtaatttcaaattcaacatcttctaaacggtaatatgtattatttgtattattaaaaaactttttcccttttagtaaaacacttttaatagtacgaatatctttaacttcaaaattacttaaataagttttgatttgatctggtaattcttcaagtaattggaattttaaagcatcattgttaaattcagtgtttagatgatttgcatgacttgaatgtgttttggttaaaatatcattcatatcattcatatcattactattagtctttata

SEQ ID NO: 4422 - DNA, 3017 bp, Artificial Sequence
  Description of Artificial Sequence: synthetic nucleic acid sequence
gttcattcgtttcgtctagtgccttttgtacagttaatacttgagagacaatctctccggcctctaaattacgctttaatccgcccaaagtggaagcacaaaacgtacaaccaattctacatcctacttgtgttgttacacagacagaatttccatattcatgtctcattaaaacagtttcaatagtataaccatcttgtaattcaaataagaacttaattgttccatctttactttcttgtttaacaacagtggtcaatgtcgtcattgcaaaatgatctttgagaatttgacgtaactctttagacaggttagtcatttcatcaatagtattcacacgcttttggtataaccattcaaaaatttgttttgctctgaatttttgttgtccgtgatcaataagccattgttgcatctcgtcatatcttaaggagtagatcgattgtttttcgaaattaggtaagaatttgtttttcttctttttttctgcagttatcatctctaactttcctttctttttatcttgctaataaagaatccatccgaattaaaatcttgtggaagtatctgtaacgttttaacctgttcaccagtcgctggattttggaatggttcaaactcaaaatctttatgtctctttaaaaaagtatagatgacattttcgttttccatttgttctattgtacatgttgaatacactattgtaccaccaggtttaatattatctttaacattttctaaaatttgtaattgtaattctactaaagacttaatgctattttgtgattgactatatttaatttcaggtttgtgtctaagaacacctaatccactacatggtgcatcaacaagaatcttatcatacattttatcgtatacttctgtagcatcatgttgaaaagccttgatattattcaatttcaattttttaatattttgctttataagatttattttatgttcatgaatatctgttgcatcgacgtgaccttctggtgaaagaatttctgccatatgacaagctttaccaccaggtgcgctgcacgcatctaaaactttgtcatctcgccctaggttcattacataagctaccatcattgaacttttatcttgaatagagatataaccttctttaaaagcgtttgaattaaccacaggcatacctgatatatgaagacaaaatggtaacatatcgtcttttttaacgtggtaaccttcctgttctaacttagagataattgaatcaatagaatcacgagatatattggcgcgcacggttgtggttacaggctctaaaaaagatcgtgcaatgttttcagttttttctactccaaaatgtgtaacccaatgatcaacaatccatttgggaagactatattgaattgcaattctttttttagtatcatctatatcttcaaagcttggcaattcagtgcgcattactgttcgtaatacaccattgactatattccctgtgtgatagccaccacgtttttttgctatatctaccgcttcatgaataatagcatggttaggtattttatctaaatataaatattgatataaactcatccacagtaattgtcgcacccatgatttgattttagttttgataaaaggctttagtagataatctaacgagtattttctttttattgttccatatactaattctgtgaataaatttttatctactgtattaatgttatttgtagatagaacttcattaattttcaaattactataagcccctttatttaggacgtcgttgattgtttctaatgcatatgttcgcactgatttcatcataatagaactttcccaactaacgactcttgtacaccacttaaataatcagtaactttcatacgttttttccctgcaggttgaatctcagtaagtgcgatggcatcatcagaaccggtagctatgatgagttcatgcttagtagtttcaataattgttcctggattaccttttttccctttcacaatgaaagcgctaaataatttgagattcttttcattcatagttgtataagcaactggccatggagacagtcctctaatatggttatgaattgcttgtgcactcatattccaatcaactctctcgtcttcacgacgaatattagatgcaaatgttgcaagtgcatcatcttgagggatactgtcattggtattatcaatgatactaggaagtgtcttctttaataattcggcacctaaaaagcttaatttatcatgcattgcgccaacattatcttcttcttcaatacgaattgattgttgcgagatgatattacctgcatcaagttttttaaccatatacataatcgtgattccagtttcttcttcaccatcaattatagcctgatgtataggtgctcctcctctatacttaggtagcaatgatgcatggacattaatagctcctaatttaggtgcattgagtaaggactctggtaatagttgaccgaacgcagccgttactattaaatctgattctaaagaaagtaacgattctaattcttgagaatctttaagtttttcaggttgatataccggtatttgatgctttgtagctactctttttactggtggtggtgtcatcactttcttacgtcccactggtctatcaggttgtgtcactacagcgataacttcatgctcagcaattaacatctctaaaattttcgttgaaaaatcaggtgttcccataaaaatgattttactcattgtcaaaatacgcctccacttcagtttcatttaatatatgatgtgctcttttggtaaattgaattccattaagatgatcaatcatatgtaaaatcatgcgtgcaatatcgtcatatgcagttaattcaactgcatttccattgatatcatagctttgtacagtgatcattttgctacgtttaacttctccatatatatgaggtaaactgattgagccttctaagtcagaaacagtctcttgagattgacttttaacgacaggattaataagttgtaata

SEQ ID NO: 4423 - DNA, 3110 bp, Artificial Sequence
  Description of Artificial Sequence: synthetic nucleic acid sequence
actatcagctgtttcaccagattgtgaaatataaataaatagtggtttttcagaaagaagtggcatattatatacaaattcagaagctacatgaacctcagtaggtacacctgcccatttttcaataaattctttaccaaccaatccagcatgataactagtaccagctgcaacgatgtaaatacgatcagcatctgctacatcattaataatctctgaatcgatttttaaattacctttttcatcttgatattcttgaataatgcgacgcatcactgcaggctgttcatgaatttcttttaacatgtaatgatcatatacgcctttttctgcatcagcagcatctatttctgccgtatacgtatcacgttgttgaatgtgcccctcaagatctttaatttctactgtgtctcgcttaacaataactatttcatggtcatgtatctctttgtattggtttgtagtttgtaacattgctagagcatcagaagcaataacattgaaaccttcacctacacctactaaaagcggagacttgtttttagccacataaatagtatctttatcattatcatctaataatcctaaagcatatgaaccatgtaataatttaactacttttgtaaatgcatcttctgtagctaatccttgtctagaaaaataatctactaattgtacaataacttccgtatcagtttctgatgaaaaagtgacatcagataaatattcagcttttaattcttcataattttcaattacaccattatgaactaatgtaaaacgtccagatgttgactggtgtggatgtgaattttcataatttggaacaccatgtgtcgcccaacgtgtatgaccaattcctaacgtaccatcctcatcactattatctgcaactttacgtaattcagcaattcttcctttttctttaaaaagttttgtaccatcatcattaactacagcaatacctgctgagtcataaccacgatattctaatttttctaacccttttaatagtaattctttggcattatcgtagccaatataaccaacaattccacacatataatatcctccaacaaatgggataacacggctattatgattaattatcactgcttaaatttgataatcccctatcataatcattatcaacgaatacatcatgaaataagcgtgctattatatgaattttatacacgctatccgtagtttcccaaaataatttatttagtttggcgatcttattaactttgtccactaagtcaccttaatgatttacttaataagctaacgaatgtgccacatccgggatagcatccgccgatctgattcgatcactatcctcctcgtctacaaaatccaaatcgttatctataaaagttctactattttaacttttaatacttgataactatttaggtattttgcacaggcgctttaattattaataacctagactctcctcctttccattaatattcattgtacactgtcaacgaattaatttgcaaacgatttaacagtatttttcacaaatagtaatagttctgaatagatacatcgatgaattattctcaaaataaaaaaatatatttttcaaatctttttaaaagataaaattctgttaaaaaaaacagatttatgtctgtaacatcataaatctgttttatatatgaatttaaacatgaaagtattatttatctaagcccattttgtcttcaacaacgtcagcgatactttgagcatatctttcagcatccgcgtcagttgcagcctcaaccattacacgtactaaaggttcagttccagaaggacgaacaagaattcttccttcaccattcatctctgtttcaactttcgtcattatctcttgaacatgaatattctcttcaacacgatatttgtcagtcactctcacattaattaaagattgtgggtactttttcatttgagaagctaactcgcttagagttttaccactcattttaataacggaagccaactgaacacccgttaataatccatcaccagtagtattgtaatccattaatacgatatgaccggattgttcaccaccaagattataatttcctcttctcatttcctcgacaacatagcgatctccaactttagttttgtttgactgaataccttctttttctagagctttgtagaaaccaaggttactcattactgtcgaaactatcatatttccattgagttcttggtttttatacatctcttgaccaataatgaacataatttgatctccatctacaatttgtccattttcatctaccgcaataattcgatcgccatctccatcaaaagctaaaccaaagtcactttcagtttctaacacagcttcagctaatttttctggatgagtagagccacattgttcattaatgttataaccatctggattacatccaattgtctcagtatccgcttctaaatcgccaaacaagaatggggctaaagaagaagttgacccgtttgcaccatctaatacaattttaagaccctcaaaattaacatcaacagttgatttaagataacttagatacttttgtgcaccttcaaaataatctgaataatgtacaatatcctctcctactggtcgtggtaaatcaggattggtttgatctaataattgctcaatttcattttcttgatcatctgacaatttaaagccatctgaaccaaaaaatttaattccattatcagcaaccggattatgtgacgcagaaatcataacacctaatgctgcttccatttctttagtcaaataagccacacccggtgttgaaataacacctaagcgcatcacttctgcgccaattgaaattaaaccagcaattaatgcagattctagcatttctcctgaaactcttgtatctcttcctactaaaactcgaggatgcttttcacccttattatgtgcgagaacatatcctccgtatctacctagtttaaaagccaattcaggtgtgagttcttggttagcgacaccacgaacaccatcagtaccaaaatattttcccatttttaaacgctccttttgtatctatcaatttttaacatttatatacgcttttgtttccttt

SEQ ID NO: 4424 - DNA, 2436 bp, Artificial Sequence
  Description of Artificial Sequence: synthetic nucleic acid sequence
gttttatgaaactgccaggcattggaccaaagacggctcaacgtctggcttttcatactttagatatgaaagaagacgatgttgttaagtttgctaaagcactagttgatgttaaaagagaacttacctattgtagtgtttgtgggcatattacagaaaatgatccttgttatatatgtgaagataaacagcgagatcgttctgtcatatgtgtagttgaagatgacaaggatgtcatagcaatggaaaaaatgcgtgaatataaaggtttatatcacgtgcttcatggttcgatttcaccaatggatggtattgggcctgaagacatcaatatacctgcattagttgaacgcctcaaaaacgatgaggtgaaagagcttatattagctatgaatcctaacctagaaggcgagtctactgcaatgtatatatctaggttggttaaaccaattgggattaaagtcacaagactggcacaaggtttatctgtaggcggcgatttagaatatgctgatgaagtgactttatctaaagcaattgcaggtagaacggaaatgtaataatatctactattttaaagtctgggatataagtctatattctagactttatttacatttaaatagaagaagattgaacacgcttatatatgaatcttcccaacatagagaatttcactgagaaattcaacagacaaagcaagttggggttcggtaatggattgaaacaaagaagaatatgataagatttctgtttcgctttttagaattcagacttattgagttcacggaaaggcttttataattacatttattattaatgaggataagaatcaatccttctttacccaaggatgatgtaaagtatttggaataaaaaacaaggattatagtaaaatagtaaaaatattttaaaatgaacaacaaaaataaagtttgtgaatagggtttgtataggcgtttaagttttattttagcaaccatttttctgtataacacgtttataattaaatttcatacaaaaaaagttcggtttttcctccggagtaatttgaattgtttttgatagtgtaatttttactgttgttaaaacgagaataagtctgtatagtgtttatttgttgagcgaaacaacttaacgaatcattaaacaaacgactaaaattaatttcaaaaagttgttgacttaaacaaccatgaagagtataattaattcttgtcggtaagaaaatgaacattgaaaactgaatgacaatatgtcaacgttaattccaataaacagtaacgaaacgttacaaactatttagtatttatgagctaatcaaacatcataatttttatggagagtttgatcctggctcaggatgaacgctggcggcgtgcctaatacatgcaagtcgagcgaacagacgaggagcttgcttctctgacgttagcggcggacgggtgagtaacacgtggataacctacctataagactgggataacttcgggaaaccggagctaataccggataatatattgaaccgcatggttcaatagtgaaagacggttttgctgtcacttatagatggatccgcgccgcattagctagttggtaaggtaacggcttaccaaggcaacgatgcgtagccgacctgagagggtgatcggccacactggaactgagacacggtccagactcctacgggaggcagcagtagggaatcttccgcaatgggcgaaagcctgacggagcaacgccgcgtgagtgatgaaggtcttcggatcgtaaaactctgttattagggaagaacaaatgtgtaagtaactatgcacgtcttgacggtacctaatcagaaagccacggctaactacgtgccagcagccgcggtaatacgtaggtggcaagcgttatccggaattattgggcgtaaagcgcgcgtaggcggttttttaagtctgatgtgaaagcccacggctcaaccgtggagggtcattggaaactggaaaacttgagtgcagaagaggaaagtggaattccatgtgtagcggtgaaatgcgcagagatatggaggaacaccagtggcgaaggcgactttctggtctgtaactgacgctgatgtgcgaaagcgtggggatcaaacaggattagataccctggtagtccacgccgtaaacgatgagtgctaagtgttagggggtttccgccccttagtgctgcagctaacgcattaagcactccgcctggggagtacgaccgcaaggttgaaactcaaaggaattgacggggacccgcacaagcggtggagcatgtggtttaattcgaagcaacgcgaagaaccttaccaaatcttgacatcctctgacccctctagagatagagttttccccttcgggggacagagtgacaggtggtgcatggttgtcgtcagctcgtgtcgtgagatgttgggtt

SEQ ID NO: 4425 - DNA, 1132 bp, Artificial Sequence
  Description of Artificial Sequence: synthetic nucleic acid sequence
tctaccttgtgtccagactcttaatcatgctcatagtattttattgattcaatcatcatcttatttatatcttttcaaacctttttgatttcaaaatcgataatgacactatcacttgagaacgaattccatctcatttcttatacatttgatatcgtattttctttctcatttatcatttctataatttcattattttcatttaacacagctacttttggtgagtgatctaccatttcatcttcatttaattgtgcatatgtcataataataatgacgtctccaacttcaactagtcttgaagccgcgccatttaaacacatctttccactaccacgttctccagcaatgacatatgtttcaaatcgagcaccattattattattaacaatagcaaccttttcattgggtaaaatatcaaccgcatctaatatattggcatctattgttatgcttccaacgtaatttaaattagattctgtaactctagctctatggatttttgagttcataaatgttctaatcaatatagtcatctccaataattatattatctatcaatcttgctttagaaaatttaactgccaatgatatgaatattcgtccatgaatctttgattgttgtataagatttggataactataaatacccaaatcatcaatatgtccactaatatttttgtttaaatacgcagcgatttgacctataatctcattgctatctcgttcacccgcttcatacaaattctttgctaagcgtagactttgatataaatgttttgcctcttttcgttcttcagaggtcaagtaaatatttctagagcttttggctaaaccatctttttctcttacgatatcaataccgataacatgtacaggaagattaaagtctttaaccatcttttcaacaatagctaattgttgtgcatcctttttcccaaataggcataatctggttgcacaatattaaatagtttgttgaccacggtcacaacacttcgaagtgtccaggtctttgtgctccctctaatacttgtgccaagtgtccaactttcagatgaatacctaattcttctggatacatttcatctacactcggatggaaaacataatccacttgtaacttttttac

SEQ ID NO: 4426 - DNA, 1880 bp, Artificial Sequence
  Description of Artificial Sequence: synthetic nucleic acid sequence
acagattgcttcatcatggttaaatgaccatcatgtaaagctcccatagtcggaacgaatcctattgttttaccttcacgttgatgttgtttaacaatagattgcatttcattgattgttgtaataactttagtcatgttgctctacctcatccataatacgttttttgtaagtatgattttcagaaggaaacgtccctgctttaacttcttcattatattgccttaatccatcaataccacttgaaaagtctgcaaattgcttaacaaacttagcgtgtcgatcaacaccataatttaacatatcatgatacactaacacttgcccatcagtatcttttcctgcccctatacctataactggaatagtgagttgctgactaatttctcgagctaaatcactaggtatggcttctaaaaccagtactactgcaccagcagtttccatagctttagcatctttgataagttgcatagcggctgtctttgtatccccttgaagtttataccccattacacctacactttgaggtgtaagacctaagtgagaaacaacaggtatacccattttagttgctttttgaataaatgatgtaagatgagccccttctactttgacagcgttagcattcgtgttttgataaagcttaagtgcattttttagatcttcttcatcacttaaaccaacagtccctataggcatatcaacaactataaatgtatctgaagcacctcttttaacagccttaccatgatgaatcatatcgttcaatgtaacttgaacagtactatcatatcctaacactgtcattcctaaagaatctcctaccaaaatcatgtcaatttcagcttgttgtgcttgcttagcactaggataatcataagctgtaaccatagaaatcttttgctgtgatgccttcattttgtttaaatgatttaaagttttcaattcatttcaccctcaatttcctttattattagcaatagtataatgaatcgtaaaaagaaaggaaagaataaagttatgacaattgccattataggcccaggtgcagtgggtacaacgttagcttttgaattaaaaaaagttctaccagatacggaactcatcggccggcaagataaattaatgacctatttcccagaaaatacttctaatggaagtaatgttaaagtgacttcatttaatcatattaatcaaacttttgatgtcattatcatagcagttaaaacacatcaattggatgacgtcattaaacaattacctaaaatcactcatgacgattcgctcattatcttagcacaaaatggctatggacagcttaataaacttccatatcaacatgtctttcaagcagtcgtctatattagcggacaaaaagttaacaacaatgttcaacatttcagagattaccaactatatattcaagatagcacactaactcgtcaattcaagcaaatggttcatccttccaaaatagaggtggttttacaagaaaatattgaaaaaagcatttggtataaattattagtgaatttaggtataaataccatcactgctattggacaacaaccagctaaaattttaaaatctcctcatattgagtcgttgtgtcgtcgtatattagttgatggtcttaaagttgctagagctgaacaaattgactttgaagatcatatcgttgatgatattttaaatatttataaaggttatccagacgaaatgggaacaagtatgtattacgatgtcattaacaagcatcctcttgaagtcgaggccatacagggttatatatataaatgtgcaaaaaaacatcatttagagacaccctatctagatatggcttatacatttttatacgcttatcaccttgaatacac

SEQ ID NO: 4427 - DNA, 2397 bp, Artificial Sequence
  Description of Artificial Sequence: synthetic nucleic acid sequence
aagtttatcgtgcacttgattctggagtagatagttatattttaaagacaacaagtgcaagtgatatagctgacgctgtgcgtaaaacgtatgaaggtgaatcagtatttgaaccagaagtgttagtaaaaatgcgcaatcgtatgaaaaaacgtgccgagctttatgaaatgttgacagaaagagaaatggagatcctattacttatagctaaaggatactctaaccaagagattgcaagcgcctctcatatcaccatcaaaacagtaaaaactcatgtaagtaacatactaagtaaattagaagtacaagatcgaacacaagcagtaatatatgcgttccagcataatttaattcaataaattattaaaggcgaaagtaaagatacatctatcgatactttcgcctttcaatattatcagtcgcttgtgtgatgttcttctttagattgatgattgatattatacgtgtcatcttcattagagatatctacatctttgctatcttcatagtattcataagtcgtattttcgttatagtgattttcattgttatcatcatgtttaatagcggcttcttcaggcgtgtgaccagctatgacttttctttggtgaataattgcattgatttcagcaccgataataataataaagcttgtgatatacaaccataagaataaaatgataataccagctaaacttccgtatgttttcgaatagttactaaagtttgaaatatagtaaccgaatgcaaaggaccctagtaaccaaataatggaagtgaaaatagcgccaggaataacagaacgtaattttgttttaacattaggtgcaactgaataaagtacagtaaatatgatgaaaataataatcaatggaataacaattcgtactaaattaaaaatccattcaatttgattatcaatacctagtggtccaaataaaaatttattaatgactggacctagtgttataagtactacagcaacaacaaatactgcacctaaaacaagtgtatatagaatacttaataatttaactactacaccgtttcgagaatcctcaacgtcataagcaacattaaatgagttaataatagcggacattccatttgatgctgaccaaatagctaaaattaacccaactgacaaaatacctccactggcagtgtcagagatatctttaacaattccaccaacgatgctagctgtttcttgatcagggacatattgacttactttttgattaatctgattagcatcaatcgtgataaattgaccaagtagcgtaagtaaaaaaattagcattgggaaaagtgctaatacaaaatgatatgtcatctgtgctgctaaacctgcagcgtcatctttacctatcctataaatcaggtaagaaaagaaattagagttttcggtgtattttgctggtttattcagccgggaaacaaaaaatacttgattcttttttttaggtttcttagattggaattcttgaggttctatatatgtacggtcaacttctatttttttattctttttatgctctttatcttctattgaattaagatatttagaagttgttttctctttttttgacataacaatctcctttgctttttatgttttacttttaaaattgatattcccgtatttgcggtatagtaaaacaaatatggttttatttatatatgataaatccaataccctttaaaaagtaatgtatttttaacactcaatgattattttggcctaaattaaatagaaaggcaatagtttttaaatattgatttatagtttttaacatgagttaaagtattaaacaagtgcgagtcaaaatttaacaattattgtaaagtttataatcaataaagataaaaagagtggagcagaatccatctaaaatgaattccgttccacttcatagttattaaatatcataaacttatatgcgtacattttccaattgatgtcctactttctctgaaaatgctacgcatttgaaagtttatttacctaagcgttgatttttacgatttacaaaagtttctttggcatctttaatagaacgttctaattcaggattattacgacgtatttcatctaatgtatctttccaatacattacttcatctttgatgctacttatttttgaaggtttacgtgtacgatttccttctttgatgtctttgaatgattgttttaaagaatgacgtgtagatttatcagcaagagcagccgcgccaccaattacggcaccaattaaaataccaggtactaatttattttccatagttgaattacctctctttcaaatttgcatcttttacgatgtagtctattaaattatcacaagatgattgcaccatctcgaaaacaccttcaaaattatttgtgtagta

SEQ ID NO: 4428 - DNA, 2156 bp, Artificial Sequence
  Description of Artificial Sequence: synthetic nucleic acid sequence
tagacatatcttcaactcgaggttgcagtatataacgtacaccttctaaagcaccttctaaagttaaagattgtgctacaacgataattaaaaagataaataatagaggcatcattattttagaagctttttctaaacctttttcaacacctaacataacaattaccattgttatcaaaataaatatgccttgacctaaaacagtcaaccatggattactaatgattgtttcaaattgaatatttgtcagcgtacttgatttaaaaaccatgatttgtgctatgacataacctatatatataataatccaaccaccaataacactataaaaaccaaatagtataaatacggctaaattaccattccatccgataatattaagccatttctttcccgttaatttcttatatatttgcgttgtatatgtacgacccattttacctaccgtaaattccataattaacagtggtagtcctacaaatatagtaaaaattaaaaacattaatagaaaagcgccaccgccgtatatacctgccatatatgggaacttccacattgcacccaatcctattgcagaacctgcgctagctaatataaaaccggtagacgtcttccattgtgaatgaccactcaaattaccaactccctttaaagcgctaaagtgttaaaatgcttaagttctactctatcatgagtttattttatgtgcaatgtacctatatattgtcagaataatgagatacacattttttgatatttatggattgatgctgtatttttattcaaaatcataagtaatgtgttgtccctctgtcacttcttcaatgtctagactttcaatgtgatcaacattaatataatgtacaacatcttttttaatatataagtatgccaattcatcaaattcatctataattcgtgatacacatgtatcgtaatcgggaccattttcaaatgttttaaattccgtatatgtttttcctgatacggttgtataagttaataaaaatgtacgtttcatatttctacactcctttatttactgaaaaattgaataatagattgttctactctgtatgcatgatcgccatacgtcataagatgaccgcttttttcaaatttgagcagttctttatcttgactatttacattatcataaatgtattgcgcactttgagcatataatgggtcatcttcttcgccatacataatattcactggtactgtaatatttgcaagataagccataatttcatcaattacaccttgaaacacttcaatttctttatcataagacaagatggtttccatttggtgacgacgctcttcttcgcttaaactcaaaatttcattcattcgatgcccatacctttcaagacgccacgcaatctcgctttcacgctttttatgtggggctgacatcacagctatacgttctaaatcaaaatgttcagctaaccttaaagtaaataatccgcctaatgatacgcctgtcacattaattctactgtatcctgcatttcttaaaaattgatatgctgctgtaacttgttcccaccaatcattaatattgtgttgggtaaattccttaagtggcaaaccgtggcctggataactaggcacgtaacaagtaaatccctcttcattcaactgttgtgctaaatgttttacatcacgtacagttcccgtaaaagaatgtaataacaatacagcttgttgacgatgtccttttaagtagattgattgtggtgatttaactttcatttttacattcactcctatttatgtagatgttgatataaaatagacgccctgcactctcaagaccgtctaaaaaatgctatttttaaatttttcgtgctactttcacttacttttctcccccaaattttaataaaggtgacactaatataaataacgacacccaaataatcgctaaacttacgcctcctacaacgtcagaaaagtagtgtgcatgaaaatacagtctacttattaaaacgctaatccaaaatgcaatacttaaaattgtgattataaatttaaaagcacgctgtcggattaacgggataataatgatcataatcattaaaaagaataatgtattaatattagaatgcccactaggaaaagaccatcctgtatcaacaattaaa

SEQ ID NO: 4429 - DNA, 3413 bp, Artificial Sequence
  Description of Artificial Sequence: synthetic nucleic acid sequence
acctgtaaattctaaataaccatcaatttcatctgacttaagcgcattaaataagaatgaggttttacccatgccatctttgacttctacagtatcatctgtgtcttcttcaataagtattttatacatattcgtaataattgacggttctgaacctagcttgcctgcgaatgtgattttatcacctttttgcgctgccataggtatggcaatagctatgataatcacaattacaattgtccctaaagaaatgagcaattttttatatgataaacgttccatgtatcttaaaataaaatcaaaaataatagctagaagtgcagctggaatagcacctattaaaatgagtgcactattgttacgatcaatgcctaataatattaaatctcctagaccaccagcgcctattaaagctgcgagtgtagcagtaccaatgattaataccatagctgtgcgtattcctgccatgataacaggcattgcaatagggagttcgactttggtcaatcttctaagtggtttcattccaatgcctttagccgcttcaataagagagggatcgacctccttaatacctgtgtatgtattacgtagaataggaagtaacgcatatacaactaaggcgataattgccggaagtctcccaattccgaaaattggtatcatcaaaccaagtagtgccagtgatggaattgtttgtagaacagctgcaatattcatgacgatttctgaaagtttttttgttttagtgagcaaaattgcaattggtactgctataagagttgcaatgaaaagcgctataaaagaaagttgaatgtgttcaattatagtagaaaatagctgcccttttctatcacttaatgtcgcaaagaactcattcatgtgtcgcttcctccttattaagagataaataagtaaacacatcttctctatttaacaaatatcgacgatgttgttctttatcgttgaccacaactgcatcataatgagacaaatcttcataaatattatttaagtacaactcagcatctacttcaggataatgaataacgcttgcattgtcatctacagaccgattaattcctaaatctttaatcttcacttgattcacaatattatgcgttgtatccaaatgactacccatgaattgctttacaaagtcacttttaggtcgcgttctaaaactatcaggtgtatcaatttgttcaacacgcccttcattgagtaaacaaattctgtcacctagtttcatcgcttcttgaatatcatgcgttacaaaaactattgttttcttaatttgagtttgcaaatgaatcaaatcgtcctgcaacttctctctgctaattgggtcaagagcactaaaaggctcatccatgataataacgggaggatctgcagctaatgctcgcactacaccaaccctttgtcgttgtccacccgatagttcatcaggttttctatttttaaattgctcaggatttaaacctaccattgtcaataattcatccacacgtaaatcaatatcgttatctttccactttttcatttggggtacttgtgcaatgttttctttgatagtcatatgaggaaataatgcaatttgttgtagtacatatccaatatcccaacgcatttcgtaaactggataatcactaattggtttatctttaaaatatatgtaaccttcgcttaaaggaattaaacgattgatcattttaagtgttgttgtcttaccacaacctgaaggaccaattaacacaaaaaattctccttctttaatattaaaacttacattatctacagcaatattattagcatatcgctttgtgacatttttaaatttaatcactttttcaccttcattccctctacaaaatagtagaccattttaatctatattccctattaaatcatttttaattgaaaattaacatttattgtatttcaaaattcaaattaacaaaaagtattatgaatacttaatatccaacttcatataattaaaaaacgacgaaatcaaaagataagagatttcgtcgttcaatcatttatattctagttttatagctttgtatggtttcgataaacttaggacaataatgctttaatttataactacctacaccatcaatagcaatcatttcttgtttcgattcaggtttacgcttagcaaattcttcgagcgtgtaatcagaaaatatacttacaggtgctattccaagtttatcacttagctgtttacgtacatcaacaagctcacgatataacgctctatccacaccttcaacagtgttgataaataccttctctttagttttttgtttgaacggagtggtataaaccttggtatgattatttagtaattgtttcactgatgtatcacacataagaatttcatcattttcatttaaatatcctttgaaacgtagctcatcaattaagtgtgataactcagatgttgtataatttttcatcaacccatgtgtcgttaattcattataatgatggtgttttatataatctgtcacttctccacgtaaaacttgtataataacactataattttcctgttgcttcattcgagcaatacagctaataatcattttcgcttcacgagtcatatcatacgttttattttcctgtatacaattactacattgattgcattcctctaaattttcattgggttcaaaataatgaacaattgtcgcttctaaacactttttcgttttggtatattgaatcattttcgttaatttttcgcccattttatctttatagtcatcatcagcttgggatacagtaataaaatactcatgtaatcccttatctcgttcactaaacaaaaggatacactcactttttaaaccatcacgtcccgcgcgtccagcttcctgatagtaagattccaaatctccaggcatgttatagtgaatgacataacgtacatttgatttatcaatacccataccaaatgcatttgtcgcaatgacaacctctacacgatcatacaagaaatcattttgcgcctcaattctctctttattcgttaaaccagcatgataaattgtgctcttaattttttcactatttagagcttcgtgtaattcttctacctgcttacgagtggaacaataaatgattcctgcctgtccttcatgatttgcaacataatccacaacaaatttttgtcgctgataagtcggattgactttgaagattaaattgcgtcttttagtacttgttttgacaacatcattttgtccaattgataacttagacatgatatcttgttgaacttcagcagttgccgtagctgtaagtgcaactattgtgaagttttgaggtaaggtaaaaactttttgtatgacactttggtaactaggtctaaaatcatgtccccacttcgatat

SEQ ID NO: 4430 - DNA, 2942 bp, Artificial Sequence
  Description of Artificial Sequence: synthetic nucleic acid sequence
ttgcacgttctttatctcccttgattaaatatagatttcccttgtcattcttattattattcaataacgtacgattaatgtcatcaagtatattacctaaaatgcatatgcctggatgaccttctagttgttgagaaaccaattgttcttcaatcgtacttaaatgacctataacaatcttttcattgtagcaggaagcattaaacactattgcaatggggtagtcttcattcgtatatgattcaatttgtttaataatttgacctaatcttttcacacccatataaatagctaaagtgcctccattaatcaagttcctaatatccgtatcgtgattaaccgaatctttaaaatgaccagttgagaaagtcacactcggtgcgatagaacgcatcgttaatcccatattcatagttgctacggcagcacttgctgatgtcacaccagggacaatctcgtaatgaatatgatgattttctaatgtttgtacttcttctgtaattctaccaaaaatcgcaggatctcctccctttagtctcaccacacattgatattgattagctgcttcaacaattttttgattaatctcctcttgttgaatgtgtttacaataaggtttctttcccacattgatcacttttgtttgagaagaagcatactgtaagatgaaaggatttacgagacgatcaaataaaatcacgtcagctgatctaattaaccgttcagcttttttagttaataagtttggattgcctggtcctgcaccgattagatatactgtgccaggataagttatagacataagtaaatatctccatcaataacttctacttcgtatgtctctacacatcctgtatcaggttgttgtacttctccagtttttaaagctattttttgatcgtgtaacggacagtaaacataatcaccacttacagtcccttcagacaacggtccttctttatgtggacatatatttccaatggcatataaatcaccattatctgtgagaaaaatacctatttctttttcgtttacaactacttttttgcctatttgaggaatcatttcattcattgttgtaactttaatcttttctttagctttcattcttacaccttctcaacttcaaagattttttgtgcttctttattttcaacaatagtttcccatggttcattctcaacagcttttttggcttccataattcttaaatacagttctttttgcttttcttgatttaataagacattcttgacattttcaaagcccatacgttctaaccatggtgctgttctttcagcgtaaacacctgtttctctgtaatactgcatgagggcaccacataattgaatcacttcatcttcggtttcaactgtcgttaacaatttacctacagtaacatcagtaccaccattacctccgataaatatttggtagccattttcaacagatatgacgccaaaatctttaacaccagactctacacaacttctcggacaacctgatactcccattttaaatttatgaggtgtatcaatatattcaaatgttttttcaagtcttattcctagtcgagttgtgtattgtgtaccaaaacgacaaaactctttaccaacgcaacttttaacagaacgcgtctttttaccataagcagaagcagaacgcattcctaaatctttccaaacttgtggtaattcttctttcttcaatccatataaacctacacgttgcgaacctgttactttaacaagtggtacgttatactttttagcaacttctcctaatcgaatgagttggtcagcatctgtaacaccaccgcgcatttgaggaatcactgagaaagtaccatcattttgtatatttgcatgatatctttcattagcgaagcgagaatctttttcgtctcgatgttcaaaaggataaaccatatttaaataataattaattgcaggtcgacatttaggacaaccatctttatctttgaaatcaagaacgtgtcgtacttcttttgatgatttgagatttttagccctgatttgagttacaatttggtctcttgttaaatcagtacatggacaaatacctgttggttttgcagcaataaagtcgtcacctaatgtatattgtaataactcaccgatttgacctttacacttaccacatgaattacctgcttttgttgctttagtcacttcatctacagacgttaaacctttacttgtaatagcattgacgattgttcctttatcaacaccattacatccacaaatcgtttcatcatcagacatatcagcaatagatgtccccgcatcttcatcacctttatgcaataaagaaacaagtgtataatcttcaagcgtttcatgttttttcatcatattataagtcacttttcttattaaaagaatattttaagatttattcactactaatttgaacttcaaaatgattgatatgtaatgttaaataaactatttccgcttcgtatacatacacactaaactcacgttgaatcatttttaatattttataagccgtattaaaactacgaggatacatagtttttatcatcgatataaaattctcctgtgcttctaaatactcacctttagttaatcgatatattaaaaattgtatgtgtcttataaaacgctgatattgtattgtttgtttatcaattgaatgttgtaaatcagtttcaataattgtaatactcttattgattaacttgtttattactgaaatatcgtgaattgataatttttcagagttggatgcaatatgtaatgcgatgaatccaatttcatcttctggaaaatgtacgtctaaggttttatttaatttatcgattacctttcgagcaacattgtatgcattactatagagatgttttgtttcaatcacaaatggatttgtaatcatttgatgttgcttaagtcttt

SEQ ID NO: 4431 - DNA, 3399 bp, Artificial Sequence
  Description of Artificial Sequence: synthetic nucleic acid sequence
gctaataaaaatttagttgcttttccaactgattcttttggaatgttaatattaaaagcgatacgtcgcgcttggtaaggtgataatcctactactggatcaattgtttctttgaaaatcttttcaggtgtttgagctgcaacctcttcaatttcagttccaccttcttctgatgccatcaaagtcactttatcagtagcacgatcaataacaaaaccaacataatattctttttggatatcgcatccttcttcgatatataaacgtttgacctctttgccctctggcccagtttgatgtgtgaccaattgtttacctagcagttcatttgcgtacgtttcgacttcagataatgatttagcaattttcacgccgcctgctttacctctacccccagcgtgaatttgcgctttaaccacatatacgtctgaatttaattctttcgctttttccactgcttcttcagcagtaaatgctactcgtccctctggaactgcaacgcccattgaacgaaatatttctttcccttgatactcgtggatattcatcttccatcctcctgtttcttaggttaagttgccctttaattataaaaaatgtaagcgctattgtaaactgattgacagtatttattgcaatttaagcaaaattcaaattatttcatcattgatttaattggttcaaatgattgacgatgttcattgattatgcccacttgatcaatagcctttaaatgttgcttagttccataacctgcatttttatcaaaaccatattctggaaactgtttagatagttgtctcatatattgatcacggtattctttagccatgatacttgctgctgcgatagacacacttttagcatcacctttaataattgaggtttgtggaatatcaatatctagtgtcattgcgtctattaataaatgtgtaggtgtaacatctaattgatttatagcacgtagcatagctaattgagttgcccgataaatgttcaattcatctatttcaactgaggacgctatgccatatgcatattgatagacattttcttttaaattttgattaagtcgtgctctatttttgggagacacttttttagagtcatctaaaccaatataatgatgattcttctctaaaataactgcacaagccacaactggtccagccaagggcccacgccctacctcatcaattccacaaattaatgcatccctgttagaggacataatgttgttttcgtattgattcatggataaatagtgctcttctaatgcttgttgcttaagaatatttttttccctagacttaatcgcatttataacacctttacgtgaatcattatttgcttcatgtttatgtaactcttccaacgtttcaattcgagatagtttttctttgatttctttaattgttagagacatactatcattcactcttcatttcttttaaaatatcaaaacaataagttccaatttttgcatttctcatatcattgatgatcaactcaatgacagattcataatctacttcatttcctttttgtaacaatccccttcttcttccaattgcatcaaaccaatcgagtatctcagcgtcttcatgtgtatcaatattataatgtctctttaaagctgaaacatcatgtttaatcataaaattcaaaccataaatagctacctcatctaaatgaacgatactatccttaattgcaccagttaaacttaattttttaccgacttcttcatcttcgaatttaggccataaaatacctggtgtatctagtaattgaagagactttccaactttaatccattgttgctgttttgttactcctggtttatttccagtttcggcgatactacgttttgctaacttattgataagtgttgattttcctacattaggaatgcctacaatcatagctcttatcgctctaggttttaaacctttagctttttcacgatcaaatttttcttgagttgcttttatagcttcaacttcaacatttttaagattcttgccatgttttgcatctacagctaccggatagaaaccttcatctttaaaataagtttcccatttttctaattcttttaaattcgtcatatcttttttatttaaaattactactcgaggtttttgtttaatgacatcatcaatcatagggtttctcgaactgtatggaatacgtgcatcgacgagttcaaaaactacatctacctttttcagttgttcactaacttgtcttttggctttagccatatgacctggataccattgtatcgccatgagtcatcatcctattcttattattttcttaaacttttatctataacttcataattatactttataatagctaccccaaccactttaagtttaacacgtgcatcatttagtataaaaatcatttttctattcataaaaaatctacgatgaccatttgtaaacttattcaaaactattaaaatcaattaactttattaaataacattaaatttaatgtaaatagatttaaataatgccactaatactttcattcattgccataataacctacaatttgactaagctaacaaaatttttaggtcaatatgatgcattttaggagaagtaaatgagaagaaaagcatgtttcattatattattaattacattatcattaattggtcatagttaatttcttcttgcccctctttaaattcatcaaaaccaaaccattcctttaaattatctttcagcaattaaatcacctctttctattcctactataactaacttaatttgaaagtaagtccaatcagtaaaatgttctttataaaattttaatcgttcaccgcgatgtttttgatagtagtttataaattcgagaatatcttttttatttataaataatgtatagtctatcaaataacctttaatatacatttctagaatatgatcttcaattgtgttaagttttacattttgtaattgagcaatttcttttaaattgagaccagattttaacttttgatagcttaagtatgtatttgttagtaatggtgaaagaatgatagcttgagaaagtattggatatttcgttgaatcttttaattgattcaatatgtcaatcagttcattcatttctcgttcaaataattctgattgtggtatactctcaattaaacttatttgttgtctagtatacatggattcctcatatccttgtaaataataatgaagaaatgtatggttatatttattatttaaattctcaaataataaatatatttcgtctatagtatttgatacttgatttgattcaatgacctgatgataaagttgtttaaccctttgttggatataggtattttgaacgattggaataaatgtatttgactccttgcgtgta

SEQ ID NO: 4432 - DNA, 2756 bp, Artificial Sequence
  Description of Artificial Sequence: synthetic nucleic acid sequence
tatttaaaagaacgtttattgatacagcatcaacaatttcaattaagagtttcgggatgttctcatcctgtagagtgtaaagttcattcgcaacattatgaagtgactatgccaaaagtacatcaagttaaggaaagatttgtgaaattaggggaccaacagtttaaagcatttgaaattagatacgatacatacattcattacgtgttgatgtgtgatggtgtagatttagcaatgaaacagcgcgtggaagattttgtcagtgcgcaaacatggcatcaacaatttaaaacgattggcgtcatgctttttcaacaagataaacaattcatatatccactgatacatatacctaaaatagatagcttaatctgggaaaatagctgtggttcaggagcggcttctatcggtgtgttagttaattatctaacagatcatgatattcaagattacctagttaaccaacccggaggcagtattattgtctcatccagaaagtctggacaaaatgaataccaaacaacgattaagtgtcaagtttcaactgtcgcaacaggacaagcatatatagaacaggagacaatgacgcaaatatgaatgatcatacaaaaatagagaaccaattacaatattatttagaacaatttacgtacttacatcaactcgttttggaagatagtcggcatattgttgatttagaaaatttgattgatgaatacagtcaatggatacttcaacctttggcagagcatcactatttaacatggaacgatttagaaacaaaaatgagcttaaccaagaagcttcaagaggtatcagcaaaatgtgtgaaacaagtagaagtcattcgcgcacaacgtttgttgaatggtagggcgaccacgtcaggttatttcgaaaatatagagcattgcattaatgaagaattcggaagatggcaaattggaaaaaatgacaaattattactgattggttcgggtgcatatcctatgacattgattcaagttgctaaagaaactggcgctgcggtcattggtatagatatagattcggaagcagttgatttagggcaacgtgtcgtcaatgtactagcgccaaatgaagatatcgttattagtaatcaaacagttgatcaattagaagacatccaatctgtgacacatattatattcagttcgacgatacctatcaaatatgacattttgaatgaactttacacattgacgaatgatgaagttgttgtagctatgcgatacggtgatgatataaaagcattgtttaattatccatctcaagcaactgacgaaacacagtggcgatgtgaagaactacaaacacgaccgaagcagatttttgatattgcactttattgtaaagtggcatcaaaagttggtgttgaacatgtctaaaatattaatggttggtagtggaccggtcgctattcaacttgctcgactatgtcatttacatggagaacatatagttgatatggtgagtcgcgttcatgcatcaaccaaatctaagagagtctttgatgcttatcaacgtgacggctttttttcagtaatgactcaaaatgatgcacatcagtgtttttcaggtaagtttacggttagacatttttttaaagatgttaaagatattactgaatattatgacgtggtgattttagcatgtactgccgatgcgtatcgaccgatattacagcaattatctaagtccacattaaagcgtattaagcaaatcatcttggtctcaccaacattaggatcacatatgcttgttaagcaattactatcagatgttcaatgtgaaggtgaagtgatttcattttccacttatctaggcgatacccgaatatttgataaagcacaaccacattgtgtcctaaccacacgagttaaatcaaaattattcgtaggttcgactcaatctcagtctatgacgttgtgtaagcttaagtctttatttgactatttgaatatagaattaacaacgatggacacaccactacatgcggagatacataatagttcactttatgtacacccaccattgtttatgaatcaattttcattaaaggcggtatttgaagggacgaaagtaccagtatatgtatataagctatttccagagggtccaatcacaatgaccttaatacacgaaatgcgattaatgtggcaagaaatgatgatgatattaaaaaaattaaaggtaccttcggtcaatcttctaaagtttatggtgaaagaaaactaccctatacgttatgagaccatgcgcgaagtagatattgaaaactttaaaaatttaccagctattcatcaagagtatctactttatgtgcgatatacagcaattttaatcgatccgttttctaatccggacgatcaaggtgcatattttgatttttctgccgtaccatacaaacatgttgatactgatgaacaaggagtcatacatataccacgcatgccgagtgaagattattatcgtactttgataattcaagcgattggaagagcattaaacgttgcaacaccgatgattgacacattgttattacgttatgaaaatactgttaaacaatactgtgacacacatttacatcaacaactatcaaggcaattcgaattacatcattttaaacaggatttagcgttagtgacgaactacttaactttttataaataaaaaacgtaatgatataagtttacatattttcgaaaagaaagaggaaagcaatgaataaactc

SEQ ID NO: 4433 - DNA, 2702 bp, Artificial Sequence
  Description of Artificial Sequence: synthetic nucleic acid sequence
tagatagaacttgcctaatcatcatacggcaccatttaacatctgtataaaccttttgttcgtctttaaaatctaattcaaaacctatcccttttgcctgactgatatgtcgagtaacttgtatttcatctataaccattctctttaatgaaatataatcaaaatacatatcacgatgatgtgtttcaagccttgttaaatataattgcttatctaacatctcattaatacgagaccattcaaataataacgctcgcttacgctgatcatcattctcttgatctatcaataatttcatagccgtaacaggtgtttttatatcatgaacaaactctgtaattgtttgttcatgatttttaatttgtaattgttgttcgactactttctctttttgagcggctatatgacgatacagataatctatgacttgttgttgaaatggggtttctgccaaatctttatgcttaatttcttcaatttctttatcttcataaaaatgtttagatagacggacttctttaacaaacgtaaataataagaaaagtatactcaatcctacgtttaatatcactatataaaatacactttcaactgaaatctcataatctatgtaggcaacacctaataaaataatgttgagaaataatatccacaatatccaattaatacgagattttataaaaaaccaaaaccatcgaaaattattcatgagctaagtatcctttaccaactttggtttcaattgcactatccatgtcaatttctgataatttttttcttaatctattaacattaactgttaaagtattatcactaacaaaagcttcatcatcccacaaagcagtaatgagagtgtctcgtgtcacgatttgattacgtttattgattaacatctctaaaataatcatctctgttttagacaaaaagatagttttatcatctttttgaatactatcttttgataaatccacagtagcgtcttgccaacttaacgttctcttttcttcaactccaaattcataaacgcgtctataaatagcttgtagcttagcaattaagacgtttgtataaaatggtttttgcatataatcatctgcaccaagttccatactcatcacttgatccattggattatctcttgatgataaaaataaaataggaacgttcgactgttgtctcatttttcgacaccaataaaacccatcgtatttcggtaattgaacatccaaaataactatttctggattaaatgtttcaaatgtctccatcacatgactaaaatcttcgacaccaacgacattaaaatcccattgttctaattccttttttaattcttgaaaaagcgtattatcgtcttcgactaataatatttgcataacgaatcacctaatatattatttagtatatttaatcttctcacctgattgaatgcgaccttgataatgcttaattctacaatcaatttcaaaacctctcataagaagtccttgaatcggtgcttgtatgaaatagtaaattggccaaaataatctagggatataatcgtataaatgaaccataattaaacgtgttcctttaagaagtctaaattctaattttgcttgcttctttgatttaggtttcatcaatttaccatcaacaagatgtaatgtaattatatcttctgttgtattaaccattttgaaaatagctaaaggtcttttaatgttcctattgtaaatgatgtagtgatgatcttgtttttgagtatgtacaaaagttccttttgtctcatctaaccacctactaaaatagtctacaagttgattgagcgtccatttctttggtaaaatcatcttcatcgctgttcgaacatcatcatatttagctgtttgtaattctacgttaatatgaggacgtttcacttcaacatccgtacaatcaactggtacgccataagcgcctaaacgttcaatagcttcattatcatgacggctccccggaatatacacaatctttttcagcttatttattgatgcagctctaccaaagttatctgccgctataaagtttaaatctcgtgctgttgcatgtgttaatttagcagaatgtttagttggatctaaataatataccgcaatgtctatacctttcatagcttcaactacatctttatgattatatatatcgcgttttaaccatgtgattttgttcgtagatcctttgtcaggtttgggatatttagataaagcaaataattgagcatcatgttcaatgactcgacttaaatatctaccaatatagccggtgccacctgctaacaatactttaggcttcataaatatcaactcctaaactttcttttagataatttcatatcaagcgtaattatgtaaagtgtactataataaggaagacaattgatttaacaaaacaggagtgttgatatgacacatctcattcgtgaaattagtattaaagacgttgaaaactttatcagcctattaagccaaatatatgatgaatcagaatttacattctacaatccaggtgaatattcaccaacgatatcttccgcaagtcaacacttagaaaaatacatcacctcacctaccaaagcaatatatgtcgctgaaagtgatgagcaacttgttggatacgtatttgttaatactgaaacttatgaacgtacacagcacgaagctgtggtgtaccttggtgtt

SEQ ID NO: 4434 - DNA, 3493 bp, Artificial Sequence
  Description of Artificial Sequence: synthetic nucleic acid sequence
tgataaaatcattcattaaagactgttaaggtagtgttaaaatatacttaaaattttgttgcgctcacctttaaataattcattccttatttaaataatgctaagatatacatgtattaacataatatatagcaaatactaagattttttgaagacaatactaaaatcgtgcagaatgtgttcaaatttagtttcgttaccttgcaaccatacttaataaataatgaacactttataaagcaaatttacgacaaagcatggtattgtacgccttatttatagtatttaaatacaataaatggtacacttcttttccttttacaatgcatgaaaatacgttacaattattataaattttaaaaattaacggagggtggctataaatggttactcaaaataaaaagatattgattattactggatcatttggtaacggtcatatgcaagtcacgcaaagtattgtcaaccaattgaatgagatgaatctcaatcatttatcagtcattcaacatgatttgtttatggaagctcatccaattatgacttctatatgtaagaaatggtatatcaatagctttaaatattttagaaatacatataaacgattttactatagtcgccctaatgagctcgataaatgtttttataaatattatggattaaataaactcatcaacttacttattaaagaaaagcctgatctcatattattaacatttccaacacctgtgatgtcagtgttgaccgaacaatttaatataaatatccctattgcgacagttatgacagattatcgcatgcataaaaattggattacaccatattcacaaagatattatgtagcaacaaaagatactaaagatgatttcattgaagctggtgttcctgcttcatatattaaagtgacgggcattcctattgctgataaatttgaagaatctattgataaagaagaatggttatcgcaacaacatttagacccttcaaaacctactatattaatgtcagcaggtgcatttggtgtttcaaaaggctttgactatatgattaataatattttagaaaaaagtccaaattcgcaagtggtcatgatttgtggacgtagtaaggaacttaaacgttcattaaaagctaagttcaaagataatccaagtgtaataatattaggatatacaaatcacatgaatgagtggatggcatcaagccaactaatgattacaaaacctggtggtatcacaatttccgaaggacttagtcgttgtattcctatgatttttttaaaccctgcacccggtcaagaacttgaaaatgcatattactttgaaagtaaaggatttggaaaaatagcagatactccaaatgaggcaattgatattgtttctgacttaacaaataacgaagagactttaaaggttatgtcatctaaaatgctagaatcaaaggtaggatattctactagaaagatttgtaaagatttattagatttaataggtcactcatctcaaccggatgaaatctatggaaaggttcctttgtatgcaagattcttcgtcaagtaattactcaagtaacagaaactttgttatgatgttggtaattctgtttctgatggaatttgcaagaggtatgtacatactaagttatataaactttttacctacagtgacctctatcgcaatagcaatcacatcatttgctttttccattcactttatcgcagatgctgcaacaaattttgtcatcggctttttacttaaaaaatttggttcaaaattagtacttacatctggattcttacttgcttttataagcttgtttttagtgatatggttcccggcatcaccattcataattattttcagtgctattatgttaggaattgctgtgagtccgatttgggttatcatgttatctagtgtagatgaaagaaatcgcggcaaacaaatgggttatgtctacttttcatggttgctaggtttattggtgggtatggttatcatgaacttgcttattaaattccatcctactcgttttgcatttttaatggccttggttgtgcttattgcctgggtactatactattttgttaatatcaacttaacaaattacaatactaaacctgtgaaagcacaattaaagcaaattgtagatgttacacaacgtcatcttattctatttccgggtatcttgttacaaggagcagctatagcagcacttgtacctattcttccaaaatatgcaacgcaagttgtgaaagtatcaaccgttgaatatacagtagcaatcattattggtggcataggctgtgctttctctatgttatttttatcaaaaatcatcgacaataatagcaaagggtttatgtatggagttatttttagtggctttatactatatacaattcttatattcgggctatctacaattacaaatatatatatagtttgggccataggactttttattgggctaatgtacggtatcctcttaccggcttggaatacctttatggctgggcatattaatcctaacgaacaggaagaaacatggggcgtgttcaacagtgttcaaggcttcggttcaatgataggcccactagtcggaggtctaattactcaatttactaataatttaaataataccttttacttttcagcgatgatttttcttgcacttgcagtattttacggatattactttattaaaacaaacagaagggttaaaccttaaaatctataaatcgtttatataaagattagttgtatatattaatgaaacgtcattcatatgcatttgaaatatgaatattcaatataaaacgtacattaatctttttgaatgattaactatacaatataattatgtttcatataaaaacgccaaatcccactgaaacacaataggatttggcgtttttagttgattaagcgctcttcacgtatttaacaataatgattctgtaaattcaatttcactttacaattttgaactttttatcctaatgtaaaagtttcaataatagtccatttgtcctcttcttcactatattgaagtaacgatagttcttcaattatttctctatggtctacccctgctaattttacttgaccatatatatcttcaaattcttgacttgttagaccttgggcaattgtaaaatgtggtacaaaaggatgttcagctgtaccgtaaaaatcttctgtattaaattgattaaataattgatctaatgactctgttttagcaactttgaagtatataacattactgattggagcgaaattagatgcctttgtagcatgtacttctactggtttaatactagaaattcgatttttcacttcatttttaattaaattaaaatcatgatcatcgatttcaaattgaggtttaatcgtgatatgaggcattatttgagcataatgattgtcatatcgcttgcgataagcattcacctcatcttgaaatgactttgacggaaccaatgctaatc

SEQ ID NO: 4435 - DNA, 3431 bp, Artificial Sequence
  Description of Artificial Sequence: synthetic nucleic acid sequence
tactgctactggtttcgaattcttttcttcatatcgttgtaaaacatctttactataggattctgagctacatatgacaaaatcaataaatggttcaccaacttgtcgagtaagtgcatcaatatgctctttgacatcataattatcagtctcgcctggttgtgtcataacattagatacataaagttttggagcagatgtacgtaataatgcttctgaaatacctttgacacataaatttgatataacacttgtatataatgaacctggtcctaagacaattaaatctgcttgttctaaagcttctatcgcttcattcattggttcaacatcacttggttctaaaaacacacgatctatttttttatgtgttttaggtatattagtttctccatgtacaatttcaccgtcttccatcaccgcgttgagttgcacacttgcgtttgttgaagggatgacttggcctttaatatttaaaactttgcttaactctttaatagcgtgtccaaaatcattagtaatgttagtcattccagcaataactaaattacctaatgaatgcccatctacttgattttcaccaaaacggtactggaacaattgagttaatatcgattctgagtcacttaaagcagcaatgacattacgaatatcaccaggcgctggaatatccatgacatctctaattttccccgtgctcccaccattgtccgctacagtaacaatggcagtaatgtctattggaaattctctaaggcctctagcaaggacagaaagtccagtgccaccaccaataagtactacattcatttgtttcattatctctctccactttcaatatgcgcatctctatgatgcacataaacattatattcaaaaatctcgttaagatattcagctaaacgtttagctaatgcgactgatcgatgttgtccacccgtacaacctatagcaataaccaattgcgatttaccttcttttttgtagccaggaatcataaattttaataaatctgttaatttatcaaaaaatatttgggtttctttccacttcataacgtaattgtacactggctcatctaaaccagtaaatggacgcaattcctctacatagtagggattaggtagaaatctgacatcaaaaactaaatcagcatccatttgtataccatgcttgaaaccgaaacttgtcacgttgattgtaaatgtttcaaagttttcatctaaataaaactttgaaatgcgttgctttaattctttaggttttaattttgttgtatcaatcacgtaattagcgatacttcggatttctgatagatgttcacgttcctcatttattgcatctattaatgatctttgtccttgttcatttagtgggtgcgctcttcttgattctttataacgtgaaataattttttcagttttagcttctaaaaacataacatctaaaatcacgtcattacgacttttaataatatcaatttctttaactagagatttaaataattccttacctcttaaatctattgcaattgctactttttgcaatgaaggatttccttgagccatcaattctacaaatttaggtaatagtacaggtggtaaattatctacacagaaaaatcccatatcttcgagactttgaatcaccaatgatttacccgctccagacatacctgtaacaactaacaattcacttttacccatttctttttcgttgcttgtcattttcttaagtcaccgccaattataatcttcaatcaatatcattatattaaattcatcttatcacactcaaatatgcaaagtaacatacttatattgtaattaaaaaagctagaatcattgatgacgatactttgacgcaaacaatgttctagctatgtgtaaaatgagttaaattttaattatcttttaattctgtaatataatcagctgcactttgagccgcaatactaccgtctcctgtagcagtaacaatttgacgtaaccctttatcacgaacgtcacctgcagcaaaaatacctcgtactttagtactcatgtcatcttgtgtgacaatgtatcccgcgtcatttgtaataccaagatttttaaatggtgctgtgagtggtttcattccaatataaatgaatacaccgtcggcatcataagtctgttcagcaccatctttagttgattcaagtgtaactgaaccaactttaccatctttttcattaattgttttaagtgtatgactccaaataaagtcaactttatcatttttgaaggcacgttcttgcaagatgttttgtgcacgtaattcatctctacggtgaacaatcgttactttatctgcaaatttagttaagaaagtaccttcttctaccgctgaatctccgccgccaattacgaaaagacgtttatttttaaagaatgctccatcacaaaccgcacaataacttactccacgtcctcctaattcttgttcaccaggaacgccaatctttttatactctgctccagttgagataataactgcatgtgctgttatctctttattccctaaattgataactttatagtcgcctttatcttcaacagatttaatatcgccatattggtattccgcaccaaattttttagcatgttcaaacattttagtagataagtcaggacctgtgatcatctcaaatcctggaaaattctctacttcttcagtgtttgccatttgaccgcctggcataccgcgttcaatcatgacagtttttaaattggcacgagatgcatatactgctgctgtcataccggcaggacctgcaccgattattgctacatcaaaatctacttcagtcattttaaatgcctcctacttattaatcattatgcgcattatatatcatacttttcatttcataaatttatatgctcaatataaattcaattgctttattcagtttgtatctagaaacattaaaatcgtccatcaattgcctcttggtaagtggttggctagaacgacgatacgataggtaaacaaatgcagctacatatctatcgacatctactaaatctacattttcagctataatcatttctgcttgattaatccaatctgtaaataaagacgtgttatatttgaatttcttaaaattatacaacctttgcatacctctgtgtataaaatctaatttattgagtgtgagtccttgtaccaaatatgtgagataaagtttctcatagtcattcattgattcaagaattgaccaaatatcttcagtcattagtatttcttttccatttaattgatgaagtaaaaaaataccgtaaagtcgataatgattattatcatctagtaataatggtaacactcgtgattcaaataccgttttactttcctcaattacccaaggtgcataaccaacatcaacttcagaaatttgagtgagcttg

SEQ ID NO: 4436 - DNA, 3105 bp, Artificial Sequence
  Description of Artificial Sequence: synthetic nucleic acid sequence
agtggaccaggagtagtccaaggtaaaaagatactaaaactattcatatttaaaacatcaacaaaaaatttaaaaatccatatatttactataggtgcaaaaataaaaggtataaagaataccggatttagtactagtggtgcaccaaaaagtatgggttcattgacaccaaagaatgtaggtacgactgatgctctacctatcgctttatttctttttgattttgttaaccacataaacataaatggaacaactaatgttgcaccggttcctcccatagttgctacgaacatctgtgtacccggtgtaattactttatcagcatgttctccagcttgtattaagtgtaaatttgtttcaaggttcgcataagtaattgctgcaatcgctggttcaacaatagaaggtccatgaatacctacaaaccagaagaacgcaaacgcaccgaatatgagtgttaccccaatccaaccatctgccgcagtaaatagtggctcaaatacttttaatactgcatttgctacattcgtgtggactattgctctagaaagtaagtctaaagcatacaaaattaaaattacggctgataaagggaaaatatctttaaatacttgagatatatttggtggtacttctttaggcattttaatggtaatatttcttttgacaaagaaattataaacaatcacggtaataaacgcagaaataaaggctgtcaataaaccttttgttcccataaatgcacttgaaaatccaccatctttaacaggatcagcagctaagaataaaaatccacaaatagctgccatcattgtcgaaataaagttaatctgattcgttttatctagttttcgattgtaagaatcagttaaagatttagctgtggttcctgctacaagcaaaccaactattcccattgtatagttatagggtttcatcaatataccttccatagttttactccaagtaaaaccaaacacatttggtacataggtaattaaaataaatatacttgagaataagataattggaatagcagcaataaatccatcacgaatcgctcttaaataaatatttcgtgatattttttcaaagaatggctttcctttttctatccatgctattaatttattcataggggtcagctcccttttttgtataattcaattaaatgcttcattaaatcttttaaaagtaatgttgtcattaaatggtcttgaccatgaatcatagtgatactatatgcgatatcctcgcctttagcctcttgagctagaagattggtttgtgctttatgtgcattagcaatacattcattcgcttcctctacaagttgttctgctttatcaaattcactatctttagcagcatttaaagcttctaataattttgaacgtgcatccccagcataggcaacaatttcaaatccgagtaattgtacctcatctctattcatttgaatatcctcccttacattatttgtttttccatgatgtagctgttgttttcaatactgtattcaaatcatcaatattcttaaatcctaccgtacgcaaccattctctggcagcttgctctccttcttcaatgtataccttaactgctcctgaccatgtggcacgtccacataaaacaccattgaattgcgcaccagaatcatgcgcaaattttaatgtatcttggaacaattctgctgatacacctgcacttaaataaatatatggtaagtgagtagctgcatcttgatcacggaaatgttgtgcagcttcttctttagtataaacaacttctccttctgaaaatccttccacaaaattcatattcacaggtacttcaactttaagtacatccacattaaaacgatcttcagagaataacttcattgcttcattaactttacgtggcttaactttagcgaattctgcacttttattgtcaggaatattgtcgtcatatgttaaaacttccaagaagaaaggaatatcttcggcaacacattctgaaccaattcgttcaatatatgctttcttttgtatgttaatttcttctgtgtcatctacatcataataaagtaaaaatttaactgcattggccccttgctctttcaaacgtttcgcagaccattctaccaagcaatctggcaaacgacctttcgcattcacatcatatccagttttttcgtatgcaagtaatagtccgcagtcattatttcgagcatctgatgctggtaaaccatattctggatctaataaaattgaagacgcatattgagttaattcttcagaaacaagtacttttaattgttctatttgttcaactgttggtgtttcagattgatgttctgccatcattctttttaatgcaccacgttgatcaaatgctaaagctgaaataataccttcttgattacttaatttctcaattgatgacactttttgttgtgattttgtcataaattacacctctataacttctatttgtttgaatatttcgtcaaatttatctgtattaatatgacctgtttgttgttccattgcatttagcattccgaatgcatttgctttttttaataactcttcatcggtttgttgatgaatgagtccagaagcaattcctgctacagtggaatctcctgacccaacaggattaactactttaatgttgggaatattcaccttataaaatttttgattatgttttgcaaaagcaccttcactgcccaatgaaacaataatccattcaatatcattaaatattggctgacttactgccgctttcaattctttaatatcattggttactttgtaatttaaaagttgtgataattcatctatattgggtttaattactgtaggtttcacattactaataagaacttcctcaagtgattgaccagagctatctaaaatggtcaaaattccttgttcttttgctaatctcacaatatccgcataataatcagtattaagtcctttgggcagactaccagacataacagccacatcagtttctttgaaaagttttaatagatgtgacttgaattcctctgattccttaagttcaatcgtgggacccttttcaaggatttcagtttgttgtccttca

SEQ ID NO: 4437 - DNA, 1315 bp, Artificial Sequence
  Description of Artificial Sequence: synthetic nucleic acid sequence
gcacaatatgcacatgcacgaatttgttctattctaaagcaagctaaagaacaaggtattgaagtgtctactgatgcagacttttctaaaataaataatgataaagcaatagacttattaaaaaaagtagcagaattcgaatcgacgatagagagtgcagccgaacatcgtgcacctcatcgtctaactaattatattcaggatctagctgcagcattccataaattttataatgctgaaaaagtgcttacagatgatacggaaaaaactaaagcacatgtagctatgattgaagcggtgcgtattaccttgcacaatgcattagcattagtaggtgttacagcaccagaatctatgtaaaacttcataaaatagatacacgagagcctgtgacatatttatatgtacaggctcttacattatttagtccttattattgatgcattccaaaaagaaaaaacaagcaaagcaaaccgatattgggacacagcataaagtttgttataaaaggaatattaacaattaggtaggacaacacctcagacttcttgggaaaattggacaatgtagcatgcgagatataacaatcatgcgaagatttgtagggggagaaatcatgttatcaatagaaaaattatatcaaattctatatcaaaatatgggccctcaatattggtggccagcagaaacgccaatagaaatgatgcttggggcaattctagtccaaaatactaattggaacaatgcagatatagcgttatcaagattaaaagaagaaacttcttttaatgcacagacgatattgaaaatgcctttagaatcgttgcagcaagtgatacgttcgagtggtttctataaaaataaagctaaggctatacaggcattgttactatggttaaatcaacatcattttgattatagtagtatagctaagttatacggtgatagcttaagaaaagaattactcaccatccgtggtataggtgaagagaccgccgatgtcttaatagtatatatttttaaaggtaaagaattcatacctgatagttatactagacgtatttttagaaaattgggatatcaacatacagaaagttatcataaattgaaacaggaattaacacttcctgaatcattttcaaatcaagatgcaaatgagtttcacgctttattagataattttgggaaaaattattttaatggtaaggggaaacaacgctatacctttttagatacctattttaaaaaataagtattgaccttaacgtaacgtcatacctcatactttaattcaggaggtgaaatgatgaaagaa

SEQ ID NO: 4438 - DNA, 2389 bp, Artificial Sequence
  Description of Artificial Sequence: synthetic nucleic acid sequence
ttttgaaggtgatagtgattttagaactaaaatattacatgataatttttatcacattgttaaaaaaagagatcgcttaaacgatattatccgtacgttagaacatcattttcacaaagataacgatgagattgaggtaactacaatgcaaaatttcaatttaaatgaacagtatgaaaaagaagcagcaagtaagtatggagatactcattattatcaagcatataaagataaacaaaaatgtaaggatgaatcagaacagcaaaatcattttgaggaaattaataagcaattaaatatgttttttgacgaaatgaatcaactatacttaaacaaagtttctatacttgaagcaagtggaaaaactaagaaattacaatgtattttgaaagaacaagttcctaattgtgacaatcaatttttagaatatatagctcagatttatattgaggacgagcgatttgtaaagtttattaacaagcaacgtgaacgtggtttgaatttatacatttctgacgcgataaaaacatttattaaattataaaacattatgtgtctgggacattgttgattgtctcagacattttagcattttaccgattgatactaacattataaaactgatcaacacagaaaatttcaacgagaaattccacagacaaggcaagttggggtcggggccccaacacagaaaatttcaacgagaaattctacggacaaagcaagttgggattgtggccccaacacagagaatttcaatgagaaattctacggacaaagcaagttggggttgtggccccaacacagagaatttcaacgagaaattctacagacaaagcaagttggggttaaatatattaatagatttaattcaaagttgtcttttttcatattttgtgaaaatcaaataaaattgtatctacaaatattggtatattttgatatgatgaataggaacattaaaaataatttgtgaaagggtgatgctccaaatgaaaagtaaactatggatagttatatgtgcattgattgtagtactggctgcatgtggtcaagatgccaatcattcatctaataataaagacactgaaaaaagcgataaaaaatatcatagaattatttcgctcattcctagtaacacagaaattttatatcgcttaggaatcggagaagatatagttggtgtatccactgtggatgattatcctaaagatgtaaaaaaaggtaaaaaacaattcgatgcgatgaatttaaataaagaagaattaataaaagctaaaccggatttgattttagcgcatgagtcacagaaaaattctgcaggtaaagtgctaaagtcacttaaagataagggagtaaaagtcgtttatgtgaaagatgcacaatcgattgatgaaacttatgatacttttaaatcaattggacaattaacggatcgtgaaaaacaagctaaagaacttgttgatgaaacaaaacacaatgtagaaaaaatcattaactccgttcctaaacatcataagaaacaagaagtgtttatggaagtatcgtctaaaccagacatttacactgccggaaaagataccttctttaacgatatgttagagaaactagatgctaaaaatagttttgatgatgttaaaggttggaaatcagtaagtaaagaaagcattattaaacgtaatcctgatattctgatttccacagaaggtaaatcaaaatcagactacatagaaatgataaaaaaacgtggcggttttgataaaattaatgctgttaaaaatacacgtattgaaacagtagatggggatgaagtttctcgaccaggtcctcgtattgatgaaggtctaaaggatttaagagacgatatatataaaaaatagtcatttgaatactatgtattgtattttacttagatgattaattttattaataagctgacagagatgtatttcaaacgcctgggacagtagttattgtctcaggtatttttaatatttatgatagacggatattgaattaaactgatgcaaatatgccatttgattcaacttcattactcgatgactaaatcgtgcaacgaatggaagccagtcgttttacactttttaagtattgttttgttaatatagtgattaagaaagtattgaaagagagagttattcactttatattgataaccataaaaagactgaaatccaacaatgtattgaataggttctcctgtgatcattctatccaacgctttatccaatttgttaattgatgtcaaagacatttgctcatctttatgaattaaataatctgttttcgaccaaccaaaaacatctaaaaacaaccattcggcacgagttgattcaaacccctcatttacggcaattgtcttggcttc

SEQ ID NO: 4439 - DNA, 2460 bp, Artificial Sequence
  Description of Artificial Sequence: synthetic nucleic acid sequence
taaaagatatttataataggagtctttcttttgtaaatctgtttccccccacaccttatattctttatcatctgtccatggtgctggtgtcacgttatactcatactcactatatggttgatctttaaaaacaatatctttttcagcatatcccattataatattaaaactcattttttcattttttatttttttatcccaacccttacgttctataacgtgattgatgattttctcactcttgtgtttctgataagtaatcacactaaaagtccaaactgttaaggtaataatgataacaataatagaagttattaatatttttaagattttattcattttttaatttctataccatgctgttttaggccagtttttatgtttgggtttacctttccatgatgagcaatctttgacaccttttctataaatactattcaaaccatcgcatttagtcatttttcccaaggaagaacatttataagctttggcgtgataccagcaatcacttttataaaaatctacataagctctaggatgtttttttgaccagtatctatgatcagattttgttccgttaaatctattacaatgtacatgagtccctttttttactttttgaccatcgtgttgtccgttatatgatttaccactataaaaggttatcccatccgatatttttccatcatctttcccatccatattaccaacaaaatcagagaaattaattacttttgtattattttcagcactaccatcagctgaataacttgaagttttattctctggattaggtaatttgtcttctacaacgactttatttccatgtttagttatgtggaaattattatcttctttttctatttctttaaattgtttcatcgttttggaatcaacttgagaagtatcatacgttcccactaatttaatattttgaggagttgaatcgtgactttcttttgcgtgagttatatttgtttgtacactcgctatccctgaccccgatactaaaatgcccaccaaaattagttttgcgaaatttttcaacttttttacatctccttgaaaattaaatatattatgtagaaaaaatatacacttttaagttatcataaattataaaaatttttttgaaaactaggtgaactttaatgaaaaaagtattctatgttattggtataataatttttttagcaatttgttatatttttgtaaactttttctattttgattcatgggcgtgtcattcaagtgaaaagcaattaaataattatgttaagcatgaagatactaagaaattaaaagaggttgctaaagataataaaacgtatcaattcttaaaaaagcaaaataaaatttctatagatggaaaatctgataatcaaggaagtgggcatataggttattatcgtattgatatcaatggaaagccagcttcattatttataaagattaagtatgcatttcttccagaaataccaaagataaaaacagtagagttagataaataaagtatctgaaaagagcgcttattgacagtttgaaagcgactaataatcatattattagtcgcttgcttttttattgttcttttaatcatttaatcgtattttttaatggtcgattatcacataatatgtactgaagttcataaatgatgtattatcaaagtgttctaataaacgatgaaatcaaagaaaagtaacataattaacgattatgggtaattaaaatgtataaattatatatttaacaccttaattttttagcttcttttataagacctaactgcttttgatggaatatatttattgagactatatggctcaataataaattgagatgtaacaaccggaagaactgataatcgtccggcaccataataatacgattgccaaacaagtttcgaacagtatgtaacgcttttagaatatggattcgtcgttatactgtaaggtacaccgttaaaatgagatttcgcatagtttccagctttacctctatatttttttggtgctcgataaaccttgatataacgatgtttgggacttccttttctttttttcaaagtactctttttccaatcactaaaactttttaccctcacaggttgtccatatccaggcgcttctttaacttttccttttccagtatatattgcagcatgacctgtaaacccttttgaacttacgttatttgtgatgaaaaaatcaccttttttcaaatgaaatttcttttttcttgaacgattttctcgatctattcgatcttgtttttgttgtttctgccattgtacttcagctgttttctcaaattctgcttcatctttacgctcttgagctttcatttgttgccattgttgttcagtaattgatttagacacaataccttcattttgaagttcctttaacgactcagagttagttgagctatcaccttgtgcatttacacttcctgtag

SEQ ID NO: 4440 - DNA, 3462 bp, Artificial Sequence
  Description of Artificial Sequence: synthetic nucleic acid sequence
agtttccacaaataaatcaagatgatttaacatcaattcatgcagttgaagcaatgagaaatctattagtaaatactcaagaacctttaaccttgattgccataggtccactaacaaatatcgctattcttttaactagttatcccgaagttcaaccatttattaaggaaattgttttaatgggtggtagtaccggtagaggtaatgtaacgcctttagctgaatttaatatatattgtgatccagaagctgctcaaattgtatttaactctggattacctttgactatgattggtcttgatttggctcgtgaagcattgtttactcaccattttgtaaaagacttcaaagatacaaatgcaacttcaaacatgttatataatttatttcagcactataagagtgaagattttgaaataggatttaaattatacgatgtattcactatattatatttgttggatccagaagcctttaatgtcaaggaggcgtatactcaaatagaattaaatggcaactttacaaggggagccacagtggtagactttaatatggagcatcccaattgtacagttgttttaagtcctgttgaaagacagtatgaggatttattcttaaacgccctttcttattgtaaataattaaattgcaatttgaatgttattttattaatcatataacaaatgcccggttacacttcagattgaagttccgggcattcgttatatataatttattgaagactaaccttgtaaatatggaataacgagtctaatccattattaacaaaattacaattactcaactttaacacctgctgtattataaggctttttctggtcaagaatattatagaaaatgtgtctcattttgtcttcattactcactaatccaggtgtattacttacattcgtccctaaaatgacaatataccgatcattaaagtaaacagtaaaaatttgaccaaagaataccccgttgactctatttaaatacggagttatgtaaaaaccatatctatattcttctggatattcttgagttccaaattcatgtaaaataggtcgagtttgacgtgcattaaagattttattttgttgtaacgtataaattaatttgcccatatcatgtggcgtcatatataaattaccagctccataatattgatctaatatattaggtttaaggaatgaaaaagtattatttttaaacttatagccttttgccatctcactttgaagaggtttctcgtcataaaaagcagtatgtttgagattatatttattacctaatcgttcataataatttttaacatatggttttccagtaacattttcaataactttagctaaaactaaataattagcatcattatattgatgcttatgataaactgtatcatcaatacctcgagcttgaattgctctaacagcctgttctaaatttttgatattagttgaagcttcatatttatatagtccacttttatgtaacattaaatctttaattgtaatttctttatttgttttaaaccaaggaatatatttagtgactgaatcttgcaaattcactttattttcgacttcaagttgcttcagcattaaacctgttgtaaatttttgcgctgatcctattaaatacattgtatttgcagtgttctttttgcctttctctatatcttgataaccatatcctttattcattttaacttttccattatcaaatacagctacagttccattaaattgagttttttctaaatatttgtttatcgatttggaagtaggatcttttttatcatatttagtctttatttttttaggtttctcaacagtcttatctctcttttctatataattcgtatttccactttcttgacttaacgtttgtttttttaattctaggtgtcttgtccattcaacacctaatatacctattgacacgactaaagttaataatacgataataaaaaatacgattttaaatttatttaatttcatctttattgtttgcctcacactttaatgtcttaaaattttgttgaatattcacatcatatatcaatatattatattattcgttatcatttttaagaattaatacccacaatacttgaataaataattatctgatgagatatctgaaataaatgcttatatattttcctagctaaaatgataatgacttttttatttaatcacacgactacacttaaacgattaaaagattttaaatactttaactgtaatttaataatactttggttatctgtgacacatccagttacttttaagaattacaatgcaactaatattatgatattcataatgtcaacgaatacaaatacttgttcaagaacgttataatatatctaactactaaattaattagtaaatacttttttgattatcaaatttaagattcttaatcagaaatattacttacagatattatttttgaacaactaatccgtctgcaccttgttataacaatatttgtagctattaagctaaagtttattataacttaaagctataaagaaatcactttaattagataatacacttatttaaaaataaatctatagtactttggtactatatgaaaattgagttaaacaataagttgtttaactcaattttataatcattcgccaataatattttgtaacaataaatgttgatgagagttgtaatttgattaataaagtaatacaatttaaggctatagtgtacttaataaatcataactttttatgtatcaatcatttgtgaaatatttaaaatttaactaggagtactaacaatgaacaaatttataaaatattttttaatattattatcttttggtctcctcgttgttccaattatttttgctactcaattatatcaaagttcagaatcggcatttgagtcatctcaaaacactaaagattctcaacgaaagtctactttaagagattcaaaagttgatcctgaaaaacaacctatatcaattttattcttaggtatagacgataatgaaggtagagaaaaaaacgggcaaagtgtagaacattctaggtcagatgctatgatattatctacttttaatcagaaaaagcatcaaataagaatgcttagcatacctagagatactatcagttatatacctaaagttggctattacgataaaataacacatgcgcatgcatatggtggacctcttgctgctatggactcagttgaagcaacaatgaatgtaccggtagattattatgtgcgtattaatatgaaagcctttgttgaagcagttgatgaattaggtggtatatattatgacgtaccatataacttaaatgaacctaacagtgatgatactggtagaattaaaataaaaaaaggataccaaaagctaaacggcgaccaagcattagctgtagctcgaactagacaccatgattcagaccttaaacgtggtcaa

SEQ ID NO: 4441 - DNA, 1369 bp, Artificial Sequence
  Description of Artificial Sequence: synthetic nucleic acid sequence
tcatagcaattaaacctttaagttggataacttgaacccattcacctgcatcttgaggtaacatgataataattagggctaaagcactaatcagaccaggtatagataaaaatttgatcatattcatattaagtagttcttttaaggctatcaaagctaataagaatgcgaaaagcattaatattaagccacctttgagcaagatgggcaagaatattaataaggctataatcgcggttaatgttcttactttcattttttactcctcacttaatcctccaaaacgtctttggcgtgattgatatattttcaaacactctcttaactctttttcatcaaaatctggccatagcttttcattaaaaataaattcactatatgaagcttgccatattaagaaattgcttattctttgttctcctgaagtgcgtattaataagtctggatctggataactatgagtcattaaatgacgctttattaacgcctcatcaatcacttcagatccttgtccgtttaattgtaattcgttatatattgctttcatactctgaataatctcagctcgtccaccataatttatagcaaacacaagagttaacccagtattgtgctgagtcttagctttagcaaaatcaatagcatcaattgtagattgtggtaaaccttcataaaaccctattgtttcaattttaacattcttttcaattaattctggtagaaatgttttaaggaaattcactggaagattcataatgtaattaacttcactttcaggtctagaccaattctctgttgaaaatgcgtataatgttaaatacttaatacctatatcactcgcttcgcgagtaatttttttgattgtttgcataccttcataatggcctttaattctaggcattttacgtttttttgcccaacgcccatttccatccatgataatagccacatgttcaggtatattatgtatgtctaagtcattattatggtttgtctcagttttatttttatttttcagctttttaaacatggtctttcctccgagcctgatcgtctctgtttattatattagttaattaaacaatcatctatcattttatcatactcatttattccattgaataagcaaataaaaaaactgtaccaaagtcttagttggtacagtttagactatgaagatattcaatgtctaacagatgtttcattttagataatatactaatatgaaagtgtttgcgataataaaatacctatactgacataatatctttttctttgtcggcaaccaattgatctatttctttaatcgaattatctgtagctttttgtacatcatcagtttgacttcttaagtcgtcttcagtaatgt

SEQ ID NO: 4442 - DNA, 1469 bp, Artificial Sequence
  Description of Artificial Sequence: synthetic nucleic acid sequence
ttaaagctggtacagagatacgaataacctcaccatcactcgttggattaaccccaagattagccgcgataattgctttttcaatatcagcaactgatgacttatcatatggtgaaataactaatagacgtgcttcaggcacattgatacttgctaattgttgcactggtgtaggtgcaccatagtagtcaactgtaacaccattaagtaaattagagtttgctctaccagcactaatgttagcaagttcacgagataaattatcaattgatttttgcattctagactttgtatctttgattatgtcactcattttttacacctcaaaattattttgtaattaatgttccgattttttcacccattacagcacgcttaatattaccttcttccataatagagaaaacatttaacggaatattattatccatgcagaacgatgaagctgttgaatccatcacttgtaaaccttcttgaagcatttgaatatgtgtcaaatgttcatatttaattgcatttgcatcaacttttggatcagctgaataaacaccatctacattatttttacccattaaaattacatctgcttctacttcagccgcacgtaaagcagcagttgtgtcagttgagaagtaaggattaccaattccagcggcaaatataacaacacgttttttctccaaatgtctaattgcacgtcgacgaatatatggttcagcaacttgtttcatttcaatagaagttaaaacacgtgtatcacaatctaattgttctaaactgtcttgtaatgccaaagcattcataacagtagcaagcatccccatgtaatcggccgtaccacgatccatacctaggtcgctaccagttttgcctctccaaatatttccaccgccgacaatgacagcaatttcacaatccattttggcaacttcagcaacttgctgtgcaacgcttttgataatgataggatttatgccgaatcctttatcacctgctaaagcttcgccactcaattttaatactacacgtttatatttagaagtttgtgccattttcttatcctctctatcgtaaaaatatgtaaatatataagtaaagaagacacgattgtctcctttcagctatcttaacaataggctaataaaaaggaaacgtgtgaggtgtcttcttccttgttaaactttatgacagattatttcatttgtcctttaacttcttcagcaaagttttcttcacgtttttccataccttctccaacttcataacgaacgaaatcagtaagtttaccacctttagcttttaagaaagcttcaacagtttcgtctggatttttaacgaagttttgatctacagcacaaatttcttgtaaatatttacgtaaacgaccttcaaccattttttcaacgattttctctggtttaccttcgtttaatgcttgttgttttaatacttctctttcatgattgatt

SEQ ID NO: 4443 - DNA, 3569 bp, Artificial Sequence
  Description of Artificial Sequence: synthetic nucleic acid sequence
tatgtatacatctataatataagtgagtgattgagtacaataatttaacaggtacaaacttaaatttaataatattaaaatagtcaaaatagggaatagagtttagtaatgtcgatataaggatgtgtttaaattgctacttaaggttgaacatcttacatacaaggttgataatcgtacgattttagatgatattaatttgaatattaataaaggagacacgattgctattgtaggtccttctggaagcggtaagagtactttactcaaacaattgaatcatttaattagtcccacgagtggagatttatatttgaatgatcaatcttactttaattataagccggaagagataagaacacgtgtgagttatttaatgcaacaaagtgagttaatcggttatacaattgaagataatatgaaatttcctgctgaggctagaagtgaagcttttgaccgtgataaagcgaaacaactcatctctcaagtaggattaggtaattatcagttagatgctcaaattgagcacatgtctgggggagagcaacaacgtattaccatcgctagacaactcatgtatgaacctgaagttttattattggacgaagctactagcgctttagatacacataataaaaagaaaattgaagaaattatatttaaactagcagataaagggattgccattttgtggattacgcatagtgatgaccaaagtatgcgtcattttaagcgtagaatcacaattactgacggtaagatatcgagtgatgaggagttgaatggtaatgagtaatacagcactttgtctgacagcacttttattactaatccctatctttatttcttataaagaaggattacatattatcaaagatttagttattgctacaattagagcaaccatacaactattgattttaggctttttattacattatattttcgaaattaatgaaaaatggttattagtgctatgtgtgttagtcattattatcaatgcatcttggaatacaataagtcgtgcttcacctgtcatgcatcatgttttttggatatcatttgtggctatatttgtgggaacagcgctaccattggcagcaactgttgctacaggtgcaattaaatttacagcgaatgaagtgattccaattggaggtatgttagctaataatggtttaatcgcgattaatctcgcttatcagaatttagaaagagcatttgttcaagatgtttctgatattgaatccaaacttacgttagcagcgacacctaagctcgcatcaaaatcagctattagagaaagtatacgcttagcaattgttcctacaattgattctgtaaaaacatatggtctagtttcaattccaggtatgatgacaggattgattatcggaggcgttgacccacttcaagcaattaaatttcaattgcttgtcgtgtttattcatacaacagcgacgattatgtctgcactcattgcaacgtatatgagttacggtcagttctttaatgctcgtcatcaactcattgctagaacgcaacgcacaagacaaagtagttaaatatcgttgttaatctacacagtacagctttaaatattatataataaaacagttataaacgatgataagtttgtagctgttttattttagtcaaaatcaatagttacgttattactttgaaaggggcatctagttgttatgactgtcgcacgcacaacaacatttatattaagtgttttcatcgtaggtatggttgagatgatggttgcaggtattatgaatttaatgagtcaagatcttcatgtttctgaagcggtggttgggcaactggtaacgttgtacgcgcttacctttgcgatatgtggtccgttattagtgaagttgactcatcggtttacttcgcgatcagtattattatggacgttaattgtctttatcttcgggaatggtatgattgccattgcacctcatttatgaaacatattgatcatctttagacgtgagtccataaaatttatctacttgctcttttattttatcgtaatcgatggttaccccttttaaatctacatcttcgtctatatcttgtgcatcttctttaaatcctgcgatactaaagaaaccttcaatgtgatgatgcgtttctgcaagaaattttaaagcagcgattgagccaaatccgtgggtcacaaaatatgtatcttttttacggatatgtagttgttgtttcatttcattaacccactcatcaatttgagcatgatcatttgcttcaagattgaataaagaaacatcatacccttccaaagttaaattatgccttaaccattcataccaatgatttttagaattaccatgttttgagtgtacaattataatgtctgtcatctttcctctcactcctttattaattctattgtaaataaaaacactttaaaaagaaatcgaataagtttccttgccatatatttatagcgtaaatctaacttattacattcttctaattaaagtgtcattatattattataactcttctaatatttcatcaactgcattcttaccttgttgtatgcagtctggtaaaccgacagcttcaaacggtgcccctgtaacacgtaatctaggataagttgttttaatatgttgttgaatttctttaatcattttaatatgacccacgtggtattggggcatactcttaggtaaccgatttacaattgtaaaatcaggattccctgagatggtcatcatttggcttaagtcttttctaacaattgatactatttcttcatcggtgtgatcatctactacagtatcacctggttttcctatatatgctcgaattaaaactttaccttctggagtagtaaatggccatttctttgatgtccaagtacatgcagtaatatccgtttgacttgttcttgcaataacaaagccagttccatcgtacgtattggtaatatttttctcatcaaaggccaaaacaactgttgcgacagtagtagaatccatgtttttaaagtaatcaaatgctggatcgtgactaaaccagttcagaaatacttgatgtggtgttgttacaagtaagccattaaatttctctttactgtcatcttctaataaaatttcataatctttttgcgaaatcaatatatctttgactggcgtgttatatcgtatgtggacacctttactttcaatatctttaacaagagcctctataaaagaactcaatccgtgtctaaactgtttgaattgtcctttaggagcacctggatataattgacgtttcttaatacgttgttctttttcgtctttcattcctttaatcaaactaccaaattgttcctctttttccttaaagttaggaaatgtactcattaagctcaattgatcaatatcagtgccataaataccacccattagtggttcaattaagttctctaatacttcattacctaatcgttgtctaaagaaactaccaacagaaatatcatcttcaatttctatcggttttttaaacaaatcaagccccgctcttaatttaccaataggtgaaat

SEQ ID NO: 4444 - DNA, 2282 bp, Artificial Sequence
  Description of Artificial Sequence: synthetic nucleic acid sequence
tggatttcgttgatgagtgtttcgacttcgctcatctttttaaaatgcgctttaaatataaagcaactatctccagaaattctatagcaaaaatcaacattgttttgaactgaaataaatgctttgaaatctttatataggttattttttatagttacttctatcaaaacattaatatcgaaacctaatgcatcgtaattaatatcgattgtatatcgttcaatgattttcgaatcaataagtttatagattcgttctcgaacagagggtgtagataaatttacttcctttccaatttcagaaagcgatagcttactattttgctcaagtaagtgtaggattttttgatttgttaggtccaatgggcaaatctccttattattaataagtaaactataaatttactttaattatagcattcatcactggtgtttgattaattaaaataaataagaggtgattagatggctataattaacttatctcatcgtggtgatacttcttttgacaaacttctcggacatctccctagtgttcaagaaaaatggaatgcattggaagatatattaaaaaatgaggggcaattatctgttgatttaaaagaagaaattaggaaaatactagctcaaaacagtggttgtctatactgcaaatctaaaggaaaacccaataagaaatttaccgatgaaaaatctttagtttgcataggatttgttgatgtttatgtgtcacaaaatggacgggttccacaatctacaatacaggttttaacaaagacactaactgatatagaaattgtagaattgttagcattcatatcatttacccactgtcaacaagaatttggtgccatgatgaatttacaacctagcaataactgaaaatttaatactgatcaataatatatgcctcttgtaaagtattagttactttgcaagaggtttttattttaattgaaaattgataattaagaacgtagaaagatttcattataaaagaaagaattttctgaaaaatacttgtcagataacttgtaacatgttagtgtattactacatttttactttaatgtattatcgaactaaagaattcggcgtgagggaggggtggcttaagtatgaacaataccatcatttcaatgaaagaaaaggaattacgttttttaaagttttttcatcaacaaaaatataatgttgtagattttaacttaattgaagaattggattggcaacgattgactcatgaagatttgcaacaaatggatgaaagaagcttttggcaacaaaataaatctatctatgcattaagaaatgattttaccgatcaattattcagatattattcgaactatccaacacattttaaaaaagtagcttatgcaggggatattatcagagataacagagttataaagcaagtcggcattgagaattacgagccacaatttgataatatcactcaaaatttcttagatttccaatattttattcaaaacgtacttcatgatgacattcaatttatcattttaggtcactatcaattgattgatgcacttttagagaaaaatcatcaaactagagaagttatggagatgatagaagaacgtaatttatcagggcttattcaaacactaactttcaatcatcccatcattcaaattcttaaagagaacacattaaatcaacttaaaatactctctcattatttaccagagcgacaccctgcaatggtggcaattcaatcttggtcacaatggtttactgatcatgggattactgaaatccaccttgatgtaactgcacaagcgcctagatcttattacaaaggtatttttataaaatgtcatcttaaaaatactgctcatagcgttttgacaggtggatattatcacggttcactagaaggttttggtttaggattaacactttaattataaaaggtgaggtgaaacgccatgttacgagttgcattagcaaagggtcgtttattaaagagttttatcgaatatttacaacaagttaatcagatagatattgcaactgtacttttaaatagacagcgacagttattgcttacagtcgacaacattgaaatgattttagttaaaggaagcgatgtgcctacttatgtagaacaaggtattgctgatgtaggaatagtgggaagtgatattctgaatggtcaaaaatataatattaataaattactcgatttgccatttggtaaatgtcattttgcgttggcggcaaagccagaaacatctcgctataaaaaagtagcaa

SEQ ID NO: 4445 - DNA, 1011 bp, Artificial Sequence
  Description of Artificial Sequence: synthetic nucleic acid sequence
gatcaagtggaaactgagaagcttgaattagagcaaagccaactaaaaaatgcatacgacatgctagataatgaaacacgagatgcattagagcaaagctatcagagaattaaagtgtaccaagaaaatattaaggtaaaacaggaatcatctcaacaaactgaatgttatgaacgataccatcctatcgaacgtgtaggtatttatgtgccgggaggtaaggctagctatccgtctacagtattaatgactgcaacacttgctcaagtagcaggtgttaatgagattactgttgttaccccacctcaaaatagcggtatatgtcaagaggtgttagccgcttgttacattacaggcgttcatcatgtttatcaagtcggtggagcacaaagtattgcggcgctaacttatggcacggaaactataaaaaaagtcgacaaaatcgtaggtccagggaatcaatatgttgcttatgccaaaaagtttgtattcggtcaagtaggcatagaccaaatcgcagaaccgacagaaatagccttgattatagacgaaagtgctgacttagacgcaatcgcttatgacgtatttgcacaagcagaacatgatgaaatggcttgtacttatgtgattagtgaaaatgaaaaggtacttaatcaattgaacactataatacaagagaaacttcagtagatttagttttataataacaaatttcctaatcagtgactatactattttaacaattcgttagtaacctcttcattattatcataataatatattcttggaagacgtcttgataaattacataatacttcgtagttaattgtaccttgtttatttgctacggcttcagctgattgtggtgaatcaacgtgattatccataagtattactttttcacccgtttttacatgagaaggaaccttaactatcatttggtccatacaaatgcgtccaatgacttcacattgactcccgttaacattgacgaatgcaccttgcatcgat

SEQ ID NO: 4446 - DNA, 1983 bp, Artificial Sequence
  Description of Artificial Sequence: synthetic nucleic acid sequence
agttactgtcacactactaacatttctatggtcaaagttattcgaaacagtgatatcgttatcgtttaaattaagtccagaattagctgctttaaatgcttgtttgattttattgatttcatcattagacaaagaaacaatatatatgaaagaaacagactcttatcacttaagatatttatcaagttcacgttctagaggcatgtttcgccttgttagtggaatgacatttgcgaataatccattaaatatgatggcaagtttaagtaatatagtagctattgcatttactacaggtgcatttggacttgtatttacaacgatgtggcaaatggcttataacttttcaatgtggcgtttatttggaatttcaattattgcgattattggaatgctaatatggataatgatgtcacatgatttatgggaaccagttaataaaagcaaccataagcgtattacttggttatacaatcttacaacaataatgacattgatttttgccattataatttattatattattctttatttactattcttaattgctgaaatcgtattattgccatcaggatttttaggtcagcaagttggattaaaaggtcctgcaggcattgatttatatttaagtattccatggtttgcagcttcaatttcgacagttgcaggtgcaataggtgctggtttacttaatgatgaactcattaaagaaagcacatatggatatcgtcagcgtgtaagatacgaagaacaacgtcgataaaagcagtcgcttttatcgacattttatttttgcaatacgaaatttaacagtttatctgtcatagaatatagcgattttatgagaattaatttaaaatattgataacaacttttttatagagataacttgaaagtagggattgaattgatttgttctaattgtggggcacatttagagaaggatgataaattttgtgttaattgtgggcagagtgtgttcgataatccaaagacaaaaactgaacataattttaatagtcaagatagacaatgtccaaagtgtcacaaagtagtaaatgtcgatgataagttttgtatcaattgtggtcattctcttcagcaaacattatcaaattcaaatgacaacatagcatcacatacatattcaaatacaaaacctgaaattgaaaatgaaactgcagatcatattcgattgacagaagaagccaagcatctatttaataacacaacgaaatcaataggtaggctagcagggaatgatgaaagtttaaaattaaatttgcgtgacatgttttctgaggtgtttaaatctcacaccaaagatgaagcggatgatgtatttattgctggaacaaaacgtacgacgccacatattaatgaagtttccgaggagtggggaagaccttgggtgttctcacgtgtatttttagctttaggtatcactttcctagcgttatggatattaacaaatatatttggtaatgccaatgccataccaggtatgatatttattggcgcactattagttcctatttcaggattaatcttcttcttcgaatctaatgcatttaaaaacattagtatctttgatgtaatgaggatgttctttattggtggtgtattatcactcattagtacaatgattttatatcaatttgttacatttagtactgaatcgcaatattatggaattatgactataacagatgcgttcatagtaggatttgttgaagagcttggaaaagcaactgttgttattttatttattaattatttaaaaacaaataaaatactcaatggattacttatcggtgctgctgttggtgcagggttcgcggtgtttgaatcagctggttatatctttaggtttggatttaatttatttgatggagttaataatattactgaaatcactatacaaagaggttggacagctttaggtagtcacctcgtttgggcagctattgttggtgctgcggc

SEQ ID NO: 4447 - DNA, 4250 bp, Artificial Sequence
  Description of Artificial Sequence: synthetic nucleic acid sequence
gacaacaagatgtgcgaactcgatattttacacgactctctttaccaattctgccccgaattacacttaaaacgactcaacagcttaacgttggcttgccacgcattacttgactgtaaaactctcactcttaccgaacttggccgtaacctgccaaccaaagcgagaacaaaacataacatcaaacgaatcgaccgattgttaggtaatcgtcacctccacaaagagcgactcgctgtataccgttggcatgctagctttatctgttcgggcaatacgatgcccattgtacttgttgactggtctgatattcgtgagcaaaaacgacttatggtattgcgagcttcagtcgcactacacggtcgttctgttactctttatgagaaagcgttcccgctttcagagcaatgttcaaagaaagctcatgaccaatttctagccgaccttgcgagcattctaccgagtaacaccacaccgctcattgtcagtgatgctggctttaaagtgccatggtataaatccgttgagaagctgggttggtactggttaagtcgagtaagaggaaaagtacaatatgcagacctaggagcggaaaactggaaacctatcagcaacttacatgatatgtcatctagtcactcaaagactttaggctataagaggctgactaaaagcaatccaatctcatgccaaattctattgtataaatctcgctctaaaggccgaaaaaatcagcgctcgacacggactcattgtcaccacccgtcacctaaaatctactcagcgtcggcaaaggagccatgggttctagcaactaacttacctgttgaaattcgaacacccaaacaacttgttaatatctattcgaagcgaatgcagattgaagaaaccttccgagacttgaaaagtcctgcctacggactaggcctacgccatagccgaacgagcagctcagagcgttttgatatcatgctgctaatcgccctgatgcttcaactaacatgttggcttgcgggcgttcatgctcagaaacaaggttgggacaagcacttccaggctaacacagtcagaaatcgaaacgtactctcaacagttcgcttaggcatggaagttttgcggcattctggctacacaataacaagggaagacttactcgtggctgcaaccctactagctcaaaatttattcacacatggttacgctttggggaaattatgaggggatctctcagtactaagtgttaaaagtgaataaacgttttgatgcgctagttaaaaaatcaactaaacataactaacatcatgcaccttttacgcataaattattttgaaaattcagaactttctataaaatgactggaggattttattatgacaaaagtatattacgacgaaacagtaactcaggatgcattacaaggtaaaaaaattgctgtcattggttatggctcacaaggacatgcacatgcacaaaatttaaaggacaatggttatgatgtagtcattggcctgcgtccaggacgatcatttaataaagctaaagaagatggatttgatgtttatacggtaagtgaagcaacacaacaagcagatgtagtgatggtactattgcctgatgaaattcaaggtgaagtatataacaaggaaattaaaccatatttagaaaaaggaaatgctttagcattcgcacacggttttaatatccatttcagtgttatcgaaccacctagtgatgtcgatgtctttttagtagcacctaaaggacctggtcatttagttagacgtacatttgttgaaggaagtgccgtaccagcattatttggtgttcaacaagatgctacaggccaagctagaaacattgctttaagctacgcaaaaggcattggtgctactcgtgccggggtcattgaaacgacatttaaagaagaaactgaaacagatttattcggtgaacaagctgtactttgtggaggagtttccaaattaattcagagtggattcgaaacacttgtggaagcaggttaccaacctgaattagcttattttgaagtcttacacgaaatgaaattaattgttgatttaatgtatgaaggcggaatggaaaatgtccgttattctatctctaacactgctgaatttggcgactatgtttctggaccaagagtaattacacctaatgttaaagaaaatatgaaaaaagtacttgaagatattcaaaatggtaactttagccgtagatttgttgaagataacaaaaatggctttaaagaattctatcaattacgtgaagatcaacatggtcatcaaattgaacaagttggacgtgaattaagagaaatgatgccattcattaaatctaaaagtattgaaaaataacaacagtagaggggtgtttttaatggaagaacatattcaaatttttgatacaacacttagagatggtgaacaaacgccaggagtcaattttacttttgatgaaagattaaaaattgccaagcaactagaaaaatggggagtagatgtactagaagcaggttttcctgcttctagtactggtagctttaaatcagtagaagctatagctaaaactttgactacaacagcagtgtgtggtttagctagatgtaaaaaatctgatattgatgctgtatatgaagccactaaagaagctgtaaaacctcaagtacatgtattcattgcaacctcccctattcatttagaacataaattaaaaatgactcaagatgaagttttaacatcaataaaagaacacgtttcttatgcaaaacaattttttgaagtcgtacaattctctccagaggatgcaacaagaactgaaattccatttttaattgaatgtgttcaaactgcgattaacgcaggagccacaattatcaacatccctgatacagttggatttagttatcctacagagtatggcgaaatttttaaacaattaacacaggccgttaagtcaaattctaaaattatctttagtgcacattgtcatgatgatctcggaatggcagttgctaatagtttagcagctattgaaggtggagctagacgtattgaaggtaccgtgaacggtattggtgaaagagcaggaaatgcctcacttgaagaagtcgctttggctttatatgtaaggaaggaccactatggtcttgaatctcaaattaaccttgaagaaactaagaaaacatctgacttaatttcaagatatgctggtatccgtgtacctagaaataaagctatagtcggtcaaaatgcatttagtcatgaatccggaattcaccaagacggtgtccttaaacatcgtgaaacctatgaaatcatgacacctcaacttgtaggtgtgaatacaacagaattgccactaggtaaattgtctggtaaacatgcatttgccgaaaagcttaaagctctgggatatgaaattaaattggaagatcaagttacattatttaaacaatttaaagaaattgccgataagaaaaaaaatgtatccgatagagatattcatgcgattatacatggctccgaacatgaacacaatgctatttttcaacttgataacttacaacttcaatacgtatctaaaggtctacaaagtgcagtagtagttataaaggaaagaaacggacaagttaaacaagattcaagtattggaacgggttcaattgttgcaatttataatgctgttgaccgaattttcaagaaagacgcagaattaattgattatcgtattgattctgtaacagaaggtactgatgctcaagcagaagtacatgtacgaatcattattaatcatattgaagtgacaggcataggtatagaccacgatatattaaaagcttcatgtaaagcatatatcgatgctcatgctaaatatatttcagaatatgagttgaaagaaggtatacgtacatgagttataaaatagttgccttacctggagatggtataggaccagagattctatctggtacattagaacttttaaaattaataagtgaaaaatatcattttgaataccatttggaaagtcatcattttggaggtgtttcaatagattattatggtacacctttaactaacgaaacattacaatcatgtaaaaatgcagatgctattttattaggcgcgattggagggcctaaatggacagacccaaataatcgtccagaacacggtttgttaaaactgaggaaatccttaaatttatttgctaatattcgacctacattt

SEQ ID NO: 4448 - DNA, 2621 bp, Artificial Sequence
  Description of Artificial Sequence: synthetic nucleic acid sequence
taaaacgttctgtaaagtctgttgaatcagtaaataaatttcgtaattgccataatgaatctaattccgctttagtgattaatagctcttcttttcgtgttgaactacgacctatgtctatcgctgggaatattctacgttctgataacttacgatcaagatgtaattccatattacctgtacccttgaactcttcatagatcatatcatccatacgagatcctgtctcaactaaagcagtagctaaaattgtcaaacttcccccagcttcaatgttacgtgctgcaccgaaaaacgctttaggtttgtgtaatgaagcgggatcaagcccacctgacaatgtacgtccactaggtggtatgactagattatatgctcgtgccaaacgtgttatggagtccataagtataattacatcttctccaatttcaactaatcgttttgcacgctctaataataattcagcaactttaacatggtgttctggtggttcatcgaaagtcgaatgaacgacttctgcagattcaaccgatctttcaatatccgtcacttcttctggacgctcacctactagtaatataaacaaattcgcttccggtttattactcgctattgcgttagcgatttcttttaataaacttgtcttaccagctttaggtggtgcaactataagaccacgttgaccaagacctattggtgtgactaaatccataatacgagtggaataatttgtagattgcgtttctaataggattctttcttccggataaagaggtgttaaagcttggaagtgaggacgttttttgacttcttctgcattatggtcgtttacaaaatcaacttgaagtagaccataatatttttcattatcttttggtttacgaactttacccgttactttatcaccacgttttatttcaaaacgtcgaatttggcttgcagaaatataaatatccttctcacctttagaatagttaacggttcttaagaaaccatatccatcttgttgaatatcatctaatattccttccatatagtaattaccatctttttccatttgtgcttccataatggcaagtaccaattcttttttatttaatttactgtaattagttaattttaaagatttggctttttgagtgagctctttagtagtattgtttttatataattcgtggaaagattcatactgcggagatgttcgttctctaccaggcatagacttgcacccatttcattaattatttattttacgaagttcaaaaataataaacgtatagttagcttaaccaaataatagattcttatctcgatatttatgtgactgacaataataaaaagtcacattatagctatatttatacgtttgtatatttctcaaccttctaattactagactaactatagcaaattttcattttaattacaaaatgattttaggaattttaacataaaaaacaaaacacagaacaaaattagttccgtgctttgtttaattgcaacatttaatttaatttactaattatttaaaatatccagctattgattttacttctaagaattcttcgataccataatcgccccattcacgacctaagccagattctttataaccaccgaatggtaagtctggttttctaccagcttcattaatttcaattgtaccagcttcgattgaacgagcaacatgtctcaatgtatctttatctttaccaataacatagccagcaagaccatatttagtatcattagcaatttcaatagcttcgtcaagattattataagtgattacagacatgacaggtccgaaaatttcttcttgtgcaatcgtcatgtgattatctacattaataaatatagttggacgcgcaaaatatcctttatctaatccttctggtttacctggaccaccgtagaataactctgctccttcattgatacctttatcaatgtaatcctgaacttgatcaaattgttttttactaataataggacctacttgagttccttcttctcttggttgacctactttaactttactaaatgcttctttaactgctgttaagtagtcttctttaatactttcaggaataagtacacgtgttcctgcagtacaaacttgacctgtattgttaactacttttttcgttgttgcattagcagcttcttcaacatcaacgtcatctaatacgatataaggtgatttcccacccaattcaagagacacttttttgaagtcttttgcagctttttccataatttttgaacctgtaggaccagaacctgtaaatgacatcattcttacttttggatgttcacttaaaggatttcctactccagatccatcaccattgactaagttaaacacacctttaggtacgcctactttatcaaaaatttctgctaaaataattgcagcaaatggtgtttcttcagatggttttaaaacaacagggctaccagcagcaaacgcagcagctaatttaagtgaagtttggtttgtagggaaattccaaggtgtaacaagtccagcaactccaattgcttctttaacaaccaaatcatcgccacgttgttcttcaaattggaagctatctaaagcatctcttgcagctgtaaaa

SEQ ID NO: 4449 - DNA, 1494 bp, Artificial Sequence
  Description of Artificial Sequence: synthetic nucleic acid sequence
tcaacagaactatgtctaaattctaaatatactttatctgcagcatctacagctttattaacatcttcttcgttacctttagcaattttacccattacttcttcagttgcagggttaataacatcaatagtttcaccgcttgcactatcaacccattcaccgtttatatattgtttagtgaaatttctcatcttattatattcactccttagaaaagatatatacatatactatcctatttttacaggtaataaacataacttgctcacaggtcgatttaaataaatgctattttctaaaatgcacttaatataatttgagatatcaaattatatttttcaaatttgattttgaaccaaaaagagcctgagacattaatgtcccagactctcttaacttataggtaagtcaatcactaaattaaaattgcgcttaaatcggtctttttgtactctattccaacatcctaaattcgattgattcataagattatttttcagacattacaagtttagggtttgttgtaaagaaacaacgtatttaacatgaattctgatacactcactatttcatatcactcaaatataaatgttgttaatttaaaaattgtgttaagaattataccgtttccgtccaaatatcagcaccaagtgctttaagatgttcaacgatgttagtatatcctctataaatatgttttacattaaatattgtcgtcacaccttcagctattaaacctgcagtaattaagcaagcgcctgcgcgtaaatcacttgcatatacttcagctccattaagtgtcgaaggtttaatcacagctgttccctcatccgatttaatattagcacccatacgctgtaattcttctacatgtttaaaacgcgctggataaatagtatcagtcacaaacgaaggtccttctgtcatgaataataatggtgtaataggttgttgtaaatcagttgcaaaacctggataaacaagcgtttttatatctacatttttatacggtgtttgtttacgaatgattattttttcatcttcaatttcaatatctacacctaactcttgcaacttaacagttaaagcttcaacatgtttaggaacaatattatgtaaaatgacctcctcacccattgctgcggccatacacatataagaaccagcttcaattctgtccggaataatttgatactctgaaccttttagttcctcaacaccattgatttttattgatgttgtacctgctcctctaatatcagcacccatactcattaaaaagtttgcaacatctacgacttcaggttctttggctgcattatcaataacagtttgacctttggcatggactgccgcaagcataatattaatcgtcgctccaacacttaccatatctaaaaatatatgagcgcctctaagttcttttgctactaatttcatggatgtattgctagattcgtcaatttctgctcctaatgctttgaatcccttaat

SEQ ID NO: 4450 - DNA, 3699 bp, Artificial Sequence
  Description of Artificial Sequence: synthetic nucleic acid sequence
atatcccaaaacacttagtaacggtatttacaggtcgttctggttcagggaaatcatctttagtgtttaatactgttgctgcggagtctgaacagctactaaatgaaagttattctagttatattcaatttcatttaaatcaacaacccagaccgaaagtaaagaaaattaaaaatcttcctgtagcaatgacgattaatcagaaaagattcaatgggaattctcgctccacggtaggaacagtttcagatatatatgcttctgttagattactgtggtctagaataggcgaaccgtttgttggttattcagatgcatattccttcaatagtcctaagggcatgtgtaaaacttgtgagggattaggatatattgaagacattaacttagatgaattgctagattgggataagtctttaaatgaaggtgcaatagactttccttcttttggaccagacaaagagcgtggtaaagcctatcgagatagtggtttatttgataataataaaaaattgaaagattatacagaagatgaattagaattgtttttatatcaagagccaatgacattaaaaaatcctcctaaagaatggagaaagtcagctaaatatgtaggactaatacctagattcagtagaatatttttaggtgataaagaatttaataagaaacgctacgccaaacatcttaaaaatgtagtaaataataaaatctgttcaacatgtaaaggtcaacgtctaaactcgaaaatattaagttctaaaattatgagtaaaaatatttctgatttcacacaaatgacaattaaggaaaatttagagtttcttaataaattagaggatccaacagccaaatatattattgatcctctcaaaaagcagttagaagcactagaatatattggattaagttatttaacgcttaaccgtgtcacaacgacattatcaggcggtgaagcgcaacggcttaaattaatacgtcatttaaatagttctttatcggatttagtttacattatagatgaaccaagtgttggcttgcatccggaagatatagctaaaatcaatgaaattttaaaatcattaaaagaaaaaggtaatactgtgttaattgttgaacatgatcccgatgtcattaaagaaggagactatatcatagatatggggccaggttcaggaaaaaacggcggtgaaatcacatttgaaggaacatataatgaattactatcttcaaatacttcgacaggtaacgcattacgtaacaaacataatttaaaagagaatattcgtgaagctaaccacttttataatatcggtcctgtgacacaaaacaatttaaataacgtaaaaacgtctatacctaaacacgtattaacagtcttaacaggtgttgctggttcaggtaagagtacccttgttaaagcaggttttgaaaataatgaccataccatctttattgatcaaaaagcagttcaaggatctaatagatctaatctattaacgtatttaggtgtttttgatagtgtaagaagctatttcagtaaagaaacaggcttaaataaagctatgtttagttataattcaaaaggtgcctgtccaaattgtggtggaaagggctatattaaaacggaacttgcttttatgggtgatttttcacagacatgtgaagtttgtcatggcaaacgttataaacaagaagtattagatgctaccatagacgggtattcaattgccgatgttctcaatttgacggttgacgaaggtatcattttctttgataaaaagaatgatattaagtcaaaattacaatctgtaagtaagacaggtttgaattatatgtcactaggacaacctttgtccactttgtctggtggagagattcaacgcgtgaaactaggacaacatttagatgaagagataaagaatagtatttttatttttgacgaaccaactacaggcctacatgaatcggatatccctatattgatggagtgttttgatgatttaattgatcaaaacaatactgttattttgattgaacataatttatcgattatgtgtgaagcagattggatcatcgatgtcggcccaggcccagggttggatggcggaaaggtccaatttagtggaacacctaaaaacttcattgatagttcagaaacattgacatctaaacacttgaaacgctatatcaaacagtaaaaatagaagagttggatgagtttatatttattatattcaatcaactcttttctcatcctaggttctttcaatataaaaatgttgaacatcataacaagaaattttatacatctaaagatttagctttatctgttatttgaggaaaatggaaaacacctatcatatatcagttattacaaacagaagttttacgacttagtgtttttgaaaaattgttgcctgagattaattaaagaatgcttattagacagcttagagaattagagcatgatgaaattattgaaagaattgtcaattcagtagttccacaaaagttgagtataagtaaacgaacataggaaaacactagataaagtagtttatgcaatttgtgattggggggatgaatttctggaaaaaatttctaaatataaaaatgttaaaatttaaatatatatgtaaaagacgcctcaactttgaatgagttattcaaagtaaggcgtctttatctatatgttattgtggttttaaaatgactttaacattattatcttttttctgatcaaagatatcataacttcttttacatcttttaaaggcatagtatgagtgataatttctgttggatcaaagactttattttaatcatgtcataaagttttggcatcatatgaataactggcgcttgtccacttttcacttgaacatttctattaaatattaagtctaattgggagttatcagctgcagttccatagacacctatcaattggattgttccatattttctcactgattctgttgccgtaacaattgggctgatatttcctctctgtattgaatttgagctaacttctaagtcatcttgaactacttgttcatctattccgacacaatctataacaacatctgcaccaccgcgtgttgtttcatgtaatagttttcctacgtcatcttcttttaaaaaattataaacctcagcaccgttatatttctcggtatgagctaatctatgctcaacatgatcaatggcaatgacacgtctggcactttttaattttgcaaacctttgtgctttttagtaatttaaactgctcaaatatctataactaaacgaagaaataaaaataccaaactacatcctattgtatagattttttgcattatatatataaaattagaaaagtaaaatttaatgattgttggttatgcgagagtatcatctataaaacaaaatttagaaagacagctagctaatttgtaaacatttggcttagaaaaaatatttacagaaaaagatcgggaaagtcagtagaaaacagacctatatttctataagcacttaattttgtgagaaagggagatagatttgttgtagagtctattgaccgtttgggacggaattatgatgaagtgattcataccgttaattatttaaaagacaaagaggttcaattgatgattaccagcttgcctaggatggatgaagtcattggtaagccattactgtatatagaaa

SEQ ID NO: 4451 - DNA, 1810 bp, Artificial Sequence
  Description of Artificial Sequence: synthetic nucleic acid sequence
tcttcttcattaataaaatgattaatcgcacgttgcaatgtagaacgtaacatcgcgttaacgacttgagaactttcttcactatcaatgatttcattacgctcattataaataatttcacgttgcttacgtaaaacttcatcgtattctagaatacgtttacgcgcgtcaaagttattaccttctactcgtttttgagctgattctacagctcgagataccattttcgactcgattggcgttgaatcatccattcctaaacggttcatcattttctgtaagcgttctgaaccaaaacgtaccattaattcatcttgtaaagataggtaaaaacgactatctcctctatcaccttggcgtcctgaacgtccacgtaattgatcatcaatacgtcttgattcatgacgctcagtaccaataacagcaagtccacctaactcttcaacaccatcaccaagtttaatatctgttccacgtccagccatatttgtggcaattgtaactgcacctttttgccccgcgtttgaaacgatttcagcttcgcgttcatgatttttagcgtttaatacgtcatgtctgacaccacgtttttttagtaaatttgaaatatattcagaagtctcaacagcaacagtacctagtaagacgggttgtccttttttatgtttttctacaacatcttcaactaccgcatcaaactttcctttttgactaatataaattaagtctgaattatctttacgttgaacaggtttgtttgttggaatttgggtaactgtcatattatagatattacgaaattcttcctcttcggttttcgctgtaccagtcatccccgctaacttattatacattctgaaatagttttggaaagtaatggatgccatcgttttagactcattttgaattgctacaccttctttagcctcaattgcttggtgtaaaccttcagaaaaacgacgtccaggcattgtacgtccagtaaattggtcaacaattaatacttcaccgtcaacgaccatgtaatcaacatcgcgttgcaaagtaacatgagctcttaaagctgtattaatatgactaatcacttccacattttgaacatcataaagattatctactttgaacatacgttcagctttatctgcaccttgttctgtaagatgtacagctttggttttttcatcataattataatcatcttccgctttaagcatttttgcaaaaacatttgcttgagtatataaagaagtagatttttccgcttcaccagaaataattaaaggtgttcttgcttcgtcgatcaatatggaatcgacctcatcaataattgcaaaatgtagaggacgcattactctctcttcagcatagttcaccatattatctctaagataatcaaacccaagttcattattcgtactataagtgatatcttgtgcgtaagcctcacgtttttcttcagttgacttactatttaagttcaaacctacagttaagccaagatagttatatagttcagccatttcttcactttgtgaacttgatagatattcattgactgtaataacatgtacacctctaccagctaaagcattcaaatacgtcggcatggttgcagtcaatgttttcccttcacctgttctcatttctgcaatatcacctttatgtatagcaataccacccattacttgtactttataaggaatcatattaaatactctctttgacccctcacgtacaagtgcataagcttcaggtaaaattttatctaaataatcattttgtttttttacatcttcaatttctgctaact

SEQ ID NO: 4452 - DNA, 1209 bp, Artificial Sequence
  Description of Artificial Sequence: synthetic nucleic acid sequence
gtaattaaatcaatgcctgcatataaatcatcatgtctttcttcagctctaagagtgacatcttttaaaggaattgtaacttcaattttagttgtagaattagaataagttttaactctaacatgtgctacagcatttggcacattgttaaagtatctttctaatttacctactttctcctcaatatagttgcgaattgcatctgtgatagtgaggttatctccatgaatttcaaatctaatcatagtaatctctccttaaacctctatattgatacttcttacctatattttaccatgtttatgttatcgtgcaaacgcaaacactttgaattttctgacttttttatcgtacaatttacaccctgcgtgatgaatagttaaccctgttgtataaatatcatctatgagtagtattactttcccttcgatatttatctcttcatcttttatataaaatggattaggggcttttgaacgttcaatctttcctaactttgactgcttaggacgtatatgtgtacctaatacatcttgatatgagatgcccattttatctaagacagtggtcacaggattaaatgtacgttcaatgtcgcgttcaattggagaaggaatgggaactatataatcatattgcgtttgaggtaaaactaattttctcgccaatacttctgccaaatagaagtctcgcttaatcttatactggtgtatgatttctttcatcataccatcataactataatcacaaaacaattgttccattaaataaaatgttttacttaagaattgacagtcatgacattcgccatcagtagaaattttgttgttaaggcacttaggacacctaccatctttatgaattttggagttaagccataatgtttcacatcgttcacaaaatatctgaggtggtttaaataagttataaatatgaatggtctcatgaataggttgattgcactggatacatttacgcatcaatccatccccttttaattgctaaacgattcattgaaataatgtttcttttagctaaaatcatcgataatgtaacaccttcatgaagaaataaaactaagccacttggagactgctgtttacgtcctacgcgaccagcaatttgaattaaagcctcttgttgaaaacttccagcatcaactacaacgacatctaagtgtgtcattgtaaatcctctttctaaaatagt

SEQ ID NO: 4453 - DNA, 1396 bp, Artificial Sequence
  Description of Artificial Sequence: synthetic nucleic acid sequence
acatcctctgacccctctagagatagagttttccccttcgggggacagagtgacaggtggtgcatggttgtcgtcagctcgtgtcgtgagatgttgggttaagtcccgcaacgagcgcaacccttaagcttagttgccatcattaagttgggcactctaagttgactgccggtgacaaaccggaggaaggtggggatgacgtcaaatcatcatgccccttatgatttgggctacacacgtgctacaatggacaatacaaagggtagcgaaaccgcgaggtcaagcaaatcccataaagttgttctcagttcggattgtagtctgcaactcgactatatgaagctggaatcgctagtaatcgtagatcagcatgctacggtgaatacgttcccgggtcttgtacacaccgcccgtcacaccacgagagtttgtaacacccgaagccggtggagtaaccatttggagctagccgtcgaaggtgggacaaatgattggggtgaagtcgtaacaaggtagccgtatcggaaggtgcggctggatcacctcctttctaaggatatattcggaacatcttctacgaagatgagggatgacgtgacatattgtattcagttttgaatgtttattagcattcaagttttaatgggcctatagctcagctggttagagcgcacgcctgataagcgtgaggtcggtggttcgagtccacttaggcccaccattcaataatttaaaaccttagggggcttagctcagctgggagagcgcctgctttgcacgcaggaggtcagcggttcgatcccgctagtctccaccattatattttgtacattgaaaactggttaaaagcactaagaaaaaaataataagtatagattaagtttaatttaggtagaaaatgtgttgcttgattatttgaaagtaatcaattaacacaattaaagcatgtgtgtttatctatacgcacgtaactcaatgatagatgttgatgatgtctaatcgtttgagttacattaattatagttatcaaagcatccaaaccaataaaaatggtgtgggtgcttttttcatgttataaaacataaaaaaggatggcgctgggttacgccatccaggagtattatgttcatgaatataaaagactttgtagttactaaataactacaatttaatattatcagattgctatttatctgacaacattaaaggttttgatttttaaaatttccaacaaaattgagaaaattattactttgatttaaaggcatctgttcggtttcattcgccattggtgatatgtaataatgaattgtaaaacgacatcgaggaggtttcttatggacggtttaattacatttatcattatcacattattgattattatagtacctgggcc

SEQ ID NO: 4454 - DNA, 3262 bp, Artificial Sequence
  Description of Artificial Sequence: synthetic nucleic acid sequence
acattgataagttccataccgaaacgagtgtcaggtttatctgaaccaaaacggtccatagcctctgcatatgtcatacgtgggaatgggccactaacgtctattccttttacatcttttacaaccttacgtaacatatcttcacccatggctatgatatcttcttgatcgacaaaactcatttcaatatcaacttgagtgaattctggttgacgatctgcacgtaagtcttcatcacggaaacatttaacaatttgataatatttatcaaaaccacttatcattaatagttgtttaaataattgtggtgattgtggcaacgcgtaaaattcaccctcgtgtacacgggaaggtactagataatctcgcgcaccctcaggtgttgattttgttaatactggtgtttcaatatcgaagaagccattattatctaagtattgacggatagaacgcgtagtttgatgtctcattttaaaagtttgcgctaattcttgtctacgtaaatctaaatatctatattttaatcgaatattttcatcaacgtttacattttcttcattaattgaaaatggaggtgtttctgatttgttaataatctcaatatttgaaacttgaacctcaacttgacctgttttgatttttgggttaatagtttcagcatcacgttttgttactacaccttcaacttcgactacatattctgagcgtactgtttcagcaacttgcaatgcttcttcggaaaagtcaggattaaaaactatttggacaatacctccacgatctcttaaatcaacaaaaattaatccacctaaatctcgtctgttatgaacccaaccttttaatgttactttttcgtttaaaaattcttctgtgactaaaccacaatacgttgttcttttattcatttttagacttcctttctacttttaaaataattaaccaattcgtctaattgtacattttctgattcgcctgaaatcatgtttttcacaccaatttcattattttcaagctcttgatctccaattactactgtatatttagcattaagacggtcagcttgtttcatttgtcctttaatttttctgtttagataatccttatctacttttattccatttcttcttaaatcattgattaacttaacagcataacgatcggcatcttctcccattgtcacaacaaataaatcaaaatcttcacttacatctaatgaaataccttcttcatcaagtgccatcaataatctttcaatacttagtgcaaacccaatacctgtttcatctggaccatctaataattgtaacaacccattatatcgaccaccaccacataatgtagtgatagctccatcatactctggattatcaatcattaattcaaaggcagtatgagtataataatctaacccacgaactaagttaggatcttcaacataagatatgttcaaattatcaagatgtaatttaacttgttcataataagatttagaatcattattgagataatctgtgatacggggtgcattttttactgcttctttatctctatcgattttacaatctaaaattctcataggattagtgtgtaatcttgattgacaatctgaacaaaatgtatcaatcacaggttcaaaatgttttactaatgcttcgttatattctttacgtgattcactatcaccaatactattgataactaactttaaatgctttaatccgaaagactcatatatatgcataaccatagcgagtatttcagcatcaatactaggattttccgctcctattgcttcgacaccaaattggttaaattggcgatatcttcctttttgtttacgttcgtatctaaacataggaccattgtagtaaagtttgataggttgattgggttcaccttgcattttgtgttcaatatatgaacgtacaacggctgcagttccttcaggacgtaatgttaaactacgatcccctttatctttaaatgtatacatttccttttgaacaacgtcagtagaatcccccacgcctcttgcaaaaagttcagtactttcaaaaattggcgttcttatttctttataattatacaattccattaatgtgtgtaatcgattttcaatgtaacgccatttagcagaatcttgcggcaagatatcttgggtacctcttggcatcttaatcataaaactctctcctttattattaaaaaagattaaaatagtcttttattttcatatgggttataaaaaattaaaaagtcccttgtatagtgcaaaactatacaagggacgattcaccgtgttgccaccctatttgattatactgataaaagcataatccactcaaaacgcttaacgtgcgctatccgacttttaattaaaagtacctcttcttgcgttcaaatttttaaattactaagtacaatcttacagccaaggattgtatttctacgcattaaatgctacctacttcatttaaaatttcaagaatcatatcggttttatttataaagttcaacaataatgataacgatttttagaataatttgcaaggtctaggacgagaaatattgttttaaaccatcaacaatagcttgttcaaccacttgtctatgtaattgatcattaatcattgattcatcagtaggattacttatatagcctaactctaacagtactgctggtatatctgtctgtctcaacacttgataattttgttgtctagaacctcgatttgtcaataatgccttcttttgaattgcagaatttaaagtttgtgcaagtgattcttgcttgtctttaaaccaataaacagtcactccattggcatttgaagaatcaagcgcatcattatgtatactaataaatgcgtcaccctttatatttctatcatctagggacacatatttatcattggaacgagtcatttttacatgagcaccttccttatttaataacttttttaattctttagcagttttaagtgtgtaatttttttcgagacttttagatggtgtactacttgaggcgccctgatcacttccaccatgaccagggtcaagtacaattgtttttccttttagagggtttgacgaaagtgattgatcagctggaatgttcaaatttgtgtgccaaccagcaacccagcctttctcagtgccagcgtgattttgaacttcaatccatttcccttttcgatctattttcttaaaacttttacctttttctattttataaataacaggataggcggcattaggtcct

SEQ ID NO: 4455 - DNA, 3247 bp, Artificial Sequence
  Description of Artificial Sequence: synthetic nucleic acid sequence
gtatatcacgaacagggagtgtaagagcatgacgcgacagagaatcgccattgatatggatgaagtgcttgctgatacattgggtgctgttgttaaagcggtcaatgaacgagcggatttaaatatcaaaatggaatcattaaacggtaaaaaattaaaacatatgatacccgagcatgaggggttagtcatggatattttaaaagaacctggattctttagaaatttagatgtaatgccgcatgctcaagaagttgtaaaacaactcaatgagcattacgacatatacatagccacagcagcgatggatgttccaacctcttttcatgacaaatatgaatggttattagaatactttccttttttagatccgcaacattttgtattttgtggtagaaagaatattattcttgcagattatcttattgatgataatccaaagcaattggaaatttttgaagggaaatcaattatgtttactgcttctcataatgttaatgaacatagatttgaacgcgtaagtggttggagagatgtaaagaattattttaattcaattgaaaaatagagaagataaaagtcataggtcactttatttgatggcctatgacttttttattaaacatttttaaagttatctttcataatcatatgctgtttcgataatgcctttaagttcactaattagcggttcttttggattagcagttgtacattgatcttcaaatgctaattcagccattctgtctatagtagagtgaagaagctcttcagttacgccttgtgattttaaattcatatcaataccaactgaacatcctaaatcatacaccgcattagctagagcatccactaattcttcagttgtattacctttgagtcctaaaaattttgcaatgtcagcatagtcagtatctgctctaaagaaatcatatttaggaaacagtgcatgtttttgtggatctttggcattatagcgaatgacatgtggtaataaaatagcatttgttctgccgtggggaataccatattcaccaccaattttatgtgcgatagaatgagaaattcctaaaaaagcattggcaaatgccataccggccattgttgaagcattatgcattttttctcgtgagtgtttgtcattttcttgaactgatgattttagataatcaaaagttaactttattgcttgtaagcttaagcctcttgtataatctgaagccatgacagagacgtaagattcaatggcatgtgtcaaaacatccattcctgtatctgcggcaacatctttaggtacacttaatacgaattgtggatcgacgatagcaatatcgggagttaacgcataatctgctagtggatacttaacgtgtgtctcgctatcagtaattactgcaaaaggtgtcacttcagaaccagttcctgatgtcgttggtatacatataaattttgcgtttttaggtttggtaattttataagtacgtttacgaatatctaagaacttttgttttgccccaaaaaatgaagtttctggatgctcaaagaacatccatattgctttggctgcatccattgccgaaccgccaccgagtgcaataatagtattaggttggaaatttataaacatttctaaccccttatagactgtatgagttgatggattaggttcaacttcgttaaacactttgatttgtggttggttttctcggcgtctcagcacttgttcaactatatcagtataaccaatattaaccattcctggatcacaaactatcattacacgttcaacattatccatctctgtcaaatacataactgaattttcttcaaaataaactttaggtgggagtttaaaccattgcatattattacgacgttttgctattgttttaatatttaataagtctactgcgcttacattatgagaaatagaatttctaccatatgaaccacaacctaacgtgagtgaaggaatgagttcattatacatatttccaattcctccgacagcagaaggtgtatttaccaatacacggcaagctttcatttttagaccgaatttttgttgtaattgactatcctcggtgtgaattacagcagtgtgacctaaaccaccaaattttaatatgtcttcacaaatttgtagtgcatgtcctgttgattttgcagttaccattgcgagtacaggtgataatttttcacgtgataaaggataatcttttccaattccatcaatttctgcgactaataattttgttttttctggaacactaattcctgacaatttcgctatatctacagcagatttaccaactatatcaggtttaactgcagttttatcttcattcatgatggcatcttctaattgttgtagttcatttttattaacaaaatatgtttggtgtaatttgaattctttaacgacgtcagtgtatacttctttatcaacaaccatgacttgttcagaagcacaaatcataccattatcaaaagttttagaaccaatgatatcattaacagcacgtttgatatgagcagttttttcaatataagtaggaacattacctggaccgactcctaatgcaggtttacctgtcgaatatgcggactttaccattccagagcctccagtcgctagaactaaagcaatatctttatgattcattaattgtttagttgcctcaattgatggcacttctatccattgaatacaatctttaggagcacctgcttttgttgcagcttctaaaatgactttagcagcatattttgatgattgttgtgcacttggatgaaatgcgaaaataattggattacctgttttaatagcaatcattgctttgaaaatagttgtagatgtagggttggtcgttggtgtcactccacaaatcacgcctataggttcagctacatacgttaatcctttttgtttatcttcacctatgatacctactgttttattgtctttgattgaattccatatgtactctgaggcatataaatttttgatagctttgtcttcataaatacctctacctgtttcgtcgtaagctagtttagctaaatgcatatgctgatcaacagcagccatgctcatctgatgtacaatgtcattaatctcatgttgtgattttttagatagttcttttagagcttcttgtcctttttctgctaatgaatcaatcatttgtgtgacttcatctttgtttgattcatatgtattttttttagttacagataacatata

SEQ ID NO: 4456 - DNA, 3592 bp, Artificial Sequence
  Description of Artificial Sequence: synthetic nucleic acid sequence
taatattgcaattgcgttgcagcataatcagcgtagttgttcattgaacgtgcaaatgaatcataatcatgtgtatggacgatttcaacattgataaaacgttgatttccatatggacctgcaccccaagataagtaatctgtcggagctgtttctataattctattgccatcaacaaatgcgtgtacgaatgcatttgtgtaattacgtttcatgaaagcaatctcgccatcgattgttgagttatcatttgcagtatcatgaacaacgataccttcaggacgtcccacaccgtttctatagccatatttagggaaatatgacgtataatcttcttcaattcttggtgctttcatattctttttacgaatatagttatttattgaagaattaacctttggtgtatatttcggtagtgatgttttttgactagatacagaataaactgttctcggttgagcagttgcactaaatggggtgaattgctttgtatctatagtcgcttgattagatgccgtttctttttttacagtattagttgttacacgttgagctggttctttatatttatatgaagtagtttgtttagatgtagcattcacattgtttaatgagataggctctaaatggtctgttgagctatcatcgtcttcatcatcgtaatcaaaattataaccagatgcgtttgtatttgatactttaggtgtaacagtttcattttgttcagaagttacttgctgatttttttgttggctttcattatcattagaagcagtttgagtttcaattgcttgattttcggaaggttgacttgcagtcatcttcttgtcttgttgttcattatttgcgttagctcctaaatctttctcattttcttttgctacagattgtgtctcctgtaattgatttgtatcagtggatgttttatcttcttgtgtcaaatcatttgtttcttcttgttgattttttgtaacagaattcgtttgattttgattcgcatcatctgttgataaagattgttgcttttgatttgatgaaatttcattataagtactcatttcatctaatgatgcatcatatgtagtactttgtgtgtcttgtttaggttgaacttgggtagggtcttgatatgtttgtgtaccagatacatttgtagttgattgtgtaacttcgcttttagctttttctgcttgtttgagggcagtttgatcatctaatacatttttatgattagactgattctgtggttgttcagcagcatttgcttgatgtgcagtaaaagctgtgccaaataacgttaaagcaaccatagacggtaatttgtaattgaattttttcgccatttatttcttactcctcgcattaatatgatttgtttcaattataatctttaaggcttaacactgtatggcttttaacatatttgtaatgtaattttaacctgtgcctcaaatagaaatattgtttttttatgctgggaacattgtcaaatcactatttacgtttattataagcttgtaagctacataaagattattacaatttttaaaattgctaagtttgtatatagaatgtaaatcaatttataaaaacttattcatactaatatgatttatattttcttctaagaatactttaccaaaaggtgagtaacctagttttaagtaaaagtctcgagcttgtaattgagcattcatagtgagttcattgtattggtgtttttttgcaattgtttcaatagcatgtattaaatttttaccgtacccaagaccacgataccacttgatgattgctacacgttcaattttacaaatatgagtatttaaaggtctaattctagcagttgccataggaacaccatttatatatcccactatatggaatgagtaatcttcatattgatcaaattcattttcgagtggtacgccttgttcttcgacgaaaacacactttcttatttcaaagcaatcatctagcatcgtttggttttttgctatttgaaacacagtatcacctccattttcactggtttttccttaaaaaattattttaaccatattgaaaatgaaaatttataaaaaatggaataaagcaggttcattataaattcataattagttcatcaccaaaaaaagaatgagtcaggtacatgtcgtgaatatcatttgtggggataagaactgaagtttctattggtaaagtaagttgagtcttattataatctttatacataaggaacttcgttaatttattttagtgatatttattaaattttacgaaagggccttattttttaaagtatttcaatgtgaaattacatataaacataaagtattttggcgagactcttgagggaacaggtcaagctgaagactacaggctgaagctgtcccctaagaaagcgagaaaacaatacgaagtattataaataaagaagccagtaaatgaatttataaaaaactcatttactggctattttgctaggaattatatctatattagcggacaaaaagttaacaacaatgttcaacatttcagagattaccaactatatattcaagatagcacactaactcgtcaattcaagcaaatggttcatccttccaaaatagaggtggttttacaagaaaatattgaaaaaagcatttggtataaattattagtgaatttaggtataaataccatcactgctattggacaacaaccagctaaaattttaaaatctcctcatattgagtcgttgtgtcgtcgtatattagttgatggtcttaaagttgctagagctgaacaaattgactttgaagatcatatcgttgatgatattttaaatatttataaaggttatccagacgaaatgggaacaagtatgtattacgatgtcattaacaagcatcctcttgaagtcgaggccatacagggttatatatataaatgtgcaaaaaaacatcatttagagacaccctatctagatatggcttatacatttttatacgcttatcaccttgaatacacacaaccagattgatatcttaggtaaattagtcattataaaatatgaccttttctcaaaaaaaatatatttattctacaaataaacaaccccatatttgaaatgcatttactttataaattctaatcaccataaacatataacaaagcctagaacacaaattcatgtcctaggctttgttaaccatatagataatttatacttgaattgaagatgttgtttatatcaaactttttcaatagtagtacaagaaaccccaacatagagagtttcattcagaaattctctatgtcggggttcgttaccgagataagacaatatattcaatacatattttatcttatcctcatctatttagtatacaaatcattgtagtctataatgtttggagttaaggtacatctagctaacaattattcagcttctctgatttcatcggctatatctttatagtcaatgtcagcatcagtaaatgatttagcatctactgggaagtgttgttcaaatgtttcaaagttttgtatttcaacagtcacatcatccacttcaaagtctaaaatatgaccaccaaaatcacgatca

SEQ ID NO: 4457 - DNA, 2122 bp, Artificial Sequence
  Description of Artificial Sequence: synthetic nucleic acid sequence
aatgacggatttataggctatcttattgaaagcaattctcattttgatacaatattaaaatgtctaatttttaaacttcaatcactatcatttttttatataacttcaaatacttttaaattaactaaaattgactaaagaggagcacagatttatggattatagagtactactttattataaatatgtaactatagatgaccctgaaacttttgcagccgaacatttgaaattttgtaaggaacatcatttaaaaggaagaatactagtttcaacggaaggcattaatggaacattatctggaacaaaagaagatactgataaatatatagagcatatgcatgcagatagtcgttttgctgatttaacttttaaaattgatgaagctgaaagtcatgcgtttaaaaagatgcacgtgcgtccaagacgtgaaattgttgcacttgacttagaagaagatattaatccacgtgaaattaccggtaaatactattctcctaaagaatttaaagccgcactagaagatgaaaatactgttatattagatgctcgaaatgattatgaatacgatttaggacatttccgtggagctattcgtcctgatataacacgattccgtgacttacctgaatgggtgcgtaataataaagaacaactcgacggaaaaaatattgtcacatattgtacaggtggcattcgttgtgaaaaattttctggttggttagtaaaagaaggatttgaaaacgtaggtcagttgcatggtggtattgctacatacggtaaagaccctgaaactaaagggctatattgggatggtaagatgtatgtatttgatgaacgtattagtgtcgatgtgaatcaaattgataaaacagtcatcggcaaagagcattttgatggtactaaatactgtcttattctaaacctagtatatcagtattttttacaatcgttctaataattagatgaatttaatctaatttatatattgaacagataaataaattacattatagtaattactatcaaacaaaattgtcagaaaattctaataagggagtgtgcatcatgtacaatgagaaattaaaaaagggactatacgattatcgtgaagagcatgatgcgtgtggtattggattttatgccaatatggataataaaagatctcacgatattatagaaaaatctttagaaatgttaagacggttagatcatcgtggtggagtaggtgccgatggtattactggtgatggtgcaggaattatgacggagataccataccaattgttcgaacaattaacagaattcaaagttcccggcgaaggatattatgccgtgggattatttttttctaaagagaaagttagagattcaattcacgaagagatgtttaatcaatattttgaaagtgaaggttttaaagtcattggatatagagatgtgccagtagatactcgcgctattgctcaacatgttgcagatactatgccttatattcaacaagtatttgttgacatcacaggtgtaaaagaagttgaaaaacgattgtttttagcaagaaagcaaattgaaaaatatagtgaaacacaatccatagatttatattttacaagtctctctcatagaacgattgtttataaaggttggttacgttcggatcaaattaaaggcttatatttagacctacaaaatgaggcatatcaatcaaaattaggacttgtacactcccgctttagtactaatacatttccaagttggaaacgtgcacatcccaatcgcatgcttatgcacaatggtgaaattaataccattaagggtaacgtaaactggatgcgagcacgccaaaataaactagttgaaacattatttgaagatgagaaagataaggtgcattttattgttgatgaagatggtagtgactcatcaatagttgataatgcgttagagttcttatcattagcaatggagcctgaaaaagcagcgatgttattaattccagagccatggttatacaatgaatctaacgataaaaaagttcgctctttctatgaattttatagttatttaatggagccatgggatggaccaactatgatttccttttgcaatggagataagatag

SEQ ID NO: 4458 - DNA, 1086 bp, Artificial Sequence
  Description of Artificial Sequence: synthetic nucleic acid sequence
tgcttatcgagaaaagattgtaactagtgaactttcatatttaggttcagaagggaacctcttatgtcctgatgaatcagttttagaaagaattcaattaaaaaaaccagttttaaatgaagcgcaattatcatcaatcgatcattcgtattttaatgtaacgtatttatctacactttatacaggtgatttggaaagtagcttaaatgaactagggaaccgagcaatacaggctgtacatgaaggtgcgaaaattttggtgttagacgatacgtctttaactcacgaaaatagttatgcaatgccaattttattagcgttaagtcacgtgcatcaattattaattcgagaaggattaagaatggagaccagcctcattgcgcagtccggtgaaacacgagaagttcatcacgttgcatgtttacttggttatggtgcaaacgctgtagttccatatttagcgcaacgaacgattgaacaattaacgcgtcaaggtcaactttcaggaactgtcgctgaaaatgttgctacgtataccaatgtattgtcagaaggcgttattaaagtgatggctaaaatgggcatttctactgtacaaagttatcaaggagcacagatatttgaagcggtaggtttatcgaatagcgtcattgaaaaatattttacaggtacacagtcaaaattatctggtataagtattgaacaaatagacaaagagaataaagcgagacaaagtgatgattctgattatcttgaatccggaagtgtattccaatggagacagcaaggtcagcatcatgcatttaatcctcgtacgatttttttattgcagcatgcatgtagagaaaatgattacgagttatttaaaaaattctccaaaactgtaaatttaaaacgtacggatcatattagacatttattagaattcaagacacgccaatctattgatattagtcgtgttgaaccagcaagtgaaatcgtaaaacgttttaatacaggagcaatgagttacggctctatctcagcagaggcacatgagacgttggctcaagctatgaatcaaattggaggtaaaagtaatagtgg

SEQ ID NO: 4459 - DNA, 3542 bp, Artificial Sequence
  Description of Artificial Sequence: synthetic nucleic acid sequence
tgtttaggttaatcaatccaacaaaagaaattcgaattgcaggtggacgggaggtaaatctacgttcattacaaccactcgcattgaaagcggctaattcaatttttgtaggagattacttaattacaggcggtcaaccgaatgaggaagattatcgcatgattgaagatttagggtttgaaatcgacagttaaattataattaaaaatattttcaataaatgtaaatatagttttaaataaattgtcataatgcactaaccatgcgctgttttaatgatttttcaaaagaattaacaacaatttaatcaaattctattaaattttcgatggataatcctttaaaaatttttttgaaagcgtatactaggaattgagagatgagagacagtatgatccatgcttattaaaaattaagattaggggaatgagattacattatttcattttaaatcttattttttaatataaatataaaagatgttttggaggaatacttatgtctaaatttatttatcaatcaccaggaagatatgtacaagggaaaggtattgttagctctatcgctgaagaaacagaacgtcttggtagtcacgcgttgattattgcagatgaagtggtttggaatatcactgaagaaaaaataaaagaaagtttctcagcaaataacaacgttgattttgaatatgaagtatttaaaggagaatcttctgaagaagaaattcaacgtatagttaaacaatataaagaaaaaaacattgacgttgttattggtttaggcggaggtaaagcgttagatacaggtaaagctgtagcatttgaacttaaagcaagcgtcatcgattttgcgtctacagcatcaatggatgcaccaacagcagcagtatctgttatttataacgaagatggatcatttagtggttatgaattctaccctaaaaaccctgatacagttatcgtagattctgaaattgttgcacaagcacctgtacgtttatttgcatcaggtatgagtgatggtttagcaacattaatcgaagttgaatctacacttcgtagacaagggcaaaacatgttccatggcaaacctacattagcaagtttagcaatcgctcaaaaatgtgaagaggttatttttgaatatggttacagtgcttatacttctgtagaaaaacatatcgtgacaccacaagtagatgctgtgattgaagccaatacattactttcaggtttaggatttgaaaacggcggattagcaggtgcacacgcaattcataatggattcacagctttagaaggggatatccaccacttaactcatggtgaaaaagtggcatacggtattttagtacaattagtacttgaaaatgcgccaactgaaaaattcatgaaatacaaaacattcttcgataatatcaatatgccaacaacattagaaggtcttcacattgaaaacacaagttatgaagaattagttcaagtaggtgaacgtgcattaacaccaaatgatacgtttgctaacttaagtgataaaatcactgctgatgaaatcgcagacgcaattttaactgttaatgatttatctaaaagtcagttcaactaaaaggagtcgctttgaatgaaaaagttaattcaagataaaaacacaattttaaaagatatgcttgatggaattacagtttcaaacaacgatgttgaagttgtatctgacactattgttgttagaaagcataaaaaacaatcaggtgttgcactcgtttctgggggcggcagtggacatgaacctgcacacgcaggatttgtagcagaaggcatgctcgatgcagctgtatgtggagaaatcttcacttcacctacacctgataaaatattagatgccattaaagctgtggacaatggtgacggcgttctacttgttattaaaaactatgcaggagacgttatgaactttgaaatggctcaagaaatggctcaaatggaagatattaaagttgaaagtgttattgtcagagatgatattgctatttctgacccggaaaaacgccgtggtgtagcgggtacagtatttgtgcataaatatgctggatacctagctgaaaaaggtgttgcacttgatgaaatcaaatctaaagttgaggcacttttaccagatattaaaagtattggtatggcattaacgcctccaatggtgcccacaactggtaaaaacggtttcgatattgaagacaatcaaatggaaattggtatcggtattcacggtgaaaaaggtttacatcgtgaagacgtacaacctattaacgtgattgttgaacgtttactcgatcaattatacaaagaaattgagaaaaaacctttaatcgtaatggttaatggtatgggtggtacgccactatcagaattaaatatagttactaaatatctagatgaacaattcaatcagaatgatattggtgttaaacaatggttcgtaggtgactatatgacagcgttagacatgcaaggcttctctataactgtactccccttcagtgaagaattgagtgaagctttagctgcacctacagcaagtaaatatttctaattttaagattcaataagtaataaatatatattaaattttgaggtgacttagagaatgaatgtagcagatatcaaagcacgcttattagatttagaaaatacttttaaagaaaaagaaagtgaactgactgatttagacagagctatcggtgatggagatcatggtgtaaatatggtcagaggtttcgaacacttaaaagaaaaaatagatgatcaaagtatgcaagcgctatttaaatcaacaggtatgacattaatgtctaacgtaggtggtgcttctggaccattatacgggtttggttttatcaaaatggcgagtgcagtgaatgatgaaattgatcatgataatcttaaagaggtacttaaagcgtttgctgatggcattcaacaacgtggtaaagtcgaattaaatgaaaaaacgatgtatgatgttatcgaacgtgcgagagaagctgttgaaaaaaatgaaacagtagatctagataaactacaatcatttgctaatgaaaccaaagatatggtagctactaaaggccgtgcatcatattttaacgaagcttcaaaaggttatattgatcctggtgcacaaagtagtgtttatattcttaatgcaattataggaggagagtaagtcatgacatctatagtagtagtaagtcatagtcataaaatcgcagaaggtgttaaacaattaatcaatcaaatgactgacggtggtgttgaccttattgccgttggtggcttaagtgacgatgaaatcggtacatcatttgatcaaatcgtctctgtaattaatggacttgaaaatgatgcgctttgtttctatgacatcggttcagcaggtatgaatttagacacagctttagaaatgtacgaaggtgaccacaaaattgttaaaatggaagcgccaatcgttgaaggaagctttattgcaagtgtaggaattaaatcaaatatgagtat

SEQ ID NO: 4460 - DNA, 3008 bp, Artificial Sequence
  Description of Artificial Sequence: synthetic nucleic acid sequence
tagaaaggaggtgatccagccgcaccttccgatacggctaccttgttacgacttcaccccaatcatttgtcccaccttcgacggctagctccaaatggttactccaccggcttcgggtgttacaaactctcgtggtgtgacgggcggtgtgtacaagacccgggaacgtattcaccgtagcatgctgatctacgattactagcgattccagcttcatatagtcgagttgcagactacaatccgaactgagaacaactttatgggatttgcttgacctcgcggtttcgctgccctttgtattgtccattgtagcacgtgtgtagcccaaatcataaggggcatgatgatttgacgtcatccccaccttcctccggtttgtcaccggcagtcaacttagagtgcccaacttaatgatggcaactaagcttaagggttgcgctcgttgcgggacttaacccaacatctcacgacacgagctgacgacaaccatgcaccacctgtcattctgtcccccgaaggggaaacctctatctctagagggatcagaggatgtcaagatttggtaaggttcttcgcgttgcttcgaattaaaccacatgctccaccgcttgtgcgggtccccgtcaattcctttgagtttcaaccttgcggtcgtactccccaggcggagtgcttaatgcgttagctgcagcactaaggggcggaaaccccctaacacttagcactcatcgtttacggcgtggactaccagggtatctaatcctgtttgatccccacgctttcgcacatcagcgtcagttacagaccagaaagtcgccttcgccactggtgttcctccatatctctgcgcatttcaccgctacacatggaattccactttcctcttctgcactcaagttttccagtttccaatgaccctccacggttgagccgtgggctttcacatcagacttaaaaaaccgcctacgcgcgctttacgcccaataattccggataacgcttgccacctacgtattaccgcggctgctggcacgtagttagccgtggctttctgattaggtaccgtcaagacgtgcatagttacttacacatttgttcttccctaataacagagttttacgatccgaagaccttcatcactcacgcggcgttgctccgtcaagctttcgcccattgcggaagattccctactgctgcctcccgtaggagtctggaccgtgtctcagttccagtgtggccgatcaccctctcaggtcggctacgcatcgttgccttggtaagccgttaccttaccaactagctaatgcggcgcggatccatctataagtgacagcaaaaccgtctttcactattgaaccatgcggttcaatatattatccggtattagctccggtttcccgaagttatcccagtcttataggtaggttatccacgtgttactcacccgtccgccgctaacgtcagaggagcaagctcctcgtctgttcgctcgacttgcatgtattaggcacgccgccagcgttcatcctgagccaggatcaaactctccataaaaattatgatgtttgattagctcataaatactaaatagtttgtaacgtttcgttactgtttattggaattaacgttgacatattgtcattcagttttcaatgttcatatttaaaatggagcgggtgatgggaatcgaacccacaacatcagcttggaaggctgaggttttgccattaaactacacccgcatgtagatataaaaattcaatttggtgcggccgagaggacttgaacctccacgggattaactcccactaggccctcaacctagcgcgtctgccattccgccacgaccgctggcaaaacgcataattagaatttaattatcgagaacattaactattgtaaatgctttgttctgagagatcccctcataatttccccaaagcgtaaccatgtgtgaataaattttgagctagtagggttgcagccacgagtaagtcttcccttgttattgtgtagccagaatgccgcaaaacttccatgcctaagcgaactgttgagagtacgtttcgatttctgactgtgttagcctggaagtgcttgtccaaccttgtttctgagcatgaacgcccgcaagccaacatgttagttgaagcatcagggcgattagcagcatgatatcaaaacgctctgagctgctcgttcggctatggcgtaggcctagtccgtaggcaggacttttcaagtctcggaaggtttcttcaatctgcattcgcttcgaatagatattaacaagttgtttgggtgttcgaatttcaacaggtaagttagttgctagaacccatggctcctttgccgacgctgagtagattttaggtgacgggtggtgacaatgagtccgtgtcgagcgctgattttttcggcctttagagcgagatttatacaatagaatttggcatgagattggattgcttttagtcagcctcttatagcctaaagtctttgagtgactagatgacatatcatgtaagttgctgataggtttccagttttccgctcctaggtctgcatattgtacttttcctcttactcgacttaaccagtaccaacccagcttctcaacggatttataccatggcactttaaagccagcatcactgacaatgagcggtgtggtgttactcggtagaatgctcgcaaggtcggctagaaattggtcatgagctttctttgaacattgctctgaaagcgggaacgctttctcataaagagtaacagaacgaccgtgtagtgcgactgaagctcgcaataccataagtcgtttttgctcacgaatatcagaccagtcaacaagtacaatgggcatcgtattgcccgaacagataaagctagcatgccaacggtatacagcgagtcgctctttgtggaggtgacgattacctaacaatcggtcgattcgtttgatgttatgttttgttctcgctttggttggcaggttacggccaagttcg

SEQ ID NO: 4461 - DNA, 2047 bp, Artificial Sequence
  Description of Artificial Sequence: synthetic nucleic acid sequence
tgggagaagaagcgcaagtgatttggatgtccacttttcactctatgtgtgtaagaattctgagaagagatgctgatcgtattggcattgaaagaaatttcactatcattgatcctaccgatcaaaaatcagtgattaaagatgtattgaaaagtgaaaatatagacagtaagcgatttgagccacgtatgtttattggtgcaattagcaatttgaaaaatgaattaaaaacacctgaggatgctcaaaaagaggcgaatgattttcactctcaaatggttgcaacggtttacaaaggttatcaaagacagttatcacgtaatgaagcactcgactttgatgatttaattatgacaactattaatttatttgaacgtgtacccgaaactctagaatactatcaaaataaatttcaatatatacatgtagatgagtatcaagataccaataaagcacaatataccttagtaaaactattagcaaacaaatttaaaaatttatgtgttgttggtgattctgaccaatctatttatggttggagaggagctgatatacaaaatattttatcttttgaagaggactatcctgaggcaaagacaattttcctcgaacagaactatcgttcaactaagaatattttaaatgctgcaaatgaagttataaaacataattctgaacgtaaacctaaaggtctatggactgcaaattctggaggagacaaaattcagtattatgaagctatgactgaaagagatgaagcagaatacgttgttaaagaaataatgaagcatcaacgcagtggtaaaaaatatagtgaaatggctatattatatagaacaaatgcccaatcacgtgtacttgaggaaacatttatgaaatcaaatattccttatacaatggttgggggtcaaaagttctatgaccgtaaagaaattaaagatttacttagttatttaagagttattgctaatagcaatgatgatattagtttgcaacgtattattaacgtgcctaaacgtggtattggaccttcatctgttgaaaaaatccaaacctatgcacttcaaaataatataagtatgtttgacgcattggctgaggtagattttataggtctctctaaaaaggtaactcaagaatgtatcagtttttatgaaatgattcaaaatttaatcaaagaacaagaatttctcgaaattagtgaaatcgtagatgaagtactacaaaaatcaggctatagagacatgcttgatcgagaacaaagtattgaatcacgaagtcgattagaaaacttagatgaatttatgtctgtacctaaagattatgaggaaaatactcctttagaggaacaatcacttattaattttctaacagatttatcattagttgctgatattgacgaagcagatacacagaatggtgtaacattgatgacaatgcattcagcaaaaggtcttgaatttcctatagtttttattatgggaatggaggagtcgttgttcccacatatcagagcaataaaaagtgaagatgatcatgaaatggaagaggaacgtcgtatttgttatgtagcaattacacgagcagaagagttgctttatatcacaaatgcaacgaccagaatgttgtttggtcgttctcaatccaatatgccatctcgatttttaaaagaaatcccagaagacctacttgatagtcataccggtcaaaaaagacaaactatatctcccaaatctcaacctaaaagaggttttagtaagcgtactacatcaactaaaaaacaagtttcatcatctgattggaaagtaggagataaagttatgcataaagcatggggtgaagggatggttagtaacgtgaatgaaaaaaatggatctgtagagttggatattatatttaaatcagaaggtccaaaacgattattagctcagttcgcaccaataacaaagaaggaggactcataggggatgcaagatgttaaaaagcgtgtggaaaaattacatgacttattgaatcaatatagttatgaatattatgtacaagataa

SEQ ID NO: 4462 - DNA, 4534 bp, Artificial Sequence; identical to SEQ ID NO: 4274
  Description of Artificial Sequence: synthetic nucleic acid sequence

SEQ ID NO: 4463 - DNA, 1085 bp, Artificial Sequence
  Description of Artificial Sequence: synthetic nucleic acid sequence
agtgcccaacttaatgatggcaactaagcttaagggttgcgctcgttgcgggacttaacccaacatctcacgacacgagctgacgacaaccatgcaccacctgtcactctgtcccccgaaggggaaaactctatctctagaggggtcagaggatgtcaagatttggtaaggttcttcgcgttgcttcgaattaaaccacatgctccaccgcttgtgcgggtccccgtcaattcctttgagtttcaaccttgcggtcgtactccccaggcggagtgcttaatgcgttagctgcagcactaaggggcggaaaccccctaacacttagcactcatcgtttacggcgtggactaccagggtatctaatcctgtttgatccccacgctttcgcacatcagcgtcagttacagaccagaaagtcgccttcgccactggtgttcctccatatctctgcgcatttcaccgctacacatggaattccactttcctcttctgcactcaagttttccagtttccaatgaccctccacggttgagccgtgggctttcacatcagacttaaaaaaccgcctacgcgcgctttacgcccaataattccggataacgcttgccacctacgtattaccgcggctgctggcacgtagttagccgtggctttctgattaggtaccgtcaagacgtgcatagttacttacacatttgttcttccctaataacagagttttacgatccgaagaccttcatcactcacgcggcgttgctccgtcaggctttcgcccattgcggaagattccctactgctgcctcccgtaggagtctggaccgtgtctcagttccagtgtggccgatcaccctctcaggtcggctacgcatcgttgccttggtaagccgttaccttaccaactagctaatgcggcgcggatccatctataagtgacagcaaaaccgtctttcactattgaaccatgcggttcaatatattatccggtattagctccggtttcccgaagttatcccagtcttataggtaggttatccacgtgttactcacccgtccgccgctaacgtcagaggagcaagctcctcgtc

SEQ ID NO: 4464 - DNA, 2355 bp, Artificial Sequence
  Description of Artificial Sequence: synthetic nucleic acid sequence
ttaattaattcaacaaataacattttataatgtaatgattttaatttcaatagtcaaaattacactttattaactaaattttaaagttcttaactttttcttttcaattaattaatctgcttttgacgacttttatatagtatcaagatataaacgtaacgtcaatatttattatcgattttttaagttaaaatttacttaatgagtgaatatatatctacatatagtacattatatttatatagtgtaaatactttcgttttgtacatctgcaaaacgaagtcatatgtaaaaagaaagaggctgtacaaattattacagcccctactacttatatacgattatttatatgaaattgctaaacagtcatactatttcatcattactttatctcaataaaacttcataagagtatcaataatgactaaatttttattttgcttctattctacgaccttactttcttcaatttccttcttctttacattctttacatactccatatatttccatccgatgatgagtaacatcaaaatctgttacatgttgagctaattgctctacttcatctaattgtggataatggaagtcaacgattttaccacatttttcacatataatatggtagtgattatgtgtattaaaatcaaacctactagatgaatcaccatatgttaactctttgactataccaatatctttaaaaactcttagattattatagatagtagcaacacttatattaggaaatttaggtgaaagtgcttgatatatttcatctgctgttggatgtgaatgtgaagatataagataacgcataattgcttgtctttggggtgtaatgcgaacgcccgcttttcttaatgaagcaattgactcttcaagttcatgatcaatagattcaagttccgcactcacttatttcaccatctttctaaataataattattattacttaatattaatataactgttgctataaataaatgtcaataaatacttgctgttttcaattagtaaccataatctaagtctactttattctcaattacatcataattattgagaaaatgctcaagattctttttgaaaatgtccgtagcttctctattattattagaatcattacctgtaatatgagcagttatggtcacattatctaaatcatataaaggattgtccttactaagtggttctttttcaaaaacatctaaataagcatgtctgattaatcgatctttgagtacattgatgagcacttcctcatcaacaattgttcctcttcctacatttataaataaggcattattgtccatttgtatgaaatcttttctttttaataagtaaattgtttcttctgtttcaggtaatgcattaacaataatatttgccttttcaataacatcatctaactcttcaattgtataaacttcatcaaattgttcaacattttttcctgacttactaacccctattactttcattccaaaagctttggctaaataagcagccctttgtgcaatcgcaccagttcccaagaataataaagtctcttcgtttaatcttttaccagtaattctggagtcataatttttttctaattgatttctataggaagttttcatctttttataatcatgcaaaatgaatgtcattatatattcagacacttgtttagcttgtatacctttaccatttgttagaatgatatctcgctctttaatataatttaacggtaaattatttacacctgttgcaaaccatccaatccatttaaggttgatacaatgttcaataaaggtacgatctattttgccatcataacctattaaaatgtccatagtttttctatcattaatagggatatttatagctttgtcataaaatttaaattcttcgtttggaaattgttttcttaattcattttctatttcatttaatctatttaagctaacaattttcaaaattaaccctccagaatattttttattgtttcaatttgtgtttttacctttaccttttcaatcacatcaataatgttaccattttcatcgagaataaatgttgttcttacaatccccatattctccttgccaaatgattttttcaattggtaaaccccaactttattagcaagttgataatctttatctacgagtaagtcaaaattcaattggtgtttttttataaaattttgatgtttctttttagaatctgcgcttatgccatatatatctacatcaagttgattaaaatcttcaatgtgatctctaaattcacaagcttcagtagtacacgttggtgtattatctcttggataaaaataaagaatcgttttacgacctttaattgttt

SEQ ID NO: 4465 - DNA, 12 bp, Artificial Sequence
  Description of Artificial Sequence: synthetic nucleic acid sequence
ctttagagcaca

SEQ ID NO: 4466 - DNA, 22 bp, Artificial Sequence
  Description of Artificial Sequence: synthetic nucleic acid sequence
cactatagaactcgagcagctg

SEQ ID NO: 4467 - DNA, 21 bp, Artificial Sequence
  Description of Artificial Sequence: synthetic nucleic acid sequence
cgactcactatagggagaccg

SEQ ID NO: 4468 - DNA, 18 bp, Artificial Sequence
  Description of Artificial Sequence: synthetic nucleic acid sequence
cgttagaacgcggctaca

SEQ ID NO: 4469 - DNA, 19 bp, Artificial Sequence
  Description of Artificial Sequence: synthetic nucleic acid sequence
gttccattggccctcaaac

SEQ ID NO: 4470 - DNA, 20 bp, Artificial Sequence
  Description of Artificial Sequence: synthetic nucleic acid sequence
gccgattcattaatgcaggt

SEQ ID NO: 4471 - DNA, 17 bp, Artificial Sequence
  Description of Artificial Sequence: synthetic nucleic acid sequence
gtaaaacgacggccagt

SEQ ID NO: 4472 - DNA, 17 bp, Artificial Sequence
  Description of Artificial Sequence: synthetic nucleic acid sequence
caggaaacagctatgac
